United States Patent Application Publication US 2011/0183924 A1 - sequence listing, part 190

SEQ ID NO: 455502 - DNA, 1689 bp, Homo sapiens
acccacgtgggggctcagcgtgcacccttctttgtgctcgggttaggaggagctaggctgccatcgggccggtgcagatacggggttgctcttttgctcataagaggggcttcgctggcagtctgaacggcaagcttgagtcaggacccttaattaagatcctcaattggctggagggcagatctcgcgagtagggcaacgcggtaaaaatattgcttcggtgggtgacgcggtacagctgcccaagggcgttcgtaacgggaatgccgaagcgtgggaaaaagggagcggtggcggaagacggggatgagctcaggacaggtaagggaatgaaatcagcccttcttcctagaagctgcggcgggggtgtttgtcattcccttgatgtacggtaagtacgggccgactcatttttgcaggggtttgtgaagaagtcgcaggaaccgtaggctttcgttgggtctatagttaacgccggatcgcagttggaaaccaccagctttttgtcagtatatattactcattttatagagccagaggccaagaagagtaagacggccgcaaagaaaaatgacaaagaggcagcaggagagggcccagccctgtatgaggaccccccagatcagaaaacctcacccagtggcaaacctgccacactcaagatctgctcttggaatgtggatgggcttcgagcctggattaagaagaaaggattagattgggtaaaggaagaagccccagatatactgtgccttcaagagaccaaatgttcagagaacaaactaccagctgaacttcaggagctgcctggactctctcatcaatactggtcagctccttcggacaaggaagggtacagtggcgtgggcctgctttcccgccagtgcccactcaaagtttcttacggcataggcgatgaggagcatgatcaggaaggccgggtgattgtggctgaatttgactcgtttgtgctggtaacagcatatgtacctaatgcaggccgaggtctggtacgactggagtaccggcagcgctgggatgaagcctttcgcaagttcctgaagggcctggcttcccgaaagccccttgtgctgtgtggagacctcaatgtggcacatgaagaaattgaccttcgcaaccccaaggggaacaaaaagaatgctggcttcacgccacaagagcgccaaggcttcggggaattactgcaggctgtgccactggctgacagctttaggcacctctaccccaacacaccctatgcctacaccttttggacttatatgatgaatgctcgatccaagaatgttggttggcgccttgattactttttgttgtcccactctctgttacctgcattgtgtgacagcaagatccgttccaaggccctcggcagtgatcactgtcctatcaccctatacctagcactgtgacaccacccctaaatcactttgagcctgggaaataagccccctcaactaccattccttctttaaacactcttcagagaaatctgcattctatttctcatgtataaaactaggaatcctccaaccaggctcctgtgatagagttcttttaagcccaagattttttatttgagggttttttgttttttaaaaaaaaattgaacaaagactactaatgactttgtttgaattatccacatgaaaataaagagccatagtttca

SEQ ID NO: 455503 - DNA, 1535 bp, Homo sapiens
acccacgtgggggctcagcgtgcacccttctttgtgctcgggttaggaggagctaggctgccatcgggccggtgcagatacggggttgctcttttgctcataagaggggcttcgctggcagtctgaacggcaagcttgagcaacgcggtaaaaatattgcttcggtgggtgacgcggtacagctgcccaagggcgttcgtaacgggaatgccgaagcgtgggaaaaagggagcggtggcggaagacggggatgagctcaggacaggggtttgtgaagaagtcgcaggaaccgtaggctttcgttgggtctatagttaacgccggatcgcagttggaaaccaccagctttttgtcagtatatattactcattttatagagccagaggccaagaagagtaagacggccgcaaagaaaaatgacaaagaggcagcaggagagggcccagccctgtatgaggaccccccagatcagaaaacctcacccagtggcaaacctgccacactcaagatctgctcttggaatgtggatgggcttcgagcctggattaagaagaaaggattagattgggtaaaggaagaagccccagatatactgtgccttcaagagaccaaatgttcagagaacaaactaccagctgaacttcaggagctgcctggactctctcatcaatactggtcagctccttcggacaaggaagggtacagtggcgtgggcctgctttcccgccagtgcccactcaaagtttcttacggcataggcgatgaggagcatgatcaggaaggccgggtgattgtggctgaatttgactcgtttgtgctggtaacagcatatgtacctaatgcaggccgaggtctggtacgactggagtaccggcagcgctgggatgaagcctttcgcaagttcctgaagggcctggcttcccgaaagccccttgtgctgtgtggagacctcaatgtggcacatgaagaaattgaccttcgcaaccccaaggggaacaaaaagaatgctggcttcacgccacaagagcgccaaggcttcggggaattactgcaggctgtgccactggctgacagctttaggcacctctaccccaacacaccctatgcctacaccttttggacttatatgatgaatgctcgatccaagaatgttggttggcgccttgattactttttgttgtcccactctctgttacctgcattgtgtgacagcaagatccgttccaaggccctcggcagtgatcactgtcctatcaccctatacctagcactgtgacaccacccctaaatcactttgagcctgggaaataagccccctcaactaccattccttctttaaacactcttcagagaaatctgcattctatttctcatgtataaaactaggaatcctccaaccaggctcctgtgatagagttcttttaagcccaagattttttatttgagggttttttgttttttaaaaaaaaattgaacaaagactactaatgactttgtttgaattatccacatgaaaataaagagccatagtttca

SEQ ID NO: 455504 - DNA, 1243 bp, Homo sapiens
  misc_feature (40)..(40): n is a, c, g, or t
  misc_feature (68)..(70): n is a, c, g, or t
cgcaacccacccagacccaccccttaaaaaccttagaagnccgagagcgcgccccccatgacgccgtnnnaaggccggcgagcagagccagaggccaagaagagtaagacggccgcaaagaaaaatgacaaagaggcagcaggagagggcccagccctgtatgaggaccccccagatcagaaaacctcacccagtggcaaacctgccacactcaagatctgctcttggaatgtggatgggcttcgagcctggattaagaagaaaggattagattgggtaaaggaagaagccccagatatactgtgccttcaagagaccaaatgttcagagaacaaactaccagctgaacttcaggagctgcctggactctctcatcaatactggtcagctccttcggacaaggaagggtacagtggcgtgggcctgctttcccgccagtgcccactcaaagtttcttacggcataggcgatgaggagcatgatcaggaaggccgggtgattgtggctgaatttgactcgtttgtgctggtaacagcatatgtacctaatgcaggccgaggtctggtacgactggagtaccggcagcgctgggatgaagcctttcgcaagttcctgaagggcctggcttcccgaaagccccttgtgctgtgtggagacctcaatgtggcacatgaagaaattgaccttcgcaaccccaaggggaacaaaaagaatgctggcttcacgccacaagagcgccaaggcttcggggaattactgcaggctgtgccactggctgacagctttaggcacctctaccccaacacaccctatgcctacaccttttggacttatatgatgaatgctcgatccaagaatgttggttggcgccttgattactttttgttgtcccactctctgttacctgcattgtgtgacagcaagatccgttccaaggccctcggcagtgatcactgtcctatcaccctatacctagcactgtgacaccacccctaaatcactttgagcctgggaaataagccccctcaactaccattccttctttaaacactcttcagagaaatctgcattctatttctcatgtataaaactaggaatcctccaaccaggctcctgtgatagagttcttttaagcccaagattttttatttgagggttttttgttttttaaaaaaaaattgaacaaagactactaatgactttgtttgaattatccacatgaaaataaagagccatagtttca

SEQ ID NO: 455505 - DNA, 1290 bp, Homo sapiens
  misc_feature (28)..(28): n is a, c, g, or t
  misc_feature (34)..(34): n is a, c, g, or t
acagacaaacaggcagaatcacctaagncgaaancaaaatcccacttcattttaacgaatgtagttaaattgaataggctcattatcaagagctgaacacggctctctgttctttccggtattctaaaagatgcataaacacaaaaaccatccagttctagatttgaaaattgaagggaatcgcttttaatctattctggctcaggtatgaggaccccccagatcagaaaacctcacccagtggcaaacctgccacactcaagatctgctcttggaatgtggatgggcttcgagcctggattaagaagaaaggattagattgggtaaaggaagaagccccagatatactgtgccttcaagagaccaaatgttcagagaacaaactaccagctgaacttcaggagctgcctggactctctcatcaatactggtcagctccttcggacaaggaagggtacagtggcgtgggcctgctttcccgccagtgcccactcaaagtttcttacggcataggcgatgaggagcatgatcaggaaggccgggtgattgtggctgaatttgactcgtttgtgctggtaacagcatatgtacctaatgcaggccgaggtctggtacgactggagtaccggcagcgctgggatgaagcctttcgcaagttcctgaagggcctggcttcccgaaagccccttgtgctgtgtggagacctcaatgtggcacatgaagaaattgaccttcgcaaccccaaggggaacaaaaagaatgctggcttcacgccacaagagcgccaaggcttcggggaattactgcaggctgtgccactggctgacagctttaggcacctctaccccaacacaccctatgcctacaccttttggacttatatgatgaatgctcgatccaagaatgttggttggcgccttgattactttttgttgtcccactctctgttacctgcattgtgtgacagcaagatccgttccaaggccctcggcagtgatcactgtcctatcaccctatacctagcactgtgacaccacccctaaatcactttgagcctgggaaataagccccctcaactaccattccttctttaaacactcttcagagaaatctgcattctatttctcatgtataaaactaggaatcctccaaccaggctcctgtgatagagttcttttaagcccaagattttttatttgagggttttttgttttttaaaaaaaaattgaacaaagactactaatgactttgtttgaattatccacatgaaaataaagagccatagtttca

SEQ ID NO: 455506 - DNA, 949 bp, Homo sapiens
  misc_feature (874)..(874): n is a, c, g, or t
acccacgtgggggctcagcgtgcacccttctttgtgctcgggttaggaggagctaggctgccatcgggccggtgcagatacggggttgctcttttgctcataagaggggcttcgctggcagtctgaacggcaagcttgagtcaggacccttaattaagatcctcaattggctggagggcagatctcgcgagtagggcaacgcggtaaaaatattgcttcggtgggtgacgcggtacagctgcccaagggcgttcgtaacgggaatgccgaagcgtgggaaaaagggagcggtggcggaagacggggatgagctcaggacagagccagaggccaagaagagtaagacggccgcaaagaaaaatgacaaagaggcagcaggagagggcccagccctgtatgaggaccccccagatcagaaaacctcacccagtggcaaacctgccacactcaagatctgctcttggaatgtggatgggcttcgagcctggattaagaagaaaggattagattgggtaaaggaagaagccccagatatactgtgccttcaagagaccaaatgttcagagaacaaactaccagctgaacttcaggagctgcctggactctctcatcaatactggtcagctccttcggacaaggaagggtacagtggcgtgggcctgctttcccgccagtgcccactcaaagtttcttacggcataggcgatgaggagcatgatcaggaaggccgggtgattgtggctgaatttgactcgtttgtgctggtaacagcatatgtacctaatgcaggccgaggtctggtacgactggagtaccggcagcgctgggatgaagcctttcgcaagttcctgaagggcctggcttcctgtgtggngggcccagtggctgaattgcttcggcccgggacaatgttcccccggccgtcggaagcggcccggagtgccccctg

SEQ ID NO: 455507 - DNA, 259 bp, Homo sapiens
tatgctaattctgtttcatttctataggcgatgaggagcatgatcaggaaggccgggtgattgtggctgaatttgactcgtttgtgctggtaacagcatatgtacctaatgcaggccgaggtctggtacgactggagtaccggcagcgctgggatgaagcctttcgcaagttcctgaagggcctggcttcccgaaagccccttgtgctgtgtggagacctcaatgtggcacatgaagaaattgaccttcgcaaccccaa

SEQ ID NO: 455508 - DNA, 677 bp, Homo sapiens
  misc_feature (550)..(551): n is a, c, g, or t
  misc_feature (556)..(556): n is a, c, g, or t
  misc_feature (571)..(571): n is a, c, g, or t
gcctactactactaaattcgcggccgcgtcgactatctttttttcctcctctaagcccaaagattaactagagtccctccaaccttatagattgttggctttcacaatcttataacctaggatacaggtagtttcgagtatggtgccagtgatgttttgtttttgtttggtcaaggggtaggtgcaacccaatggaccacttatgcaaaagatgtaaactcttgcataatacattgataacatgttttgccaactttaaatgcttaaacataagcgaaaccagtagcaagtatgtgggtcagcttaaaaattttgattgttaatgccctattttctaatttggcacctcttgatgcctaagcaggtaagcagatgcctaagctgtatttctccaaataaatcaagatgaagtactgcccaagttaaatattgatagcctaaagacaagtttatgtagtacttaatgtacatgatatgaatgtgaagcataaaattaaataaaatttttccccattggcttggttttattttaaaaattaaaaaaaaaaannaaaanactataaagagtcgnttttcagtgcactggcccgccttttacaacatggggactggggcgtatatcgataggcccgaccgtcgtcctcccaacagtgccacctgatgggtggttgtagcgt

SEQ ID NO: 455509 - DNA, 2397 bp, Homo sapiens
  misc_feature (25)..(25): n is a, c, g, or t
aacgactatgtactcgcgacgagcnccgggttgttatttcagtcaccagggccggggcttcggtgttcgtgggctttgtcggtccgtgcctcgtctctccctggaaagggagggaggcttcgacgtcgagagggagccgctgccgcgttagttccgagcttgaagtcactaggacttctctcaaacttgtgtgctgaggagactcagatgttggcctcagctcctaggctgaactcagcagatcggcccatgaaaacttctgtattgagacaaaggaagggatctgtcagaaagcaacacttgttatcttgggcttggcagcaaggaagaggacaggtagtggagatcctgcaatctgaaaagcagactgaaaggtgacaaagaagctgaagatgggtggtggagagaggtataacattccagcccctcaatctagaaatgttagtaagaaccaacaacagcttaacagacagaagaccaaggaacagaattcccagatgaagattgttcataagaaaaaagaaagaggacatggttataactcatcagcagctgcctggcaggccatgcaaaatggggggaagaacaaaaattttccaaataatcaaagttggaattctagcttatcaggtcccaggttactttttaaatctcaagctaatcagaactatgctggtgccaaatttagtgagccgccatcaccaagtgttcttcccaaaccaccaagccactgggtccctgtttcctttaatccttcagataaggaaataatgacatttcaacttaaaaccttacttaaagtacaggtataaaataagacaaatgtttaaatttagttatgttcacggatagttgtcaattggtctgaaacaaattcgctagggaatctatttgtgtagaactaattaatgtaaaaaaaatagaccatctcgtgttgtgtgcactgtgatataatggtagtatcagtgcaacttaaactaatgattgtacttgatattaagtgttctcaactgagtaacttttaagtggaaaccaagtttagatttggggagtggtaaaggaatcagctttttctattgttaggggaagacagtaatttatcattcatggaccagtagattgttgaaagttggtgaatcggattataagcttctagctaacacaaggattcagaattaggtaaacatctgaaggtttagtatattagaaacacccaaaccagtaatatgctaacctgatgcactgctgaaagaaaatgtgaatttttcgtaataattgcattttagtgaattgtacagtgggtggaaagggcatttggagctcattagaatgagacatagtacaccccaatggccctgtttattaaatgtagtggattaagtgtctgtcaacaaatacaccaaaaccattttttatagaaacagtatttaatggtcactcaatagctttcaaaatacatttttgtattacagcactgcacaagctattctaatagtgctctggcctcatcattcctgcaaagcttgctttggggagttggataatgtgaaaattttaagtacctaggggagaaagagccatgtaaatatctgtaataaacttgtagcatatgtaaagttttcttggcctttatcttacaaaaatggagtattttagtatgaatttgctgaatgtaagaccgtggactgttttttataatatggcctaattttaaaggtccaaaataacttgtttttaaagtttgcccttgtgctaaagtgccagtgtatgtatgttatacttgatttggttgtaaactatatttcaaagtaaaccctagtgtaataagttttataactaaaaaggtttaagctgctaaaactatttttaagagatgtgaaatgcagtatgggactatctttttttcctcctctaagcccaaagattaactagagtccctccaaccttatagattgttggctttcacaatcttataacctaggatacaggtagtttcgagtatggtgccagtgatgttttgtttttgtttggtcaaggggtaggtgcaacccaatggaccacttatgcaaaagatgtaaactcttgcataatacattgataacatgttttgccaactttaaatgcttaaacataagcgaaaccagtagcaagtatgtgggtcagcttaaaaattttgattgttaatgccctattttctaatttggcacctcttgatgcctaagcaggtaagcagatgcctaagctgtatttctccaaataaatcaagatgaagtactgcccaagttaaatattgatagcctaaagacaagtttatgtagtacttaatgtacatgatatgaatgtgaagcataaaattaaataaaatttttccccattggcttggttttattttaaaaa

SEQ ID NO: 455510 - DNA, 2287 bp, Homo sapiens
tgcagtcgctgccgactccattttgtcggtagaggcagaaggagaaggtcgggttgtagaagctggggtggccggcagctcgctcatcggtgttcgtgggctttgtcggtccgtgcctcgtctctccctggaaagggagggaggcttcgacgtcgagagggagccgctgccgcgttagttccgagcttgaagtcactaggacttctctcaaacttgtgtgctgaggagactcagatgttggcctcagctcctaggctgaactcagcagatcggcccatgaaaacttctgtattgagacaaaggaagggatctgtcagaaagcaacacttgttatcttgggcttggcagcaaggaagaggacaggtagtggagatcctgcaatctgaaaagcagactgaaaggtgacaaagaagctgaagatgggtggtggagagaggtataacattccagcccctcaatctagaaatgttagtaagaaccaacaacagcttaacagacagaagaccaaggaacagaattcccagatgaagattgttcataagaaaaaagaaagaggacatggttataactcatcagcagctgcctggcaggccatgcaaaatggggggaagaacaaaaattttccaaataatcaaagttggaattctagcttatcaggtcccaggttactttttaaatctcaagctaatcagaactatgctggtgccaaatttagtgagccgccatcaccaagtgttcttcccaaaccaccaagccactgggtccctgtttcctttaatccttcagataaggaaataatgacatttcaacttaaaaccttacttaaagtacaggtataaaataagacaaatgtttaaatttagttatgttcacggatagttgtcaattggtctgaaacaaattcgctagggaatctatttgtgtagaactaattaatgtaaaaaaaatagaccatctcgtgttgtgtgcactgtgatataatggtagtatcagtgcaacttaaactaatgattgtacttgatattaagtgttctcaactgagtaacttttaagtggaaaccaagtttagatttggggagtggtaaaggaatcagctttttctattgttaggggaagacagtaatttatcattcatggaccagtagattgttgaaagttggtgaatcggattataagcttctagctaacacaaggattcagaattaggtaaacatctgaaggtttagtatattagaaacacccaaaccagtaatatgctaacctgatgcactgctgaaagaaaatgtgaatttttcgtaataattgcattttagtgaattgtacagtgggtggaaagggcatttggagctcattagaatgagacatagtacaccccaatggccctgtttattaaatgtagtggattaagtgtctgtcaacaaatacaccaaaaccattttttatagaaacagtatttaatggtcactcaatagctttcaaaatacatttttttgtagcatatgtaaagttttcttggcctttatcttacaaaaatggagtattttagtatgaatttgctgaatgtaagaccgtggactgttttttataatatggcctaattttaaaggtccaaaataacttgtttttaaagtttgcccttgtgctaaagtgccagtgtatgtatgttatacttgatttggttgtaaactatatttcaaagtaaaccctagtgtaataagttttataactaaaaaggtttaagctgctaaaactatttttaagagatgtgaaatgcagtatgggactatctttttttcctcctctaagcccaaagattaactagagtccctccaaccttatagattgttggctttcacaatcttataacctaggatacaggtagtttcgagtatggtgccagtgatgttttgtttttgtttggtcaaggggtaggtgcaacccaatggaccacttatgcaaaagatgtaaactcttgcataatacattgataacatgttttgccaactttaaatgcttaaacataagcgaaaccagtagcaagtatgtgggtcagcttaaaaattttgattgttaatgccctattttctaatttggcacctcttgatgcctaagcaggtaagcagatgcctaagctgtatttctccaaataaatcaagatgaagtactgcccaagttaaatattgatagcctaaagacaagtttatgtagtacttaatgtacatgatatgaatgtgaagcataaaattaaataaaatttttccccattggcttggttttattttaaaaa

SEQ ID NO: 455511 - DNA, 2370 bp, Homo sapiens
tgcagtcgctgccgactccattttgtcggtagaggcagaaggagaaggtcgggttgtagaagctggggtggccggcagctcgctcatcggtgttcgtgggctttgtcggtccgtgcctcgtctctccctggaaagggagggaggcttcgacgtcgagagggagccgctgccgcgttagttccgagcttgaagtcactaggacttctctcaaacttgtgtgctgaggagactcagatgttggcctcagctcctaggctgaactcagcagatcggcccatgaaaacttctgtattgagacaaaggaagggatctgtcagaaagcaacacttgttatcttgggcttggcagcaaggaagaggacaggtagtggagatcctgcaatctgaaaagcagactgaaaggtgacaaagaagctgaagatgggtggtggagagaggtataacattccagcccctcaatctagaaatgttagtaagaaccaacaacagcttaacagacagaagaccaaggaacagaattcccagatgaagattgttcataagaaaaaagaaagaggacatggttataactcatcagcagctgcctggcaggccatgcaaaatggggggaagaacatttttaaatctcaagctaatcagaactatgctggtgccaaatttagtgagccgccatcaccaagtgttcttcccaaaccaccaagccactgggtccctgtttcctttaatccttcagataaggaaataatgacatttcaacttaaaaccttacttaaagtacaggtataaaataagacaaatgtttaaatttagttatgttcacggatagttgtcaattggtctgaaacaaattcgctagggaatctatttgtgtagaactaattaatgtaaaaaaaatagaccatctcgtgttgtgtgcactgtgatataatggtagtatcagtgcaacttaaactaatgattgtacttgatattaagtgttctcaactgagtaacttttaagtggaaaccaagtttagatttggggagtggtaaaggaatcagctttttctattgttaggggaagacagtaatttatcattcatggaccagtagattgttgaaagttggtgaatcggattataagcttctagctaacacaaggattcagaattaggtaaacatctgaaggtttagtatattagaaacacccaaaccagtaatatgctaacctgatgcactgctgaaagaaaatgtgaatttttcgtaataattgcattttagtgaattgtacagtgggtggaaagggcatttggagctcattagaatgagacatagtacaccccaatggccctgtttattaaatgtagtggattaagtgtctgtcaacaaatacaccaaaaccattttttatagaaacagtatttaatggtcactcaatagctttcaaaatacatttttgtattacagcactgcacaagctattctaatagtgctctggcctcatcattcctgcaaagcttgctttggggagttggataatgtgaaaattttaagtacctaggggagaaagagccatgtaaatatctgtaataaacttgtagcatatgtaaagttttcttggcctttatcttacaaaaatggagtattttagtatgaatttgctgaatgtaagaccgtggactgttttttataatatggcctaattttaaaggtccaaaataacttgtttttaaagtttgcccttgtgctaaagtgccagtgtatgtatgttatacttgatttggttgtaaactatatttcaaagtaaaccctagtgtaataagttttataactaaaaaggtttaagctgctaaaactatttttaagagatgtgaaatgcagtatgggactatctttttttcctcctctaagcccaaagattaactagagtccctccaaccttatagattgttggctttcacaatcttataacctaggatacaggtagtttcgagtatggtgccagtgatgttttgtttttgtttggtcaaggggtaggtgcaacccaatggaccacttatgcaaaagatgtaaactcttgcataatacattgataacatgttttgccaactttaaatgcttaaacataagcgaaaccagtagcaagtatgtgggtcagcttaaaaattttgattgttaatgccctattttctaatttggcacctcttgatgcctaagcaggtaagcagatgcctaagctgtatttctccaaataaatcaagatgaagtactgcccaagttaaatattgatagcctaaagacaagtttatgtagtacttaatgtacatgatatgaatgtgaagcataaaattaaataaaatttttccccattggcttggttttattttaaaaa

SEQ ID NO: 455512 - DNA, 2370 bp, Homo sapiens
tgcagtcgctgccgactccattttgtcggtagaggcagaaggagaaggtcgggttgtagaagctggggtggccggcagctcgctcatcggtgttcgtgggctttgtcggtccgtgcctcgtctctccctggaaagggagggaggcttcgacgtcgagagggagccgctgccgcgttagttccgagcttgaagtcactaggacttctctcaaacttgtgtgctgaggagactcagatgttggcctcagctcctaggctgaactcagcagatcggcccatgaaaacttctgtattgagacaaaggaagggatctgtcagaaagcaacacttgttatcttgggcttggcagcaaggaagaggacaggtagtggagatcctgcaatgtataacattccagcccctcaatctagaaatgttagtaagaaccaacaacagcttaacagacagaagaccaaggaacagaattcccagatgaagattgttcataagaaaaaagaaagaggacatggttataactcatcagcagctgcctggcaggccatgcaaaatggggggaagaacaaaaattttccaaataatcaaagttggaattctagcttatcaggtcccaggttactttttaaatctcaagctaatcagaactatgctggtgccaaatttagtgagccgccatcaccaagtgttcttcccaaaccaccaagccactgggtccctgtttcctttaatccttcagataaggaaataatgacatttcaacttaaaaccttacttaaagtacaggtataaaataagacaaatgtttaaatttagttatgttcacggatagttgtcaattggtctgaaacaaattcgctagggaatctatttgtgtagaactaattaatgtaaaaaaaatagaccatctcgtgttgtgtgcactgtgatataatggtagtatcagtgcaacttaaactaatgattgtacttgatattaagtgttctcaactgagtaacttttaagtggaaaccaagtttagatttggggagtggtaaaggaatcagctttttctattgttaggggaagacagtaatttatcattcatggaccagtagattgttgaaagttggtgaatcggattataagcttctagctaacacaaggattcagaattaggtaaacatctgaaggtttagtatattagaaacacccaaaccagtaatatgctaacctgatgcactgctgaaagaaaatgtgaatttttcgtaataattgcattttagtgaattgtacagtgggtggaaagggcatttggagctcattagaatgagacatagtacaccccaatggccctgtttattaaatgtagtggattaagtgtctgtcaacaaatacaccaaaaccattttttatagaaacagtatttaatggtcactcaatagctttcaaaatacatttttgtattacagcactgcacaagctattctaatagtgctctggcctcatcattcctgcaaagcttgctttggggagttggataatgtgaaaattttaagtacctaggggagaaagagccatgtaaatatctgtaataaacttgtagcatatgtaaagttttcttggcctttatcttacaaaaatggagtattttagtatgaatttgctgaatgtaagaccgtggactgttttttataatatggcctaattttaaaggtccaaaataacttgtttttaaagtttgcccttgtgctaaagtgccagtgtatgtatgttatacttgatttggttgtaaactatatttcaaagtaaaccctagtgtaataagttttataactaaaaaggtttaagctgctaaaactatttttaagagatgtgaaatgcagtatgggactatctttttttcctcctctaagcccaaagattaactagagtccctccaaccttatagattgttggctttcacaatcttataacctaggatacaggtagtttcgagtatggtgccagtgatgttttgtttttgtttggtcaaggggtaggtgcaacccaatggaccacttatgcaaaagatgtaaactcttgcataatacattgataacatgttttgccaactttaaatgcttaaacataagcgaaaccagtagcaagtatgtgggtcagcttaaaaattttgattgttaatgccctattttctaatttggcacctcttgatgcctaagcaggtaagcagatgcctaagctgtatttctccaaataaatcaagatgaagtactgcccaagttaaatattgatagcctaaagacaagtttatgtagtacttaatgtacatgatatgaatgtgaagcataaaattaaataaaatttttccccattggcttggttttattttaaaaa

SEQ ID NO: 455513 - DNA, 1989 bp, Homo sapiens
tgcagtcgctgccgactccattttgtcggtagaggcagaaggagaaggtcgggttgtagaagctggggtggccggcagctcgctcatcggtgttcgtgggctttgtcggtccgtgcctcgtctctccctggaaagggagggaggcttcgacgtcgagagggagccgctgccgcgttagttccgagcttgaagtcactaggacttctctcaaacttgtgtgctgaggagactcagatgttggcctcagctcctaggctgaactcagcagatcggcccatgaaaacttctgtattgagacaaaggaagggatctgtcagaaagcaacacttgttatcttgggcttggcagcaaggaagaggacaggtagtggagatcctgcaatctgaaaagcagactgaaaggtgacaaagaagctgaagatgggtggtggagagaggtataacattccagcccctcaatctagaaatgttagtaagaaccaacaacagcttaacagacagaagaccaaggaacagaattcccagatgaagattgttcataagaaaaaagaaagaggacatggttataactcatcagcagctgcctggcaggccatgcaaaatggggggaagaacaaaaattttccaaataatcaaagttggaattctagcttatcaggtcccaggttactttttaaatctcaagctaatcagaactatgctggtgccaaatttagtgagccgccatcaccaagtgttcttcccaaaccaccaagccactgggtccctgtttcctttaatccttcagataaggaaataatgacatttcaacttaaaaccttacttaaagtacaggtataaaataagacaaatgtttaaatttagttatgttcacggatagttgtcaattggtctgaaacaaattcgctagggaatctatttgtgtagaactaattaatgtaaaaaaaatagaccatctcgtgttgtgtgcactgtgatataatggtagtatcagtgcaacttaaactaatgattgtacttgatattaagtgttctcaactgagtaacttttaagtggaaaccaagtttagatttggggagtggtaaaggaatcagctttttctattgttaggggaagacagtaatttatcattcatggaccagtagattgttgaaagttggtgaatcggattataagcttctagctaacacaaggattcagaattaggtaaacatctgaaggtttagtatattagaaacacccaaaccagtaatatgctaacctgatgcactgctgaaagaaaatgtgaatttttcgtaataattgcattttagtgaattgtacagtgggtggaaagggcatttggagctcattagaatgagacatagtacaccccaatggccctgtttattaaatgtagtggattaagtgtctgtcaacaaatacaccaaaaccattttttatagaaacagtatttaatggtcactcaatagctttcaaaatacatttttgtattacagcactgcacaagctattctaatagtgctctggcctcatcattcctgcaaagcttgctttggggagttggataatgtgaaaattttaagtacctaggggagaaagagccatgtaaatatctgtaataaacttgtagcatatgtaaagttttcttggcctttatcttacaaaaatggagtattttagtatgaatttgctgaatgtaagaccgtggactgttttttataatatggcctaattttaaaggtccaaaataacttgtttttaaagtttgcccttgtgctaaagtgccagtgtatgtatgttatacttgatttggttgtaaactatatttcaaagtaaaccctagtgtaataagataatttctttttcactagtttcctaagaaatgggtagatcttatctttcagaaatgaaaggtagaccctaaagtctctatgttacttaataagtgtataaatagagaagacagttttcttttgtgagcagcga

SEQ ID NO: 455514 - DNA, 1303 bp, Homo sapiens
  misc_feature (1271)..(1271): n is a, c, g, or t
tgcagtcgctgccgactccattttgtcggtagaggcagaaggagaaggtcgggttgtagaagctggggtggccggcagctcgctcatcggtgttcgtgggctttgtcggtccgtgcctcgtctctccctggaaagggagggaggcttcgacgtcgagagggagccgctgccgcgttagttccgagcttgaagtcactaggacttctctcaaacttgtgtgctgaggagactcagatgttggcctcagctcctaggctgaactcagcagatcggcccatgaaaacttctgtattgagacaaaggaagggatctgtcagaaagcaacacttgttatcttgggcttggcagcaaggaagaggacaggtagtggagatcctgcaatctgaaaagcagactgaaaggtgacaaagaagctgaagatgggtggtggagagaggtataacattccagcccctcaatctagaaatgttagtaagaaccaacaacagcttaacagacagaagaccaaggaacagaattcccagatgaagattgttcataagaaaaaagaaagaggacatggttataactcatcagcagctgcctggcaggccatgcaaaatggggggaagaacaaaaattttccaaataatcaaagttggaattctagcttatcaggtcccaggttactttttaaatctcaagctaatcagaactatgctggtgccaaatttagtgagccgccatcaccaagtgttcttcccaaaccaccaagccactgggtccctgtttcctttaatccttcagataaggaaataatgacatttcaacttaaaaccttacttaaagtacaggtataaaataagacaaatgtttaaatttagttatgttcacggatagttgtcaattggtctgaaacaaattcgctagggaatctatttgtgtagaactaattaatgtaaaaaaaatagaccatctcgtgttgtgtgcactgtgatataatggtagtatcagtgcaacttaaactaatgattgtacttgatattaagtgttctcaactgagtaacttttaagtggaaaccaagtttagatttggggagtggtaaaggaatcagctttttctattgttaggggaagacagtaatttatcattcatggaccagtagattgttgaaagttggtgaatcggattataagcttctagctaacacaaggattcagaattaggtaaacatctgaaggtttagtatattagaaacacccaaaccagtaatatgctaacctgatgcacnactgtcgagattcggtccgagctcgatcgacc

SEQ ID NO: 455515 - DNA, 690 bp, Homo sapiens
gcctactactactaaattcgcggccgcgtcgactttgcccttgtgctaaagtgccagtgtatgtatgttatacttgatttggttgtaaactatatttcaaagtaaaccctagtgtaataagttttataactaaaaaggtttaagctgctaaaactatttttaagagatgtgaaatgcagtatgggactatctttttttcctcctctaagcccaaagattaactagagtccctccaaccttatagattgttggctttcacaatcttataacctaggatacaggtagtttcgagtatggtgccagtgatgttttgtttttgtttggtcaaggggtaggtgcaacccaatggaccacttatgcaaaagatgtaaactcttgcataatacattgataacatgttttgccaactttaaatgcttaaacataagcgaaaccagtagcaagtatgtgggtcagcttaaaaattttgattgttaatgccctattttctaatttggcacctcttgatgcctaagcaggtaagcagatgcctaagctgtatttctccaaataaatcaagatgaagtactgcccaagttaaatattgatagcctaaagacaagtttatgtagtacttaatgtacatgatatgaatgtgaagcataaaattaaataaaatttttccccattggcttggttttattttaaaaa

SEQ ID NO: 455516 - DNA, 536 bp, Homo sapiens
gcctactactactaaattcgcggccgcgtcgactatctttttttcctcctctaagcccaaagattaactagagtccctccaaccttatagattgttggctttcacaatcttataacctaggatacaggtagtttcgagtatggtgccagtgatgttttgtttttgtttggtcaaggggtaggtgcaacccaatggaccacttatgcaaaagatgtaaactcttgcataatacattgataacatgttttgccaactttaaatgcttaaacataagcgaaaccagtagcaagtatgtgggtcagcttaaaaattttgattgttaatgccctattttctaatttggcacctcttgatgcctaagcaggtaagcagatgcctaagctgtatttctccaaataaatcaagatgaagtactgcccaagttaaatattgatagcctaaagacaagtttatgtagtacttaatgtacatgatatgaatgtgaagcataaaattaaataaaatttttccccattggcttggttttattttaaaaa

SEQ ID NO: 455517 - DNA, 484 bp, Homo sapiens
tatggtgccagtgatgttttgtttttgtttggtcaaggggtaggtgcaacccaatggaccacttatgcaaaagatgtaaactcttgcataatacattgataacatgttttgccaactttaaatgcttaaacataagcgaaaccagtagcaagtatgtgggtcagcttaaaaattttgattgttaatgccctattttctaatttggcacctcttgatgcctaagcaggtaagcagatgcctaagctgtatttctccaaataaatcaagatgaagtactgcccaagttaaatattgatagcctaaagacaagtttatgtagtacttaatgtacatgatatgaatgtgaagcataaaattaaataaaatttttccccattggcttggttttattttaaaaaaaatggttttgattgcttaatattctttttaaaaatgtgttttacttgtcactgacttgaagctcataatacactcacaatattcc

SEQ ID NO: 455518 - DNA, 2424 bp, Homo sapiens
tgcagtcgctgccgactccattttgtcggtagaggcagaaggagaaggtcgggttgtagaagctggggtggccggcagctcgctcatcggtgttcgtgggctttgtcggtccgtgcctcgtctctccctggaaagggagggaggcttcgacgtcgagagggagccgctgccgcgttagttccgagcttgaagtcactaggacttctctcaaacttgtgtgctgaggagactcagatgttggcctcagctcctaggctgaactcagcagatcggcccatgaaaacttctgtattgagacaaaggaagggatctgtcagaaagcaacacttgttatcttgggcttggcagcaaggaagaggacaggtagtggagatcctgcaatctgaaaagcagactgaaaggtgacaaagaagctgaagatgggtggtggagagaggtataacattccagcccctcaatctagaaatgttagtaagaaccaacaacagcttaacagacagaagaccaaggaacagaattcccagatgaagattgttcataagaaaaaagaaagaggacatggttataactcatcagcagctgcctggcaggccatgcaaaatggggggaagaacaaaaattttccaaataatcaaagttggaattctagcttatcaggtcccaggttactttttaaatctcaagctaatcagaactatgctggtgccaaatttagtgagccgccatcaccaagtgttcttcccaaaccaccaagccactgggtccctgtttcctttaatccttcagataaggaaataatgacatttcaacttaaaaccttacttaaagtacaggtataaaataagacaaatgtttaaatttagttatgttcacggatagttgtcaattggtctgaaacaaattcgctagggaatctatttgtgtagaactaattaatgtaaaaaaaatagaccatctcgtgttgtgtgcactgtgatataatggtagtatcagtgcaacttaaactaatgattgtacttgatattaagtgttctcaactgagtaacttttaagtggaaaccaagtttagatttggggagtggtaaaggaatcagctttttctattgttaggggaagacagtaatttatcattcatggaccagtagattgttgaaagttggtgaatcggattataagcttctagctaacacaaggattcagaattaggtaaacatctgaaggtttagtatattagaaacacccaaaccagtaatatgctaacctgatgcactgctgaaagaaaatgtgaatttttcgtaataattgcattttagtgaattgtacagtgggtggaaagggcatttggagctcattagaatgagacatagtacaccccaatggccctgtttattaaatgtagtggattaagtgtctgtcaacaaatacaccaaaaccattttttatagaaacagtatttaatggtcactcaatagctttcaaaatacatttttgtattacagcactgcacaagctattctaatagtgctctggcctcatcattcctgcaaagcttgctttggggagttggataatgtgaaaattttaagtacctaggggagaaagagccatgtaaatatctgtaataaacttgtagcatatgtaaagttttcttggcctttatcttacaaaaatggagtattttagtatgaatttgctgaatgtaagaccgtggactgttttttataatatggcctaattttaaaggtccaaaataacttgtttttaaagtttgcccttgtgctaaagtgccagtgtatgtatgttatacttgatttggttgtaaactatatttcaaagtaaaccctagtgtaataagttttataactaaaaaggtttaagctgctaaaactatttttaagagatgtgaaatgcagtatgggactatctttttttcctcctctaagcccaaagattaactagagtccctccaaccttatagattgttggctttcacaatcttataacctaggatacaggtagtttcgagtatggtgccagtgatgttttgtttttgtttggtcaaggggtaggtgcaacccaatggaccacttatgcaaaagatgtaaactcttgcataatacattgataacatgttttgccaactttaaatgcttaaacataagcgaaaccagtagcaagtatgtgggtcagcttaaaaattttgattgttaatgccctattttctaatttggcacctcttgatgcctaagcaggtaagcagatgcctaagctgtatttctccaaataaatcaagatgaagtactgcccaagttaaatattgatagcctaaagacaagtttatgtagtacttaatgtacatgatatgaatgtgaagcataaaattaaataaaatttttccccattggcttggttttattttaaaaa

SEQ ID NO: 455519 - DNA, 2352 bp, Homo sapiens
gaaacggtaacacggcgcgtaaagggctctaattgaacttaaggaccaatggggccaccaagcaggaagtgactgacttgcccgcgtgtgtctgaaccgccttcacagggaggcaacttttgactaggacttctctcaaacttgtgtgctgaggagactcagatgttggcctcagctcctaggctgaactcagcagatcggcccatgaaaacttctgtattgagacaaaggaagggatctgtcagaaagcaacacttgttatcttgggcttggcagcaaggaagaggacaggtagtggagatcctgcaatctgaaaagcagactgaaaggtgacaaagaagctgaagatgggtggtggagagaggtataacattccagcccctcaatctagaaatgttagtaagaaccaacaacagcttaacagacagaagaccaaggaacagaattcccagatgaagattgttcataagaaaaaagaaagaggacatggttataactcatcagcagctgcctggcaggccatgcaaaatggggggaagaacaaaaattttccaaataatcaaagttggaattctagcttatcaggtcccaggttactttttaaatctcaagctaatcagaactatgctggtgccaaatttagtgagccgccatcaccaagtgttcttcccaaaccaccaagccactgggtccctgtttcctttaatccttcagataaggaaataatgacatttcaacttaaaaccttacttaaagtacaggtataaaataagacaaatgtttaaatttagttatgttcacggatagttgtcaattggtctgaaacaaattcgctagggaatctatttgtgtagaactaattaatgtaaaaaaaatagaccatctcgtgttgtgtgcactgtgatataatggtagtatcagtgcaacttaaactaatgattgtacttgatattaagtgttctcaactgagtaacttttaagtggaaaccaagtttagatttggggagtggtaaaggaatcagctttttctattgttaggggaagacagtaatttatcattcatggaccagtagattgttgaaagttggtgaatcggattataagcttctagctaacacaaggattcagaattaggtaaacatctgaaggtttagtatattagaaacacccaaaccagtaatatgctaacctgatgcactgctgaaagaaaatgtgaatttttcgtaataattgcattttagtgaattgtacagtgggtggaaagggcatttggagctcattagaatgagacatagtacaccccaatggccctgtttattaaatgtagtggattaagtgtctgtcaacaaatacaccaaaaccattttttatagaaacagtatttaatggtcactcaatagctttcaaaatacatttttgtattacagcactgcacaagctattctaatagtgctctggcctcatcattcctgcaaagcttgctttggggagttggataatgtgaaaattttaagtacctaggggagaaagagccatgtaaatatctgtaataaacttgtagcatatgtaaagttttcttggcctttatcttacaaaaatggagtattttagtatgaatttgctgaatgtaagaccgtggactgttttttataatatggcctaattttaaaggtccaaaataacttgtttttaaagtttgcccttgtgctaaagtgccagtgtatgtatgttatacttgatttggttgtaaactatatttcaaagtaaaccctagtgtaataagttttataactaaaaaggtttaagctgctaaaactatttttaagagatgtgaaatgcagtatgggactatctttttttcctcctctaagcccaaagattaactagagtccctccaaccttatagattgttggctttcacaatcttataacctaggatacaggtagtttcgagtatggtgccagtgatgttttgtttttgtttggtcaaggggtaggtgcaacccaatggaccacttatgcaaaagatgtaaactcttgcataatacattgataacatgttttgccaactttaaatgcttaaacataagcgaaaccagtagcaagtatgtgggtcagcttaaaaattttgattgttaatgccctattttctaatttggcacctcttgatgcctaagcaggtaagcagatgcctaagctgtatttctccaaataaatcaagatgaagtactgcccaagttaaatattgatagcctaaagacaagtttatgtagtacttaatgtacatgatatgaatgtgaagcataaaattaaataaaatttttccccattggcttggttttattttaaaaa

SEQ ID NO: 455520 - DNA, 2677 bp, Homo sapiens
tgcagtcgctgccgactccattttgtcggtagaggcagaaggagaaggtcgggttgtagaagctggggtggccggcagctcgctcatcggtgttcgtgggctttgtcggtccgtgcctcgtctctccctggaaagggagggaggcttcgacgtcgagagggagccgctgccgcgttagttccgagcttgaagtcactaggacttctctcaaacttgtgtgctgaggagactcagatgttggcctcagctcctaggctgaactcagcagatcggcccatgaaaacttctgtattgagacaaaggaagggatctgtcagaaagcaacacttgttatcttgggcttggcagcaaggaagaggacaggtagtggagatcctgcaatctgaaaagcagactgaaaggtgacaaagaagctgaagatgggtggtggagagaggtataacattccagcccctcaatctagaaatgttagtaagaaccaacaacagcttaacagacagaagaccaaggaacagaattcccagatgaagattgttcataagaaaaaagaaagaggacatggttataactcatcagcagctgcctggcaggccatgcaaaatggggggaagaacaaaaattttccaaataatcaaagttggaattctagcttatcaggtcccaggttactttttaaatctcaagctaatcagaactatgctggtgccaaatttagtgagccgccatcaccaagtgttcttcccaaaccaccaagccactgggtccctgtttcctttaatccttcagataaggaaataatgacatttcaacttaaaaccttacttaaagtacaggtataaaataagacaaatgtttaaatttagttatgttcacggatagttgtcaattggtctgaaacaaattcgctagggaatctatttgtgtagaactaattaatgtaaaaaaaatagaccatctcgtgttgtgtgcactgtgatataatggtagtatcagtgcaacttaaactaatgattgtacttgatattaagtgttctcaactgagtaacttttaagtggaaaccaagtttagatttggggagtggtaaaggaatcagctttttctattgttaggggaagacagtaatttatcattcatggaccagtagattgttgaaagttggtgaatcggattataagcttctagctaacacaaggattcagaattaggtaaacatctgaaggtttagtatattagaaacacccaaaccagtaatatgctaacctgatgcactgctgaaagaaaatgtgaatttttcgtaataattgcattttagtgaattgtacagtgggtggaaagggcatttggagctcattagaatgagacatagtacaccccaatggccctgtttattaaatgtagtggattaagtgtctgtcaacaaatacaccaaaaccattttttatagaaacagtatttaatggtcactcaatagctttcaaaatacatttttgtattacagcactgcacaagctattctaatagtgctctggcctcatcattcctgcaaagcttgctttggggagttggataatgtgaaaattttaagtacctaggggagaaagagccatgtaaatatctgtaataaacttgtagcatatgtaaagttttcttggcctttatcttacaaaaatggagtattttagtatgaatttgctgaatgtaagaccgtggactgttttttataatatggcctaattttaaaggtccaaaataacttgtttttaaagtttgcccttgtgctaaagtgccagtgtatgtatgttatacttgatttggttgtaaactatatttcaaagtaaaccctagtgtaataagttttataactaaaaaggtttaagctgctaaaactatttttaagagatgtgaaatgcagtatgggactatctttttttcctcctctaagcccaaagattaactagagtccctccaaccttatagattgttggctttcacaatcttataacctaggatacaggtagtttcgagtatggtgccagtgatgttttgtttttgtttggtcaaggggtaggtgcaacccaatggaccacttatgcaaaagatgtaaactcttgcataatacattgataacatgttttgccaactttaaatgcttaaacataagcgaaaccagtagcaagtatgtgggtcagcttaaaaattttgattgttaatgccctattttctaatttggcacctcttgatgcctaagcaggtaagcagatgcctaagctgtatttctccaaataaatcaagatgaagtactgcccaagttaaatattgatagcctaaagacaagtttatgtagtacttaatgtacatgatatgaatgtgaagcataaaattaaataaaatttttccccattggcttggttttattttaaaaaaaaaaaacaaaaaaaacaaaaagagggggggcggtaaaaaatttccttggggggtgccaagttaagcggtaccaggtttttgggacaagggggccacaaggggggataaaagaaagaacgggcgggttaacaggtcgggtggcaaaactgtagtgaattttgaagagacaatttggggggctattggaaatcctaagattaagctaggaaatacattagttggtacacgatgtgggagtgtcggtatttgata

SEQ ID NO: 455521 - DNA, 2380 bp, Homo sapiens
tgcagtcgctgccgactccattttgtcggtagaggcagaaggagaaggtcgggttgtagaagctggggtggccggcagctcgctcatcggtgttcgtgggctttgtcggtccgtgcctcgtctctccctggaaagggagggaggcttcgacgtcgagagggagccgctgccgcgttagttccgagcttgaagtcactaggacttctctcaaacttgtgtgctgaggagactcagatgttggcctcagctcctaggctgaactcagcagatcggcccatgaaaacttctgtattgagacaaaggaagggatctgtcagaaagcaacacttgttatcttgggcttggcagcaaggaagaggacaggtagtggagatcctgcaatctgaaaagcagactgaaaggtgacaaagaagctgaagatgggtggtggagagaggtataacattccagcccctcaatctagaaatgttagtaagaaccaacaacagcttaacagacagaagaccaaggaacagaattcccagatgaagattgttcataagaaaaaagaaagaggacatggttataactcatcagcagctgcctggcaggccatgcaaaatggggggaagaacaaaaattttccaaataatcaaagttggaattctagcttatcaggtcccaggttactttttaaatctcaagctaatcagaactatgctggtgccaaatttagtgagccgccatcaccaagtgttcttcccaaaccaccaagccactgggtccctgtttcctttaatccttcagataaggaaataatgacatttcaacttaaaaccttacttaaagtacaggtataaaataagacaaatgtttaaatttagttatgttcacggatagttgtcaattggtctgaaacaaattcgctagggaatctatttgtgtagaactaattaatgtaaaaaaaatagaccatctcgtgttgtgtgcactgtgatataatggtagtatcagtgcaacttaaactaatgattgtacttgatattaagtgttctcaactgagtaacttttaagtggaaaccaagtttagatttggggagtggtaaaggaatcagctttttctattgttaggggaagacagtaatttatcattcatggaccagtagattgttgaaagttggtgaatcggattataagcttctagctaacacaaggattcagaattaggtaaacatctgaaggtttagtatattagaaacacccaaaccagtaatatgctaacctgatgcactgctgaaagaaaatgtgaatttttcgtaataattgcattttagtgaattgtacagtgggtggaaagggcatttggagctcattagaatgagacatagtacaccccaatggccctgtttattaaatgtagtggattaagtgtctgtcaacaaatacaccaaaaccattttttatagaaacagtatttaatggtcactcaatagctttcaaaatacatttttgtattacagcactgcacaagctattctaatagtgctctggcctcatcattcctgcaaagcttgctttggggagttggataatgtgaaaattttaagtacctaggggagaaagagccatgtaaatatctgtaataaacttgtagcatatgtaaagttttcttggcctttatcttacaaaaatggagtattttagtatgaatttgctgaatgtaagaccgtggactgttttttataatatggcctaattttaaaggtccaaaataacttgtttttaaagtttgcccttgtgctaaagtgccagtgtatgtatgttatacttgatttggttgtaaactatatttcaaagtaaaccctagtgtaataagttttataactaaaaaggtttaagctgctaaaactatttttaagagatgtgaaatgcagtatgggactatctttttttcctcctctaagcccaaagattaactagagtccctccaaccttatagattgttggctttcacaatcttataacctaggatacaggtagtttcgagtatggtgccagtgatgttttgtttttgtttggtcaaggggtaggtgcaacccaatggaccacttatgcaaaagatgtaaactcttgcataatacattgataacatgttttgccaactttaaatgcttaaacataagcgaaaccagaacacagcaaggtgggtagcataaaccggacggaacgggctaaattataaatagggacgccggataccaaaccaggaaggaaatgccaactagatgaaccaaccaataaatcacgtaagtccgcgcaattatagcagacacgccgtaagtcacctgactatcgagtaggcgagcacaaatccccgccccaagaacagcccacgacagcc

SEQ ID NO: 455522 - DNA, 1797 bp, Homo sapiens
tgcagtcgctgccgactccattttgtcggtagaggcagaaggagaaggtcgggttgtagaagctggggtggccggcagctcgctcatcggtgttcgtgggctttgtcggtccgtgcctcgtctctccctggaaagggagggaggcttcgacgtcgagagggagccgctgccgcgttagttccgagcttgaagtcactaggacttctctcaaacttgtgtgctgaggagactcagatgttggcctcagctcctaggctgaactcagcagatcggcccatgaaaacttctgtattgagacaaaggaagggatctgtcagaaagcaacacttgttatcttgggcttggcagcaaggaagaggacaggtagtggagatcctgcaatctgaaaagcagactgaaaggtgacaaagaagctgaagatgggtggtggagagaggtataacattccagcccctcaatctagaaatgttagtaagaaccaacaacagcttaacagacagaagaccaaggaacagaattcccagatgaagattgttcataagaaaaaagaaagaggacatggttataactcatcagcagctgcctggcaggccatgcaaaatggggggaagaacaaaaattttccaaataatcaaagttggaattctagcttatcaggtcccaggttactttttaaatctcaagctaatcagaactatgctggtgccaaatttagtgagccgccatcaccaagtgttcttcccaaaccaccaagccactgggtccctgtttcctttaatccttcagataaggaaataatgacatttcaacttaaaaccttacttaaagtacaggtataaaataagacaaatgtttaaatttagttatgttcacggatagttgtcaattggtctgaaacaaattcgctagggaatctatttgtgtagaactaattaatgtaaaaaaaatagaccatctcgtgttgtgtgcactgtgatataatggtagtatcagtgcaacttaaactaatgattgtacttgatattaagtgttctcaactgagtaacttttaagtggaaaccaagtttagatttggggagtggtaaaggaatcagctttttctattgttaggggaagacagtaatttatcattcatggaccagtagattgttgaaagttggtgaatcggattataagcttctagctaacacaaggattcagaattaggtaaacatctgaaggtttagtatattagaaacacccaaaccagtaatatgctaacctgatgcactgctgaaagaaaatgtgaatttttcgtaataattgcattttagtgaattgtacagtgggtggaaagggcatttggagctcattagaatgagacatagtacaccccaatggccctgtttattaaatgtagtggattaagtgtctgtcaacaaatacaccaaaaccattttttatagaaacagtatttaatggtcactcaatagctttcaaaatacatttttgtattacagcactgcacaagctattctaatagtgctctggcctcatcattcctgcaaagcttgctttggggagttggataatgtgaaaattttaagtacctaggggagaaagagccatgtaaatatctgtaataaacttgtagcatatgtaaagttttcttggccttatttctgggattaggataattctgagttaacgggcggttatacagggcattagggacaaacgtgttggccgtgtacaggcggtgttgtacagggtgcgattagaccggtagtataacggagggatatgagggtgtgctcg

SEQ ID NO: 455523 - DNA, 902 bp, Homo sapiens
tggcgtaacgtccggtcaaggcagccatctcgccgtgagacagcaagtgtcggatccgcaggcgcagccgtgcgatgttgtcctctacagccatgtattcggctcctggcagagacttggggatggaaccgcacagagccgcgggccctttgcagctgcgattttcgccctacgttttcaacggaggtactatactggcaattgctggagaagattttgcaattgttgcttctgatactcgattgagtgaagggttttcaattcatacgcgggatagccccaaatgttacaaattaacagacaaaacagtcattggatgcagcggttttcatggagactgtcttacgctgacaaagattattgaagcaagactaaagatgtataagcattccaataataaggccatgactacgggggcaattgctgcaatgctgtctacaatcctgtattcaaggcgcttctttccatactatgtttacaacatcatcggtggacttgatgaagaaggaaagggggctgtatacagctttgatccagtagggtcttaccagagagactccttcaaggctggaggctcagcaagtgccatgctacagcccctgcttgacaaccaggttggttttaagaacatgcagaatgtggagcatgttccgctgtccttggacagagccatgcggctggtgaaagatgtcttcatttctgcggctgagagagatgtgtacactggggacgcactccggatctgcatagtgaccaaagagggcatcagggaggaaactgtttccttaaggaaggactgatctgtgtgctcttatcaccaatcagttcagacctggttgattttgtactttggaactgtaccttggatggttttgtttattaaaagagaaacctgaagtact

SEQ ID NO: 455524 - DNA, 1028 bp, Homo sapiens
gtaattttttctgtaaaggaccagatagtaaatatttacagctttatgggcctcatttgatctgcttctgtagtgaaaaagcagccacggacaatattcatagcaatagggagtaggctggatttggcccctgagccaaactacaggggtagtttgttgacccctggtctatatgcagagtgagggagagagatggatttaaacccatcttccttaggccacttcatgtgccctttcatacacattagctcttggattagcagtacctgagataagggtggtatggaaaatagagtctaaaccagagagctgagggcaaacttggcattccttcccttaaaattttatgttagtaatactgtgttggttgatcatgaaggaaataggcatgctttccccttccactgtggtatgcatttatttattcactttatactgttgattgttctagtctataatggcctctgcctctacatgcctgtgacttttatcaataattgcagatgtataagcattccaataataaggccatgactacgggggcaattgctgcaatgctgtctacaatcctgtattcaaggcgcttctttccatactatgtttacaacatcatcggtggacttgatgaagaaggaaagggggctgtatacagctttgatccagtagggtcttaccagagagactccttcaaggctggaggctcagcaagtgccatgctacagcccctgcttgacaaccaggttggttttaagaacatgcagaatgtggagcatgttccgctgtccttggacagagccatgcggctggtgaaagatgtcttcatttctgcggctgagagagatgtgtacactggggacgcactccggatctgcatagtgaccaaagagggcatcagggaggaaactgtttccttaaggaaggactgatctgtgtgctcttatcaccaatcagttcagacctggttgattttgtactttggaactgtaccttggatggttttgtttattaaaagagaaacctgaagtact

SEQ ID NO: 455525 - DNA, 948 bp, Homo sapiens
tggcgtaacgtccggtcaaggcagccatctcgccgtgagacagcaagtgtcggatccgcaggcgcagccgtgcgatgttgtcctctacagccatgtattcggctcctggcagagacttggggatggaaccgcacagagccgcgggccctttgcagctgcgattttcgccctacgttttcaacggaggtactatactggcaattgctggagaagattttgcaattgttgcttctgatactcgattgagtgaagggttttcaattcatacgcgggatagccccaaatgttacaaattaacagacaaaacagtcattggatgcagcggttttcatggagactgtcttacgctgacaaagattattgaagcaagactaaagatgtataagcattccaataataaggccatgactacgggggcaattgctgcaatgctgtctacaatcctgtattcaaggcgcttctttccatactatgtttacaacatcatcggtggacttgatgaagaaggaaagggggctgtatacagctttgatccagtagggtcttaccagagagactccttcaaggctggaggctcagcaagtgccatgctacagcccctgcttgacaaccaggttggttttaagaacatgcagaatgtggagcatgttccgctgtccttggacagagccatgcggctggtgaaagatgtcttcatttctgcggctgagagagatgtgtacactggggacgcactccggatctgcatagtgaccaaagagggcatcagggaggaaactgtttccttaaggaaggactgatctgtgtgctcttatcaccaatcagttcagacctggttgattttgtactttggaactgtaccttggatggttttgtttattaaaagagaaacctgaagtactaaaaaaaaaacagaattgggggattaatgtgggtgcggaaaacaga

SEQ ID NO: 455526 - DNA, 2043 bp, Homo sapiens
  misc_feature (1010)..(1010): n is a, c, g, or t
ttcttgctcagaataccttcatgatttcttgctaaaattccaaaatctttagcttggcatttgggattttctacagtaggaaccctgtccatcacataaaccttaacgtcactacatgtgcttatgcaaaaagggctgcctgaatgagttgcttgaatgtatgtactatttgaataattacctgtttgccattgcttgctgtttatattacctggaatgccatccttttcttcttgagagctttagcacaaatccctcctcagtaaaaatagtggcttaagtttcctgagtgcttacgtctgtgaggcaccatgcctttaatttccactattgcattgaagcagtggttatagttatcagtcaagccttgtacattaaaatatacacacccaaatatatatacacaccttgtgacacaggtactgttatcatcaacttgcatttggaggatttgtccaagatcacatacctagtaagtagcaagagtgggtctctgtctcatgtaattccagagcccaggtgcttagtcatactccagtgccatagcacttatagctaacacttactagaggaccagttacatgtcagggactgctataagggcttacatatttgatcctttgaacaccctaatgaggtagcaactgcagtgatctctgttgtatatatgatgaaattgacgctttgagaagtaacttacccacagtctcatatctgcgaaacgggaaagccagaattagaacccaggcggtctgcttttggaattctactgtaagtctctttgataagctgtcaaattgtacagccacagagggaaaaatttactgtttgtccatctatttgtcattatataagggattgggtataaagaaataagcattatataggcgttatataaggacttggatataaagaaatgaagcaagaaaaaaaaatctcatcttctctaaactcatagagcttgcgttgtagtaccactgtctatacctgatcctcaagggcacagatgnggtatttagttgttctgtattagtagtaccttgcgcgagtaagtatttaatgtgttggtgatgataattcattggcttttctgttaactcctgccaaggagactttgccctgatttaggcttattaataatttttttttcccagacaactcgtagccaggcgttcattctcttcccgctcatctttcctcttcccatttgaatcatgtttttgttgacatctagagtattttatcccattatgtactatggagcattcttctatttgtagggataggattaccaccctggagaattaatttttttcttttttcctcagtactatactggcaattgctggagaagattttgcaattgttgcttctgatactcgattgagtgaagggttttcaattcatacgcgggatagccccaaatgttacaaattaacagacaaaacagtcattggatgcagcggttttcatggagactgtcttacgctgacaaagattattgaagcaagactaaagatgtataagcattccaataataaggccatgactacgggggcaattgctgcaatgctgtctacaatcctgtattcaaggcgcttctttccatactatgtttacaacatcatcggtggacttgatgaagaaggaaagggggctgtatacagctttgatccagtagggtcttaccagagagactccttcaaggctggaggctcagcaagtgccatgctacagcccctgcttgacaaccaggttggttttaagaacatgcagaatgtggagcatgttccgctgtccttggacagagccatgcggctggtgaaagatgtcttcatttctgcggctgagagagatgtgtacactggggacgcactccggatctgcatagtgaccaaagagggcatcagggaggaaactgtttccttaaggaaggactgatctgtgtgctcttatcaccaatcagttcagacctggttgattttgtactttggaactgtaccttggatggttttgtttattaaaagagaaacctgaagtact

SEQ ID NO: 455527 - DNA, 684 bp, Homo sapiens
aaaaatattccattgtgtcgttataaccaaattagagaaaggtttccatttcacacgggatacgcccaatgtgtcaatttaccaccaacccgctcttgatacacaggttttcattgaactctctctcgctgtccaaagtttttttagcgcaagcctaaagttgtataacctttccattattaggccattctctcgggggccatttctgccattccggtctccatcctggattccaagcgcctctttccaaactatgtttccaacatcctcggttgactttattaagaaagaaagggggctgtatacagctttgatccagtagggtcttaccagagagactccttcaaggctggaggctcagcaagtgccatgctacagcccctgcttgacaaccaggttggttttaagaacatgcagaatgtggagcatgttccgctgtccttggacagagccatgcggctggtgaaagatgtcttcatttctgcggctgagagagatgtgtacactggggacgcactccggatctgcatagtgaccaaagagggcatcagggaggaaactgtttccttaaggaaggactgatctgtgtgctcttatcaccaatcagttcagacctggttgattttgtactttggaactgtaccttggatggttttgtttattaaaagagaaacctgaagtact

SEQ ID NO: 455528 - DNA, 478 bp, Homo sapiens
ttgtcagatttctgatgtgtgtaattcatccaggtctggaagggtctttattcagtctgaaggacattttaattttgtgtagtattttcatcacaaatcctcgtacacatgagggtattggaagaaacttgaacctttcctttgtgctcactgtcacatgacatctcacccaagtttcatgtcccaccaggttggttttaagaacatgcagaatgtggagcatgttccgctgtccttggacagagccatgcggctggtgaaagatgtcttcatttctgcggctgagagagatgtgtacactggggacgcactccggatctgcatagtgaccaaagagggcatcagggaggaaactgtttccttaaggaaggactgatctgtgtgctcttatcaccaatcagttcagacctggttgattttgtactttggaactgtaccttggatggttttgtttattaaaagagaaacctgaagtact

SEQ ID NO: 455529 - DNA, 385 bp, Homo sapiens
ggctgtagcatggcacttgctgagcctccagccttgaaggagtctctctggtaagaccctactggatcaaagctgtatacagcccctgcttgacaacgttggttttaagaacatgcagaatgtggagcatgttccgctgtccttggacagagccatgcggctggtgaaagatgtcttcatttctgcggctgagagagatgtgtacactggggacgcactccggatctgcatagtgaccaaagagggcatcagggaggaaactgtttccttaaggaaggactgatctgtgtgctcttatcaccaatcagttcagacctggttgattttgtactttggaactgtaccttggatggttttgtttattaaaagagaaacctgaagtact

SEQ ID NO: 455530 - DNA, 313 bp, Homo sapiens
gcggccgcctactactactactgctcgaattcaagcttctaacgatgtacggggacatgttccgctgtccttggacagagccatgcggctggtgaaagatgtcttcatttctgcggctgagagagatgtgtacactggggacgcactccggatctgcatagtgaccaaagagggcatcagggaggaaactgtttccttaaggaaggactgatctgtgtgctcttatcaccaatcagttcagacctggttgattttgtactttggaactgtaccttggatggttttgtttattaaaagagaaacctgaagtact

SEQ ID NO: 455531 - DNA, 195 bp, Homo sapiens
tgtgtggtgatctagaggatcccagatatccggatctgcatagtgaccaaagagggcatcagggaggaaactgtttccttaaggaaggactgatctgtgtgctcttatcaccaatcagttcagacctggttgattttgtactttggaactgtaccttggatggttttgtttattaaaagagaaacctgaagtact

SEQ ID NO: 455532 - DNA, 1649 bp, Homo sapiens
tggcgtaacgtccggtcaaggcagccatctcgccgtgagacagcaagtgtcggatccgcaggcgcagccgtgcgatgttgtcctctacagccatgtattcggctcctggcagagacttggggatggaaccgcacagagccgcgggccctttgcagctgcgattttcgccctacgttttcaacggagggtaaaaaccccagagagctgcggctttcactttcgcccttcccccatctgctgaagcctatttaggagtcaccgccgtgatggcgctgccccgggctcctgcaggcctcagaaccctgagctgagggggtccgcacaaggccggtctccctgccgtcctctcatgccctgtgtttccctcttcaggctcgctttgctcaagtttacttggtgattgcgatacagccttggtttttagggtttcccattacagtcatgtcatttgagtttttatgtggaccgccactccgtgctccttgctgctgtaagacagtaaagtagaaattgaaacatagcctctgctctgtggaagaccattaaaactggacctcatgtacacgtttcttatgccagccggcgagggtagagggttagcgtctgaaacttaaaagttagggttgtttggtctgtgttgttagatgcatagctgggttggtagccgagatgtctaattgtagccgcctgatttctgttatttctaattgtagcagtttaatcattttgttttatttcaaatagaaggtgggattggctgagcaaacttagtttcatagataagtgcttttttttttaacgtttagcttaagttcaggaaaacaaaatactcagaagatggaccttttagtatgtgtgttcttgtatgttatgttcaagttttggtttttattttaattaccagctttatcttgagtagtataattttccgtggtggcacgccagagatttagggttatagaaagatgctctgtttaagactcttgacagggaagagctgtaaattgaaacagtggttatagttaccaatcaagccttgtacattaaaatatacacacgcaatttgaacgaaccgatggttcttaaaacagaaaatattggctgggcagtgtggctcgcacctgtaatcccaggactttgggaagccaaggcaggaggatcatcgcttgaggccaggagttgaagaccagcctgcgcagcatagcaagaccccatctctacaaaaataaattttaaaaacaaagcaaaaatgttaattggttcctcataaatttgaaatataaatgcacattttgggagtgtgttagaaagataacgaaagtctgattttagccttggttctgccactaaaggacactttgggtacttctgaacttcttgaacctaaatttccttatcttccttagtagcttcatagtttttggtgagaatcaagagagatgcattttgtaaattgcaagctgtcatcttatttaatcctcatgaaaagtgaatgttagatgatattagcatcctagggttatattagacgttaaactgtcagggtcagagagctggtgtgaagttgagccaggacttaattcatagctatttcaccactgagtttatggatgcttttccattatacaccttaacacttcctgtccaaa

SEQ ID NO: 455533 - DNA, 1034 bp, Homo sapiens
  misc_feature (907)..(907): n is a, c, g, or t
  misc_feature (912)..(912): n is a, c, g, or t
  misc_feature (919)..(920): n is a, c, g, or t
  misc_feature (924)..(925): n is a, c, g, or t
  misc_feature (930)..(930): n is a, c, g, or t
  misc_feature (933)..(933): n is a, c, g, or t
  misc_feature (953)..(953): n is a, c, g, or t
tggcgtaacgtccggtcaaggcagccatctcgccgtgagacagcaagtgtcggatccgcaggcgcagccgtgcgatgttgtcctctacagccatgtattcggctcctggcagagacttggggatggaaccgcacagagccgcgggccctttgcagctgcgattttcgccctacgttttcaacggaggtactatactggcaattgctggagaagattttgcaattgttgcttctgatactcgattgagtgaagggttttcaattcatacgcgggatagccccaaatgttacaaattaacagacaaaacagtcattggatgcagcggttttcatggagactgtcttacgctgacaaagattattgaagcaagactaaagatgtataagcattccaataataaggccatgactacgggggcaattgctgcaatgctgtctacaatcctgtattcaaggcgcttctttccatactatgtttacaacatcatcggtggacttgatgaagaaggaaagggggctgtatacagctttgatccagtagggtcttaccagagagactccttcaaggctggaggctcagcaagtgccatgctacagcccctgcttgacaaccaggttggttttaagaacatgcagaatgtggagcatgttccgctgtccttggacagagccatgcggctggtgaaagatgtcttcatttctgcggctgagagagatgtgtacactggggacgcactccggatctgcatagtgaccaaagagggcatcagggaggaaactgtttccttaaggaaggactgatctgtgtgctcttatcaccaatcagttcagacctggttgattttgtactttggaactgtaccttggatggttttgtttattaaaagagaaacctgaagtactctgantaaanaaaaaanngggnnttttnggngggaggttgaaggctgttanggtccgccgttgcaagggagcggccatggggtatcgaccgtgggctacatataacatttagtgttaaaattatctctcaca

SEQ ID NO: 455534 - DNA, 1020 bp, Homo sapiens
tggcgtaacgtccggtcaaggcagccatctcgccgtgagacagcaagtgtcggatccgcaggcgcagccgtgcgatgttgtcctctacagccatgtattcggctcctggcagagacttggggatggaaccgcacagagccgcgggccctttgcagctgcgattttcgccctacgttttcaacggagggctcgctttgctcaagtttacttggtgattgcgatacagccttggtttttagggtttcccattacagtcatgtcatttgagtttttatgtggaccgccactccgtgctccttgctgcttactatactggcaattgctggagaagattttgcaattgttgcttctgatactcgattgagtgaagggttttcaattcatacgcgggatagccccaaatgttacaaattaacagacaaaacagtcattggatgcagcggttttcatggagactgtcttacgctgacaaagattattgaagcaagactaaagatgtataagcattccaataataaggccatgactacgggggcaattgctgcaatgctgtctacaatcctgtattcaaggcgcttctttccatactatgtttacaacatcatcggtggacttgatgaagaaggaaagggggctgtatacagctttgatccagtagggtcttaccagagagactccttcaaggctggaggctcagcaagtgccatgctacagcccctgcttgacaaccaggttggttttaagaacatgcagaatgtggagcatgttccgctgtccttggacagagccatgcggctggtgaaagatgtcttcatttctgcggctgagagagatgtgtacactggggacgcactccggatctgcatagtgaccaaagagggcatcagggaggaaactgtttccttaaggaaggactgatctgtgtgctcttatcaccaatcagttcagacctggttgattttgtactttggaactgtaccttggatggttttgtttattaaaagagaaacctgaagtact

SEQ ID NO: 455535 - DNA, 1205 bp, Homo sapiens
tggcgtaacgtccggtcaaggcagccatctcgccgtgagacagcaagtgtcggatccgcaggcgcagccgtgcgatgttgtcctctacagccatgtattcggctcctggcagagacttggggatggaaccgcacagagccgcgggccctttgcagctgcgattttcgccctacgttttcaacggagggtaaaaaccccagagagctgcggctttcactttcgcccttcccccatctgctgaagcctatttaggagtcaccgccgtgatggcgctgccccgggctcctgcaggcctcagaaccctgagctgagggggtccgcacaaggccggtctccctgccgtcctctcatgccctgtgtttccctcttcaggctcgctttgctcaagtttacttggtgattgcgatacagccttggtttttagggtttcccattacagtcatgtcatttgagtttttatgtggaccgccactccgtgctccttgctgcttactatactggcaattgctggagaagattttgcaattgttgcttctgatactcgattgagtgaagggttttcaattcatacgcgggatagccccaaatgttacaaattaacagacaaaacagtcattggatgcagcggttttcatggagactgtcttacgctgacaaagattattgaagcaagactaaagatgtataagcattccaataataaggccatgactacgggggcaattgctgcaatgctgtctacaatcctgtattcaaggcgcttctttccatactatgtttacaacatcatcggtggacttgatgaagaaggaaagggggctgtatacagctttgatccagtagggtcttaccagagagactccttcaaggctggaggctcagcaagtgccatgctacagcccctgcttgacaaccaggttggttttaagaacatgcagaatgtggagcatgttccgctgtccttggacagagccatgcggctggtgaaagatgtcttcatttctgcggctgagagagatgtgtacactggggacgcactccggatctgcatagtgaccaaagagggcatcagggaggaaactgtttccttaaggaaggactgatctgtgtgctcttatcaccaatcagttcagacctggttgattttgtactttggaactgtaccttggatggttttgtttattaaaagagaaacctgaagtact

SEQ ID NO: 455536 - DNA, 845 bp, Homo sapiens
tggcgtaacgtccggtcaaggcagccatctcgccgtgagacagcaagtgtcggatccgcaggcgcagccgtgcgatgttgtcctctacagccatgtattcggctcctggcagagacttggggatggaaccgcacagagccgcgggccctttgcagctgcgattttcgccctacgttttcaacggaggtactatactggcaattgctggagaagattttgcaattgttgcttctgatactcgattgagtgaagggttttcaattcatacgcgggatagccccaaatgttacaaattaaagattattgaagcaagactaaagatgtataagcattccaataataaggccatgactacgggggcaattgctgcaatgctgtctacaatcctgtattcaaggcgcttctttccatactatgtttacaacatcatcggtggacttgatgaagaaggaaagggggctgtatacagctttgatccagtagggtcttaccagagagactccttcaaggctggaggctcagcaagtgccatgctacagcccctgcttgacaaccaggttggttttaagaacatgcagaatgtggagcatgttccgctgtccttggacagagccatgcggctggtgaaagatgtcttcatttctgcggctgagagagatgtgtacactggggacgcactccggatctgcatagtgaccaaagagggcatcagggaggaaactgtttccttaaggaaggactgatctgtgtgctcttatcaccaatcagttcagacctggttgattttgtactttggaactgtaccttggatggttttgtttattaaaagagaaacctgaagtact

SEQ ID NO: 455537 - DNA, 838 bp, Homo sapiens
tggcgtaacgtccggtcaaggcagccatctcgccgtgagacagcaagtgtcggatccgcaggcgcagccgtgcgatgttgtcctctacagccatgtattcggctcctggcagagacttggggatggaaccgcacagagccgcgggccctttgcagctgcgattttcgccctacgttttcaacggaggtactatactggcaattgctggagaagattttgcaattgttgcttctgatactcgattgagtgaagggttttcaattcatacgcgggatagccccaaatgttacaaattttttatcaataattgcagatgtataagcattccaataataaggccatgactacgggggcaattgctgcaatgctgtctacaatcctgtattcaaggcgcttctttccatactatgtttacaacatcatcggtggacttgatgaagaaggaaagggggctgtatacagctttgatccagtagggtcttaccagagagactccttcaaggctggaggctcagcaagtgccatgctacagcccctgcttgacaaccaggttggttttaagaacatgcagaatgtggagcatgttccgctgtccttggacagagccatgcggctggtgaaagatgtcttcatttctgcggctgagagagatgtgtacactggggacgcactccggatctgcatagtgaccaaagagggcatcagggaggaaactgtttccttaaggaaggactgatctgtgtgctcttatcaccaatcagttcagacctggttgattttgtactttggaactgtaccttggatggttttgtttattaaaagagaaacctgaagtact

SEQ ID NO: 455538 - DNA, 663 bp, Homo sapiens
  misc_feature (18)..(19): n is a, c, g, or t
  misc_feature (44)..(44): n is a, c, g, or t
tacggcggcgcgccgcgnncgggcggcgggcgcgcccacgcggnagcccgacgtgcaagttcgcggcggacagacgaggacgcgcgggcccatggagacggtctcacgctgacaccgatccgcgaagcaagactaaagatgtataagcattccaataataaggccatgactacgggggcaattgctgcaatgctgtctacaatcctgtattcaaggcgcttctttccatactatgtttacaacatcatcggtggacttgatgaagaaggaaagggggctgtatacagctttgatccagtagggtcttaccagagagactccttcaaggctggaggctcagcaagtgccatgctacagcccctgcttgacaaccaggttggttttaagaacatgcagaatgtggagcatgttccgctgtccttggacagagccatgcggctggtgaaagatgtcttcatttctgcggctgagagagatgtgtacactggggacgcactccggatctgcatagtgaccaaagagggcatcagggaggaaactgtttccttaaggaaggactgatctgtgtgctcttatcaccaatcagttcagacctggttgattttgtactttggaactgtaccttggatggttttgtttattaaaagagaaacctgaagtact

SEQ ID NO: 455539 - DNA, 868 bp, Homo sapiens
tggcgtaacgtccggtcaaggcagccatctcgccgtgagacagcaagtgtcggatccgcaggcgcagccgtgcgatgttgtcctctacagccatgtattcggctcctggcagagacttggggatggaaccgcacagagccgcgggccctttgcagctgcgattttcgccctacgttttcaacggaggtactatactggcaattgctggagaagattttgcaattgttgcttctgatactcgattgagtgaagggttttcaattcatacgcgggatagccccaaatgttacaaattaacagacaaaacagtcattggatgcagcggttttcatggagactgtcttacgctgacaaagattattgaagcaagactaaagatgtataagcattccaataataaggccatgactacgggggcaattgctgcaatgctgtctacaatcctgtattcaaggcgcttctttccatactatgtttacaacatcatcggtggacttgatgaagaaggaaagggggctgtatacagctttgatccagtagggtcttaccagagagactccttcaaggctggaggctcagcaagtgccatgctacagcccctgcttgacaaccaggacacggcaacgcgaccctcgccaaatgctgttgcctggatcttggactccctggcctccgtaatgatctaaggtcacacattgcctccttgcattaaggagaaaacgagaatgctctaatggcctttgagttaaggaaagttggcggatgacaaatgtgattcctctgcactctctgagacccaagtctgctccccggtgcctcacagaggacatgccccagggcccgcggggcctgcatccagcagtgccca

SEQ ID NO: 455540 - DNA, 505 bp, Homo sapiens
  misc_feature (6)..(7): n is a, c, g, or t
  misc_feature (10)..(10): n is a, c, g, or t
  misc_feature (21)..(22): n is a, c, g, or t
tcgacnnttntgagcaggccnnaaccgaagcggcacgagataacttctcccactcatatcttcagttcacctaatgaaatgaatggatagcaagagccttaaagtccaaggaaagggggctgtatacagctttgatccagtagggtcttaccagagagactccttcaaggctggaggctcagcaagtgccatgctacagcccctgcttgacaaccaggttggttttaagaacatgcagaatgtggagcatgttccgctgtccttggacagagccatgcggctggtgaaagatgtcttcatttctgcggctgagagagatgtgtacactggggacgcactccggatctgcatagtgaccaaagagggcatcagggaggaaactgtttccttaaggaaggactgatctgtgtgctcttatcaccaatcagttcagacctggttgattttgtactttggaactgtaccttggatggttttgtttattaaaagagaaacctgaagtact

SEQ ID NO: 455541 - DNA, 1172 bp, Homo sapiens
tggcgtaacgtccggtcaaggcagccatctcgccgtgagacagcaagtgtcggatccgcaggcgcagccgtgcgatgttgtcctctacagccatgtattcggctcctggcagagacttggggatggaaccgcacagagccgcgggccctttgcagctgcgattttcgccctacgttttcaacggaggtactatactggcaattgctggagaagattttgcaattgttgcttctgatactcgattgagtgaagggttttcaattcatacgcgggatagccccaaatgttacaaattaacagacaaaacagtcattggatgcagcggttttcatggagactgtcttacgctgacaaagattattgaagcaagactaaagatgtataagcattccaataataaggccatgactacgggggcaattgctgcaatgctgtctacaatcctgtattcaaggcgcttctttccatactatgtttacaacatcatcggtggacttgatgaagaaggaaagggggctgtatacagctttgatccagtagggtcttaccagagagactccttcaaggctggaggctcagcaagtgccatgctacagcccctgcttgacaaccaggttggttttaagaacatgcagaatgtggagcatgttccgctgtccttggacagagccatgcggctggtgaaagatgtcttcatttctgcggctgagagagatgtgtacactggggacgcactccggatctgcatagtgaccaaagagggcatcagggaggaaactgtttccttaaggaaggactgatctgtgtgctcttatcaccaatcagttcagacctggttgattttgtactttggaactgtaccttggatggttttgtttattaaaagagaaacctgaagtactaaaaaaaaaggagcacaaattcatgcgacagacaaaagcaacagagaaaaaaagaagaggggggggctataaaatttccagggggggccaacttatacgtacgccattttgtaacaggggccactaggagagcataataaagaggaggggccgtttaacacttgggtggcaagtctcttggcttggagaccattcggtgtgaacttggacacctcgataggtcggaaaagtatgtttggtacagtctggtgtaatgcagttaaagcggat

SEQ ID NO: 455542 - DNA, 1294 bp, Homo sapiens
ggagtctggaaagcaggggcagatatgggcaggggacagagcgcaggaagggctctgtgctttggctggactgaggggatgtgcctggccatccacaaggagcgattcaggccattcccaggagggtctgttgtgcaccctgacttgctgggttgttttccccccaagacggagtcttgctctgtcacccaggctggagtgcagcggcgcaatctcggctcactgcaacatccgtctcccaggttcaaatgattatcttttcccagcctcctacgtagctgggactacgggcagcaccaccacactcagcaaattttttgtatttttagtagcaatgaggtttcaccatgttggccaggctggtctcgaacttctggcctcaggtgatccacctgcctcggcctcacaaagtgttgggattacaggcgtgagccactgcgtctggcctggcttgctgttcttatttatgaagctcacagtggcacatccatgtgacagaaaccaagtcatctacacagattctgtagggaacaggttcttctgcgcacagtagcgggcagccatttcatcagcaaacgcagcctcccacagagctgatctggtgtggactgccggtgggtttggaatctgggatgtgggatgtgggctcggggtgtggacatggggtcaggtggaccctgcttccatgcagaccctgccacccacaaactgctcggtgttgggcttggtgtttctcttctgtgagtctccgcttcctcttctgtaaagtgcccacctctcggctgcgtgactgacagttgcgtcagtggtgggtggaatgcaccgtgcggcactcagcacccaccgggcaccgacaggtgcagtgtggcaggggaggctggagccgaggccagccctgggctctgtttggactcgcacttcctctcgtgcccgtccacccaggcccgctcttgccggcacctccgtcctgggcccaggaccctgcttggccccggaatgcggcctgagactccgaggcacggggagcactccatggccacaacgagcaggaagctcattttaaaaatggtgccacctccaccttgtttttttcattttttccacagatctaaggtcacacattgcctccttgcattaaggagaaaacgagaatgctctaatggcctttgagttaaggaaagttggcggatgacaaatgtgattcctctgcactctctgagacccaagtctgctccccggtgcctcacagaggacatgccccagggcccgcggggcctgcatccagcagtgccca

SEQ ID NO: 455543 - DNA, 902 bp, Homo sapiens
  misc_feature (51)..(51): n is a, c, g, or t
  misc_feature (66)..(66): n is a, c, g, or t
  misc_feature (68)..(68): n is a, c, g, or t
  misc_feature (76)..(76): n is a, c, g, or t
  misc_feature (85)..(85): n is a, c, g, or t
  misc_feature (88)..(90): n is a, c, g, or t
  misc_feature (93)..(94): n is a, c, g, or t
  misc_feature (128)..(128): n is a, c, g, or t
  misc_feature (133)..(133): n is a, c, g, or t
  misc_feature (139)..(139): n is a, c, g, or t
  misc_feature (143)..(143): n is a, c, g, or t
  misc_feature (146)..(148): n is a, c, g, or t
  misc_feature (153)..(153): n is a, c, g, or t
  misc_feature (156)..(156): n is a, c, g, or t
  misc_feature (159)..(159): n is a, c, g, or t
  misc_feature (168)..(168): n is a, c, g, or t
  misc_feature (174)..(174): n is a, c, g, or t
cccttctcgcgcccctccgcctatttccgcccccctgcttgtttccggttnggttcctggggtttntnggtttgtntttttgggngcnnntgnnttcatggttggggtttcatatagttttttatttngggtnagatanggtnttnnnctttncanctnctattttcnccctanttttcaacttatttactatactggcaattgctggagaagattttgcaattgttgcttctgatactcgattgagtgaagggttttcaattcatacgcgggatagccccaaatgttacaaattaacagacaaaacagtcattggatgcagcggttttcatggagactgtcttacgctgacaaagattattgaagcaagactaaagatgtataagcattccaataataaggccatgactacgggggcaattgctgcaatgctgtctacaatcctgtattcaaggcgcttctttccatactatgtttacaacatcatcggtggacttgatgaagaaggaaagggggctgtatacagctttgatccagtagggtcttaccagagagactccttcaaggctggaggctcagcaagtgccatgctacagcccctgcttgacaaccaggttggttttaagaacatgcagaatgtggagcatgttccgctgtccttggacagagccatgcggctggtgaaagatgtcttcatttctgcggctgagagagatgtgtacactggggacgcactccggatctgcatagtgaccaaagagggcatcagggaggaaactgtttccttaaggaaggactgatctgtgtgctcttatcaccaatcagttcagacctggttgattttgtactttggaactgtaccttggatggttttgtttattaaaagagaaacctgaagtact

SEQ ID NO: 455544 - DNA, 794 bp, Homo sapiens
tggcgtaacgtccggtcaaggcagccatctcgccgtgagacagcaagtgtcggatccgcaggcgcagccgtgcgatgttgtcctctacagccatgtattcggctcctggcagagacttggggatggaaccgcacagagccgcgggccctttgcagctgcgattttcgccctacgttttcaacggaggaacagacaaaacagtcattggatgcagcggttttcatggagactgtcttacgctgacaaagattattgaagcaagactaaagatgtataagcattccaataataaggccatgactacgggggcaattgctgcaatgctgtctacaatcctgtattcaaggcgcttctttccatactatgtttacaacatcatcggtggacttgatgaagaaggaaagggggctgtatacagctttgatccagtagggtcttaccagagagactccttcaaggctggaggctcagcaagtgccatgctacagcccctgcttgacaaccaggttggttttaagaacatgcagaatgtggagcatgttccgctgtccttggacagagccatgcggctggtgaaagatgtcttcatttctgcggctgagagagatgtgtacactggggacgcactccggatctgcatagtgaccaaagagggcatcagggaggaaactgtttccttaaggaaggactgatctgtgtgctcttatcaccaatcagttcagacctggttgattttgtactttggaactgtaccttggatggttttgtttattaaaagagaaacctgaagtact

SEQ ID NO: 455545 - DNA, 847 bp, Homo sapiens
tggcgtaacgtccggtcaaggcagccatctcgccgtgagacagcaagtgtcggatccgcaggcgcagccgtgcgatgttgtcctctacagccatgtattcggctcctggcagagacttggggatggaaccgcacagagccgcgggccctttgcagctgcgattttcgccctacgttttcaacggaggtactatactggcaattgctggagaagattttgcaattgttgcttctgatactcgattgagtgaagggttttcaattcatacgcgggatagccccaaatgttacaaattaacagacaaaacagtcattggatgcagcggttttcatggagactgtcttacgctgacaaagattattgaagcaagactaaagatgtataagcattccaataataaggccatgactacgggggcaattgctgcaatgctgtctacaatcctgtattcaaggcgcttctttccatactatgtttacaacatcatcggtggacttgatgaagaaggaaagggggctgtatacagctttgatccagtagggtcttaccagagagactccttcaaggctggaggctcagcaagtgccatgctacagcccctgcttgacaaccaggttggttttaagaacatgcagaatgtggagcatgttccgctgtccttggacagagccatgcggctgtccggatctgcatagtgaccaaagagggcatcagggaggaaactgtttccttaaggaaggactgatctgtgtgctcttatcaccaatcagttcagacctggttgattttgtactttggaactgtaccttggatggttttgtttattaaaagagaaacctgaagtact

SEQ ID NO: 455546 - DNA, 1159 bp, Homo sapiens
agcgcctgtgggagccctggagggaactttcccagtccccgaggcggatcgggtgttgcatccatggagcgagctgagagctcgaggtgagcggggctcgcagtcttccggtgtcccctctcgcgcgccctctttgagacccacggcattccaacctccctggaaatggggggaacatggccgaggcgcgtggcgaggcagccccctggaggccccggagtggcgacctcagtgttgcagcgatctcgtgccccttgggtgcgccttgaggccgaggcaagctccttcggggtcctgggctgcgggcaaaggattcggccctgtgaggagttgggttcggcctgtcccagacaggccttgcccacatcccatcacagggccgtggacttgaagcgggagcgtgaaatccccatagactgaatgcatttcctttctacctgttctctctccccttttatttttatttttatagtattttatttttaattttttctcttgtagagacggggatttcgctgcgttgcccagggtggtctcgaacgcctgagctcaagcaatccgcccgccttggcccctcaaagtgctggaattggaggcgtgatgcaccgtgcctggcctttttaaaaaattaaggttattttggggacggtagagcgtccagacacatccttatttgcatagctgcgcagtttttaaaaatgcaatacgtttctacctgttaggatgtgtgatttctggctggtaagctacaccgaatcttggctagcacatttgcattccatgtcagatttgtaaacgcaaatttgctctctgcatttaaatatattagatatatttaggtaactacatttaaatgtattgagacatttaaataaatttggggtctgtgtctaaatgcgctccctcctcaaaataaatatctgaagtgggccgagagcggtgactcacgcctataatcccagcactttgggaggccaaggcgggtggatcatgaagtcaggagttcatgaccagcctggccaacatggtgaaatccgtttctactaaaaatacaaaaattaactgggcatgatggcgggagcctgtaatcctagctactttggaggctgaggcaggagaatcgctggaacccaggaggcggaggttgcagtgagctgag

SEQ ID NO: 455547 - DNA, 725 bp, Homo sapiens
ggtggagctgagggtggaaggggagtgagctgacgctcggaaggtgtcttgagattatcatcggctgagggtggaagcggcccccgcagacgctcggcaggtgtcttgatattatcatctgctgagggtggagctgagggtggaaggggagtgagctgacgctcggaaggtgtcttgagattatcatcggctgagggtggaggcggtgccaccttgaaggagccacaaggagcctgatttcacagaagggtggagggctgagatctagaacctaggcttctctgggggaaggtttttcagggaaggtagtttttgagctgtaatcttgtccagccttattttagagaagaatgcttctgaagagctgccattctgacgtcaaaaaactactaaaacgttgaaccattgtgtctcacactcaggtgatgattgggactgctcttaacacaagcgagatgaagaaactgatcacccacatgggggagatggaccacccctggaactgtccccatggaaggccaaccatgagacacatcgccaacctgggtgtcatttctcagaactgaccgtagtcactgtatggaataattggttttatcgcagatttttatgttttgaaagacagagtcttcactaaccttttttgttttaaaatgaacctgctacttaaaaaaaatacacatcacacccatttaaaagtgatcttgagaaccttttcaaaccag

SEQ ID NO: 455548 - DNA, 2768 bp, Homo sapiens
agcgcctgtgggagccctggagggaactttcccagtccccgaggcggatcgggtgttgcatccatggagcgagctgagagctcgagtacagaacctgctaaggccatcaaacctattgatcggaagtcagtccatcagatttgctctgggcaggtggtactgagtctaagcactgcggtaaaggagttagtagaaaacagtctggatgctggtgccactaatattgatctaaagcttaaggactatggagtggatcttattgaagtttcagacaatggatgtggggtagaagaagaaaacttcgaaggcttaactctgaaacatcacacatctaagattcaagagtttgccgacctaactcaggttgaaacttttggctttcggggggaagctctgagctcactttgtgcactgagcgatgtcaccatttctacctgccacgcatcggcgaaggttggaactcgactgatgtttgatcacaatgggaaaattatccagaaaaccccctacccccgccccagagggaccacagtcagcgtgcagcagttattttccacactacctgtgcgccataaggaatttcaaaggaatattaagaaggagtatgccaaaatggtccaggtcttacatgcatactgtatcatttcagcaggcatccgtgtaagttgcaccaatcagcttggacaaggaaaacgacagcctgtggtatgcacaggtggaagccccagcataaaggaaaatatcggctctgtgtttgggcagaagcagttgcaaagcctcattccttttgttcagctgccccctagtgactccgtgtgtgaagagtacggtttgagctgttcggatgctctgcataatcttttttacatctcaggtttcatttcacaatgcacgcatggagttggaaggagttcaacagacagacagtttttctttatcaaccggcggccttgtgacccagcaaaggtctgcagactcgtgaatgaggtctaccacatgtataatcgacaccagtatccatttgttgttcttaacatttctgttgattcagaatgcgttgatatcaatgttactccagataaaaggcaaattttgctacaagaggaaaagcttttgttggcagttttaaagacctctttgataggaatgtttgatagtgatgtcaacaagctaaatgtcagtcagcagccactgctggatgttgaaggtaacttaataaaaatgcatgcagcggatttggaaaagcccatggtagaaaagcaggatcaatccccttcattaaggactggagaagaaaaaaaagacgtgtccatttccagactgcgagaggccttttctcttcgtcacacaacagagaacaagcctcacagcccaaagactccagaaccaagaaggagccctctaggacagaaaaggggtatgctgtcttctagcacttcaggtgccatctctgacaaaggcgtcctgagacctcagaaagaggcagtgagttccagtcacggacccagtgaccctacggacagagcggaggtggagaaggactcggggcacggcagcacttccgtggattctgaggggttcagcatcccagacacgggcagtcactgcagcagcgagtatgcggccagctccccaggggacaggggctcgcaggaacatgtggactctcaggagaaagcgcctgaaactgacgactctttttcagatgtggactgccattcaaaccaggaagataccggatgtaaatttcgagttttgcctcagccaactaatctcgcaaccccaaacacaaagcgttttaaaaaagaagaaattctttccagttctgacatttgtcaaaagttagtaaatactcaggacatgtcagcctctcaggttgatgtagctgtgaaaattaataagaaagttgtgcccctggacttttctatgagttctttagctaaacgaataaagcagttacatcatgaagcacagcaaagtgaaggggaacagaattacaggaagtttagggcaaagatttgtcctggagaaaatcaagcagccgaagatgaactaagaaaagagataagtaaaacgatgtttgcagaaatggaaatcattggtcagtttaacctgggatttataataaccaaactgaatgaggatatcttcatagtggaccagcatgccacggacgagaagtataacttcgagatgctgcagcagcacaccgtgctccaggggcagaggctcatagcacctcagactctcaacttaactgctgttaatgaagctgttctgatagaaaatctggaaatatttagaaagaatggctttgattttgttatcgatgaaaatgtaaaaactggaccttcggaccccaggacgtcgatgaactgatcttcatgctgagcgacagccctggggtcatgtgccggccttcccgagtcaagcagatgtttgcctccagagcctgccggaagtcggtgatgattgggactgctcttaacacaagcgagatgaagaaactgatcacccacatgggggagatggaccacccctggaactgtccccatggaaggccaaccatgagacacatcgccaacctgggtgtcatttctcagaactgaccgtagtcactgtatggaataattggttttatcgcagatttttatgttttgaaagacagagtcttcactaaccttttttgttttaaaatgaacctgctacttaaaaaaaatacacatcacacccatttaaaagtgatcttgagaaccttttcaaaccag

SEQ ID NO: 455549 - DNA, 2710 bp, Homo sapiens
agcgcctgtgggagccctggagggaactttcccagtccccgaggcggatcgggtgttgcatccatggagcgagctgagagctcgagtacagaacctgctaaggccatcaaacctattgatcggaagtcagtccatcagatttgctctgggcaggtggtactgagtctaagcactgcggtaaaggagttagtagaaaacagtctggatgctggtgccactaatattgatctaaagcttaaggactatggagtggatcttattgaagtttcagacaatggatgtggggtagaagaagaaaacttcgaaggcttaactctgaaacatcacacatctaagattcaagagtttgccgacctaactcaggttgaaacttttggctttcggggggaagctctgagctcactttgtgcactgagcgatgtcaccatttctacctgccacgcatcggcgaaggttggaactcgactgatgtttgatcacaatgggaaaattatccagaaaaccccctacccccgccccagagggaccacagtcagcgtgcagcagttattttccacactacctgtgcgccataaggaatttcaaaggaatattaagaaggagtatgccaaaatggtccaggtcttacatgcatactgtatcatttcagcaggcatccgtgtaagttgcaccaatcagcttggacaaggaaaacgacagcctgtggtatgcacaggtggaagccccagcataaaggaaaatatcggctctgtgtttgggcagaagcagttgcaaagcctcattccttttgttcagctgccccctagtgactccgtgtgtgaagagtacggtttgagctgttcggatgctctgcataatcttttttacatctcaggtttcatttcacaatgcacgcatggagttggaaggagttcaacagacagacagtttttctttatcaaccggcggccttgtgacccagcaaaggtctgcagactcgtgaatgaggtctaccacatgtataatcgacaccagtatccatttgttgttcttaacatttctgttgattcagaatgcgttgatatcaatgttactccagataaaaggcaaattttgctacaagaggaaaagcttttgttggcagttttaaagacctctttgataggaatgtttgatagtgatgtcaacaagctaaatgtcagtcagcagccactgctggatgttgaaggtaacttaataaaaatgcatgcagcggatttggaaaagcccatggtagaaaagcaggatcaatccccttcattaaggactggagaagaaaaaaaagacgtgtccatttccagactgcgagaggccttttctcttcgtcacacaacagagaacaagcctcacagcccaaagactccagaaccaagaaggagccctctaggacagaaaaggggtatgctgtcttctagcacttcaggtgccatctctgacaaaggcgtcctgagacctcagaaagaggcagtgagttccagtcacggacccagtgaccctacggacagagcggaggtggagaaggactcggggcacggcagcacttccgtggattctgaggggttcagcatcccagacacgggcagtcactgcagcagcgagtatgcggccagctccccaggggacaggggctcgcaggaacatgtggactctcaggagaaagcgcctgaaactgacgactctttttcagatgtggactgccattcaaaccaggaagataccggatgtaaatttcgagttttgcctcagccaactaatctcgcaaccccaaacacaaagcgttttaaaaaagaagaaattctttccagttctgacatttgtcaaaagttagtaaatactcaggacatgtcagcctctcaggttgatgtagctgtgaaaattaataagaaagttgtgcccctggacttttctatgagttctttagctaaacgaataaagcagttacatcatgaagcacagcaaagtgaaggggaacagaattacaggaagtttagggcaaagatttgtcctggagaaaatcaagcagccgaagatgaactaagaaaagagataagtaaaacgatgtttgcagaaatggaaatcattggtcagtttaacctgggatttataataaccaaactgaatgaggatatcttcatagtggaccagcatgccacggacgagaagtataacttcgagatgctgcagcagcacaccgtgctccaggggcagaggctcatagcctccagtcactgaaagggctaaactgatttccttgccaactagtaaaaactggaccttcggaccccaggacgtcgatgaactgatcttcatgctgagcgacagccctggggtcatgtgccggccttcccgagtcaagcagatgtttgcctccagagcctgccggaagtcggtgatgattgggactgctcttaacacaagcgagatgaagaaactgatcacccacatgggggagatggaccacccctggaactgtccccatggaaggccaaccatgagacacatcgccaacctgggtgtcatttctcagaactgaccgtagtcactgtatggaataattggttttatcgcagatttttatgttttgaaagacagagtcttcactaaccttttttgttttaaaatgaacctgctacttaaaaaaaatacacatcacacccatttaaaagtgatcttgagaaccttttcaaaccag

SEQ ID NO: 455550 - DNA, 2122 bp, Homo sapiens
agcgcctgtgggagccctggagggaactttcccagtccccgaggcggatcgggtgttgcatccatggagcgagctgagagctcgagtacagaacctgctaaggccatcaaacctattgatcggaagtcagtccatcagatttgctctgggcaggtggtactgagtctaagcactgcggtaaaggagttagtagaaaacagtctggatgctggtgccactaatattgatctaaagcttaaggactatggagtggatcttattgaagtttcagacaatggatgtggggtagaagaagaaaacttcgaaggcttaactctgaaacatcacacatctaagattcaagagtttgccgacctaactcaggttgaaacttttggctttcggggggaagctctgagctcactttgtgcactgagcgatgtcaccatttctacctgccacgcatcggcgaaggttggaactcgactgatgtttgatcacaatgggaaaattatccagaaaaccccctacccccgccccagagggaccacagtcagcgtgcagcagttattttccacactacctgtgcgccataaggaatttcaaaggaatattaagaaggagtatgccaaaatggtccaggtcttacatgcatactgtatcatttcagcaggcatccgtgtaagttgcaccaatcagcttggacaaggaaaacgacagcctgtggtatgcacaggtggaagccccagcataaaggaaaatatcggctctgtgtttgggcagaagcagttgcaaagcctcattccttttgttcagctgccccctagtgactccgtgtgtgaagagtacggtttgagctgttcggatgctctgcataatcttttttacatctcaggtttcatttcacaatgcacgcatggagttggaaggagttcaacagacagacagtttttctttatcaaccggcggccttgtgacccagcaaaggtctgcagactcgtgaatgaggtctaccacatgtataatcgacaccagtatccatttgttgttcttaacatttctgttgattcagaatgcgttgatatcaatgttactccagataaaaggcaaattttgctacaagaggaaaagcttttgttggcagttttaaagacctctttgataggaatgtttgatagtgatgtcaacaagctaaatgtcagtcagcagccactgctggatgttgaaggtaacttaataaaaatgcatgcagcggatttggaaaagcccatggtagaaaagcaggatcaatccccttcattaaggactggagaagaaaaaaaagacgtgtccatttccagactgcgagaggccttttctcttcgtcacacaacagagaacaagcctcacagcccaaagactccagaaccaagaaggagccctctaggacagaaaaggggtatgctgtcttctagcacttcaggtgccatctctgacaaaggcgtcctgagacctcagaaagaggcagtgagttccagtcacggacccagtgaccctacggacagagcggaggtggagaaggactcggggcacggcagcacttccgtggattctgaggggttcagcatcccagacacgggcagtcactgcagcagcgagtatgcggccagctccccaggggacaggggctcgcaggaacatgtggactctcaggagaaagcgcctgaaactgacgactctttttcagatgtggactgccattcaaaccaggaagataccggatgtaaatttcgagttttgcctcagccaactaatctcgcaaccccaaacacaaagcgttttaaaaaagaagaaattctttccagttctgacatttgtcaaaagttagtaaatactcaggacatgtcagcctctcaggttgatgtagctgtgaaaattaataagaaagttgtgcccctggacttttctatgagttctttagctaaacgaataaagcagttacatcatgaagcacagcaaagtgaaggggaacagaattacaggaagtttagggcaaagatttgtcctggagaaaatcaagcagccgaagatgaactaagaaaagagataagtaaaacgatgtttgcaaaatggaaatcattgccttatcgagggtaccgagctg

SEQ ID NO: 455551 - DNA, 2103 bp, Homo sapiens
gtactataagagaccgagataaagaagggaggagaataaaaaggtatataccgattctaatctttctgagacagagtgttgctctgtcacccaggctggagagcagtggtggcatcttggctcactgcaacctctgcctcccgggctaaagggattctcgtgcctcagcctcccaagtagctgggatgacagatatgccaccacacccggctaatttttgtatttttagtagaaacagggttttaccatgttgtccagaccagtcctgaactcctagcctcatgtgatccccctgccttggcctcctaaagtgctgggataacaggcgtaagccaccacacctggcccatattatagttttattttgaacattgaactgtgttcatctgtgtaattagcatgtggatctcctcttttgtgaagtatctgttcacataagcacgtcctctcaccatttcaggatagtccctgaccctcttctccgtccacgtttgcttaggtaacttaataaaaatgcatgcagcggatttggaaaagcccatggtagaaaagcaggatcaatccccttcattaaggactggagaagaaaaaaaagacgtgtccatttccagactgcgagaggccttttctcttcgtcacacaacagagaacaagcctcacagcccaaagactccagaaccaagaaggagccctctaggacagaaaaggggtatgctgtcttctagcacttcaggtgccatctctgacaaaggcgtcctgagacctcagaaagaggcagtgagttccagtcacggacccagtgaccctacggacagagcggaggtggagaaggactcggggcacggcagcacttccgtggattctgaggggttcagcatcccagacacgggcagtcactgcagcagcgagtatgcggccagctccccaggggacaggggctcgcaggaacatgtggactctcaggagaaagcgcctgaaactgacgactctttttcagatgtggactgccattcaaaccaggaagataccggatgtaaatttcgagttttgcctcagccaactaatctcgcaaccccaaacacaaagcgttttaaaaaagaagaaattctttccagttctgacatttgtcaaaagttagtaaatactcaggacatgtcagcctctcaggttgatgtagctgtgaaaattaataagaaagttgtgcccctggacttttctatgagttctttagctaaacgaataaagcagttacatcatgaagcacagcaaagtgaaggggaacagaattacaggaagtttagggcaaagatttgtcctggagaaaatcaagcagccgaagatgaactaagaaaagagataagtaaaacgatgtttgcagaaatggaaatcattggtcagtttaacctgggatttataataaccaaactgaatgaggatatcttcatagtggaccagcatgccacggacgagaagtataacttcgagatgctgcagcagcacaccgtgctccaggggcagaggctcatagcacctcagactctcaacttaactgctgttaatgaagctgttctgatagaaaatctggaaatatttagaaagaatggctttgattttgttatcgatgaaaatgctccagtcactgaaagggctaaactgatttccttgccaactagtaaaaactggaccttcggaccccaggacgtcgatgaactgatcttcatgctgagcgacagccctggggtcatgtgccggccttcccgagtcaagcagatgtttgcctccagagcctgccggaagtcggtgatgattgggactgctcttaacacaagcgagatgaagaaactgatcacccacatgggggagatggaccacccctggaactgtccccatggaaggccaaccatgagacacatcgccaacctgggtgtcatttctcagaactgaccgtagtcactgtatggaataattggttttatcgcagatttttatgttttgaaagacagagtcttcactaaccttttttgttttaaaatgaacctgctacttaaaaaaaatacacatcacacccatttaaaagtgatcttgagaaccttttcaaaccag

SEQ ID NO: 455552 - DNA, 334 bp, Homo sapiens
cacatcagttttggacgcactgcatcacctgtggtgcattggttgactgtaggagctttagaatattccagaaggtttggttctttgatgactcatcaagatttggagcacagatacccgtgaactgcaatagtgatccttatcagcatgtcacctggtgttttgttttcatttcactttaagaatgtgccatgtgatcgtatttctaatccctttcactctggaatcctgcccttaccatattaatgttgaatagcatctcaggtttcatttcacaatgcacgcatggagttggaaggagttcaacagacagacagtttttctttatcaaccg

SEQ ID NO: 455553 - DNA, 2811 bp, Homo sapiens
agcgcctgtgggagccctggagggaactttcccagtccccgaggcggatcgggtgttgcatccatggagcgagctgagagctcgagtacagaacctgctaaggccatcaaacctattgatcggaagtcagtccatcagatttgctctgggcaggtggtactgagtctaagcactgcggtaaaggagttagtagaaaacagtctggatgctggtgccactaatattgatctaaagcttaaggactatggagtggatcttattgaagtttcagacaatggatgtggggtagaagaagaaaacttcgaaggcttaactctgaaacatcacacatctaagattcaagagtttgccgacctaactcaggttgaaacttttggctttcggggggaagctctgagctcactttgtgcactgagcgatgtcaccatttctacctgccacgcatcggcgaaggttggaactcgactgatgtttgatcacaatgggaaaattatccagaaaaccccctacccccgccccagagggaccacagtcagcgtgcagcagttattttccacactacctgtgcgccataaggaatttcaaaggaatattaagaaggagtatgccaaaatggtccaggtcttacatgcatactgtatcatttcagcaggcatccgtgtaagttgcaccaatcagcttggacaaggaaaacgacagcctgtggtatgcacaggtggaagccccagcataaaggaaaatatcggctctgtgtttgggcagaagcagttgcaaagcctcattccttttgttcagctgccccctagtgactccgtgtgtgaagagtacggtttgagctgttcggatgctctgcataatcttttttacatctcaggtttcatttcacaatgcacgcatggagttggaaggagttcaacagacagacagtttttctttatcaaccggcggccttgtgacccagcaaaggtctgcagactcgtgaatgaggtctaccacatgtataatcgacaccagtatccatttgttgttcttaacatttctgttgattcagaatgcgttgatatcaatgttactccagataaaaggcaaattttgctacaagaggaaaagcttttgttggcagttttaaagacctctttgataggaatgtttgatagtgatgtcaacaagctaaatgtcagtcagcagccactgctggatgttgaaggtaacttaataaaaatgcatgcagcggatttggaaaagcccatggtagaaaagcaggatcaatccccttcattaaggactggagaagaaaaaaaagacgtgtccatttccagactgcgagaggccttttctcttcgtcacacaacagagaacaagcctcacagcccaaagactccagaaccaagaaggagccctctaggacagaaaaggggtatgctgtcttctagcacttcaggtgccatctctgacaaaggcgtcctgagacctcagaaagaggcagtgagttccagtcacggacccagtgaccctacggacagagcggaggtggagaaggactcggggcacggcagcacttccgtggattctgaggggttcagcatcccagacacgggcagtcactgcagcagcgagtatgcggccagctccccaggggacaggggctcgcaggaacatgtggactctcaggagaaagcgcctgaaactgacgactctttttcagatgtggactgccattcaaaccaggaagataccggatgtaaatttcgagttttgcctcagccaactaatctcgcaaccccaaacacaaagcgttttaaaaaagaagaaattctttccagttctgacatttgtcaaaagttagtaaatactcaggacatgtcagcctctcaggttgatgtagctgtgaaaattaataagaaagttgtgcccctggacttttctatgagttctttagctaaacgaataaagcagttacatcatgaagcacagcaaagtgaaggggaacagaattacaggaagtttagggcaaagatttgtcctggagaaaatcaagcagccgaagatgaactaagaaaagagataagtaaaacgatgtttgcagaaatggaaatcattggtcagtttaacctgggatttataataaccaaactgaatgaggatatcttcatagtggaccagcatgccacggacgagaagtataacttcgagatgctgcagcagcacaccgtgctccaggggcagaggctcatagcacctcagactctcaacttaactgctgttaatgaagctgttctgatagaaaatctggaaatatttagaaagaatggctttgattttgttatcgatgaaaatgctccagtcactgaaagggctaaactgatttccttgccaactagtaaaaactggaccttcggaccccaggacgtcgatgaactgatcttcatgctgagcgacagccctggggtcatgtgccggccttcccgagtcaagcagatgtttgcctccagagcctgccggaagtcggtgatgattgggactgctcttaacacaagcgagatgaagaaactgatcacccacatgggggagatggaccacccctggaactgtccccatggaaggccaaccatgagacacatcgccaacctgggtgtcatttctcagaactgaccgtagtcactgtatggaataattggttttatcgcagatttttatgttttgaaagacagagtcttcactaaccttttttgttttaaaatgaacctgctacttaaaaaaaatacacatcacacccatttaaaagtgatcttgagaaccttttcaaaccag

SEQ ID NO: 455554 - DNA, 2844 bp, Homo sapiens
agcgcctgtgggagccctggagggaactttcccagtccccgaggcggatcgggtgttgcatccatggagcgagctgagagctcgagtacagaacctgctaaggccatcaaacctattgatcggaagtcagtccatcagatttgctctgggcaggtggtactgagtctaagcactgcggtaaaggagttagtagaaaacagtctggatgctggtgccactaatattgatctaaagcttaaggactatggagtggatcttattgaagtttcagacaatggatgtggggtagaagaagaaaacttcgaaggcttaactctgaaacatcacacatctaagattcaagagtttgccgacctaactcaggttgaaacttttggctttcggggggaagctctgagctcactttgtgcactgagcgatgtcaccatttctacctgccacgcatcggcgaaggttggaactcgactgatgtttgatcacaatgggaaaattatccagaaaaccccctacccccgccccagagggaccacagtcagcgtgcagcagttattttccacactacctgtgcgccataaggaatttcaaaggaatattaagaaggagtatgccaaaatggtccaggtcttacatgcatactgtatcatttcagcaggcatccgtgtaagttgcaccaatcagcttggacaaggaaaacgacagcctgtggtatgcacaggtggaagccccagcataaaggaaaatatcggctctgtgtttgggcagaagcagttgcaaagcctcattccttttgttcagctgccccctagtgactccgtgtgtgaagagtacggtttgagctgttcggatgctctgcataatcttttttacatctcaggtttcatttcacaatgcacgcatggagttggaaggagttcaacagacagacagtttttctttatcaaccggcggccttgtgacccagcaaaggtctgcagactcgtgaatgaggtctaccacatgtataatcgacaccagtatccatttgttgttcttaacatttctgttgattcagaatgcgttgatatcaatgttactccagataaaaggcaaattttgctacaagaggaaaagcttttgttggcagttttaaagacctctttgataggaatgtttgatagtgatgtcaacaagctaaatgtcagtcagcagccactgctggatgttgaaggtaacttaataaaaatgcatgcagcggatttggaaaagcccatggtagaaaagcaggatcaatccccttcattaaggactggagaagaaaaaaaagacgtgtccatttccagactgcgagaggccttttctcttcgtcacacaacagagaacaagcctcacagcccaaagactccagaaccaagaaggagccctctaggacagaaaaggggtatgctgtcttctagcacttcaggtgccatctctgacaaaggcgtcctgagacctcagaaagaggcagtgagttccagtcacggacccagtgaccctacggacagagcggaggtggagaaggactcggggcacggcagcacttccgtggattctgaggggttcagcatcccagacacgggcagtcactgcagcagcgagtatgcggccagctccccaggggacaggggctcgcaggaacatgtggactctcaggagaaagcgcctgaaactgacgactctttttcagatgtggactgccattcaaaccaggaagataccggatgtaaatttcgagttttgcctcagccaactaatctcgcaaccccaaacacaaagcgttttaaaaaagaagaaattctttccagttctgacatttgtcaaaagttagtaaatactcaggacatgtcagcctctcaggttgatgtagctgtgaaaattaataagaaagttgtgcccctggacttttctatgagttctttagctaaacgaataaagcagttacatcatgaagcacagcaaagtgaaggggaacagaattacaggaagtttagggcaaagatttgtcctggagaaaatcaagcagccgaagatgaactaagaaaagagataagtaaaacgatgtttgcagaaatggaaatcattggtcagtttaacctgggatttataataaccaaactgaatgaggatatcttcatagtggaccagcatgccacggacgagaagtataacttcgagatgctgcagcagcacaccgtgctccaggggcagaggctcatagcacctcagactctcaacttaactgctgttaatgaagctgttctgatagaaaatctggaaatatttagaaagaatggctttgattttgttatcgatgaaaatgtcatggatttttctcaaaattgtattcttttagctccagtcactgaaagggctaaactgatttccttgccaactagtaaaaactggaccttcggaccccaggacgtcgatgaactgatcttcatgctgagcgacagccctggggtcatgtgccggccttcccgagtcaagcagatgtttgcctccagagcctgccggaagtcggtgatgattgggactgctcttaacacaagcgagatgaagaaactgatcacccacatgggggagatggaccacccctggaactgtccccatggaaggccaaccatgagacacatcgccaacctgggtgtcatttctcagaactgaccgtagtcactgtatggaataattggttttatcgcagatttttatgttttgaaagacagagtcttcactaaccttttttgttttaaaatgaacctgctacttaaaaaaaatacacatcacacccatttaaaagtgatcttgagaaccttttcaaaccag

SEQ ID NO: 455555 - DNA, 1869 bp, Homo sapiens
ttctactccttgtattttgtgcaggtctgcagactcgtgaatgaggtctaccacatgtataatcgacaccagtatccatttgttgttcttaacatttctgttgattcagaatgcgttgatatcaatgttactccagataaaaggcaaattttgctacaagaggaaaagcttttgttggcagttttaaagacctctttgataggaatgtttgatagtgatgtcaacaagctaaatgtcagtcagcagccactgctggatgttgaaggtaacttaataaaaatgcatgcagcggatttggaaaagcccatggtagaaaagcaggatcaatccccttcattaaggactggagaagaaaaaaaagacgtgtccatttccagactgcgagaggccttttctcttcgtcacacaacagagaacaagcctcacagcccaaagactccagaaccaagaaggagccctctaggacagaaaaggggtatgctgtcttctagcacttcaggtgccatctctgacaaaggcgtcctgagacctcagaaagaggcagtgagttccagtcacggacccagtgaccctacggacagagcggaggtggagaaggactcggggcacggcagcacttccgtggattctgaggggttcagcatcccagacacgggcagtcactgcagcagcgagtatgcggccagctccccaggggacaggggctcgcaggaacatgtggactctcaggagaaagcgcctgaaactgacgactctttttcagatgtggactgccattcaaaccaggaagataccggatgtaaatttcgagttttgcctcagccaactaatctcgcaaccccaaacacaaagcgttttaaaaaagaagaaattctttccagttctgacatttgtcaaaagttagtaaatactcaggacatgtcagcctctcaggttgatgtagctgtgaaaattaataagaaagttgtgcccctggacttttctatgagttctttagctaaacgaataaagcagttacatcatgaagcacagcaaagtgaaggggaacagaattacaggaagtttagggcaaagatttgtcctggagaaaatcaagcagccgaagatgaactaagaaaagagataagtaaaacgatgtttgcagaaatggaaatcattggtcagtttaacctgggatttataataaccaaactgaatgaggatatcttcatagtggaccagcatgccacggacgagaagtataacttcgagatgctgcagcagcacaccgtgctccaggggcagaggctcatagcacctcagactctcaacttaactgctgttaatgaagctgttctgatagaaaatctggaaatatttagaaagaatggctttgattttgttatcgatgaaaatgctccagtcactgaaagggctaaactgatttccttgccaactagtaaaaactggaccttcggaccccaggacgtcgatgaactgatcttcatgctgagcgacagccctggggtcatgtgccggccttcccgagtcaagcagatgtttgcctccagagcctgccggaagtcggtgatgattgggactgctcttaacacaagcgagatgaagaaactgatcacccacatgggggagatggaccacccctggaactgtccccatggaaggccaaccatgagacacatcgccaacctgggtgtcatttctcagaactgaccgtagtcactgtatggaataattggttttatcgcagatttttatgttttgaaagacagagtcttcactaaccttttttgttttaaaatgaacctgctacttaaaaaaaatacacatcacacccatttaaaagtgatcttgagaaccttttcaaaccag

SEQ ID NO: 455556 - DNA, 1139 bp, Homo sapiens
  misc_feature (166)..(167): n is a, c, g, or t
  misc_feature (173)..(173): n is a, c, g, or t
  misc_feature (176)..(177): n is a, c, g, or t
  misc_feature (183)..(183): n is a, c, g, or t
gctctgttatcactgctctgcatcagaaagaactgtgtgccatcacattcgggtatagctggattgtcaagatcgtcccgtcttgccatgactgatttcgatggtgtttgctcactgcggcactcgtgtatgcatcgcgagctctacttcttaattgggccataanngggtgngtnnggtgangacaggggaccaagtgggtgggattcagggtggagcagagtcatgggggtggggacagacacgctgatgcacacgggagtgccacagtcccaaggcaggtgtttgcgtgatgggcctgtgcaagaggaagggagtagcagtgcagctggggtgaggaagggaggcattcgtgcttggaggtgggggtgcaggcacagcccagcgagggccaagtcaggggacagacgggggcttttattcaggtgagggggagagctgtgaagtggaatgaataacctgacagccctttaaaagtaatcactggctgctgagtggagagcggctcggaggggtcgcagtggggcagggaggcctgctgggaggctgctgcacctgccagggtgagagggcagggtggctgctgagacaggtgtggtcggcgtctggagtggaggcggtgccaccttgaaggagccacaaggagcctgatttcacagaagggtggagggctgagatctagaacctaggcttctctgggggaaggtttttcagggaaggtagtttttgagctgtaatcttgtccagccttattttagagaagaatgcttctgaagagctgccattctgacgtcaaaaaactactaaaacgttgaaccattgtgtctcacactcaggtgatgattgggactgctcttaacacaagcgagatgaagaaactgatcacccacatgggggagatggaccacccctggaactgtccccatggaaggccaaccatgagacacatcgccaacctgggtgtcatttctcagaactgaccgtagtcactgtatggaataattggttttatcgcagatttttatgttttgaaagacagagtcttcactaaccttttttgttttaaaatgaacctgctacttaaaaaaaatacacatcacacccatttaaaagtgatcttgagaaccttttcaaaccag

SEQ ID NO: 455557 - DNA, 585 bp, Homo sapiens
aactgtagtcccacaacagtctgaaaataacccagtcaccagatatcttcctcaaatacagagggagaactttctttcacgcctcctttagcctgtcgactccttataataatgcctaaatattccaaattaatactgcctctttaacctgctaattgttttcacaatgttacaagaaaacttggatctgtgcattatcaccatctagtggctaaactcaggcaacacgaacttctaccaaactcaggaaattgctctggaaaaactacaggattttggatttccagaactgccttgaagagacaaagattcttgtaccaagttttggtcaactgcaaatcaaagaacttggttatgcagggaaaacaaatgaggatatctgtacctggaacttttaaacaagattctaatagttatgtgaaaaaagcattcaagatttttgagtaggcacagtggcttacgcctgtaatcctatcactttgcgaaactgaggtggtggaaggatcactgaaggtcgggagttcaagaccagcctggccaatgtggtgaaaccccgtttctcctaaaattaaaaaaaaaaaaaaa

SEQ ID NO: 455558 - DNA, 1682 bp, Homo sapiens
atctgacatcatcatgttaggccaatcaccggacgcgttggtgggaggcctcacggacagcgcgcccggaggaaggaagacaagagagaggaagcttgaagccaatatggagtccgtcagttgctccgctgctgctgtcaggaccggagacatggagtcccagcgggacctgagcctggtgcctgagcggcttcagagacgcgaacaagaacggcagctggaagttgaaaggcggaaacaaaagcggcagaaccaggaggtagagaaggagaacagccactttttcgtcgccacctttgctcgggagcgagcggccgtggaagagcttctggagcgcgcggagtcggtcgagcggctggaggaggcggcctctcggctccaggggctgcagaaactaatcaacgactcagtttttttcctagccgcttacgacctgcggcagggacaagaggcgctggcgcggctgcaggcggccttggccgagcggcgccgggggctgcagcccaagaagcgtttcgctttcaagacccggggaaaggatgctgcttcgtctaccaaagtagacgcggctcctggcatccccccggcagttgaaagcatacaggactccccgctgcccaagaaggcggaaggagacctcggccccagctgggtctgcggtttctccaacctggagtcccaagtcttggagaagagagccagcgagttgcaccagcgcgacgttcttttgaccgaactgagcaactgcacggtcagactgtatggaaatcccaacaccctgcggctaaccaaggcccacagctgcaagctgctctgcggtccggtgtctacctctgttttcctggaggactgcagtgactgcgtgctggcagtggcctgccaacagctccgcatacacagtacgaaagacacccgcatcttcctgcaggtgaccagcagggccatcgtggaggactgcagtgggatccagttcgccccttacacctggagctacccggagatcgacaaggacttcgagagctctggtttagataggagcaaaaataactggaacgatgttgacgattttaactggctggcccgggatatggcctccccaaactggagtattcttcctgaagaggagcgaaatatccagtgggactaagcagttgtcactctgttcttcactcctaccaaatactttccacgttggactttcccccttattgggtctcgaagtttacttattgtcacactgtgtatgttttcagcattttaaggctagagattgtaatgggctcctacttgtaatttccattaaattcgtaacaggtataacactaaagcatttttgctattttcgtcatgcctttgagactgagtcttactccgtcccccagcgtggtggcgcgctgggattacaggcgcgcgccaccacgcgaacttgtatttttagtagagacggggtttcgccatgttgtccgggctgctctcgaactcctgacctcaggtgatccacccgcttcagcttcccaaagtgctggcattacaggcgtgagccaccacgccagggctttatttatttatttttaccacaatagtttgaagcagtaagggggaaggagggtgattatattgctttgtaatggtttgtgatacttgaaacatcacggtgcataataaagtaggtctgcagtaaa

SEQ ID NO: 455559 - DNA, 414 bp, Homo sapiens
acagggctgaggcccaggcccctgacttgcagtgctccctgccccggcggcccctcccctgcccccagtgtggaaaaagcttcatccatcccaaacggctgcagacccatgaggcccagggccgacgaggggccagcggcgcgcgccaccacgcgaacttgtatttttagtagagacggggtttcgccatgttgtccgggctgctctcgaactcctgacctcaggtgatccacccgcttcagcttcccaaagtgctggcattacaggcgtgagccaccacgccagggctttatttatttatttttaccacaatagtttgaagcagtaagggggaaggagggtgattatattgctttgtaatggtttgtgatacttgaaacatcacggtgcataataaagtaggtctgcagtaaa

SEQ ID NO: 455560 - DNA, 409 bp, Homo sapiens
gtactagataactccaaaaactaagggcaatgcgactcaggcaccgtaaactagaacactccatagaatgtggaaaactctcatagttgtcagtgatacaggtcccagagacctgtcccccacaggtagcaaggcgcgcgccaccacgcgaacttgtatttttagtagagacggggtttcgccatgttgtccgggctgctctcgaactcctgacctcaggtgatccacccgcttcagcttcccaaagtgctggcattacaggcgtgagccaccacgccagggctttatttatttatttttaccacaatagtttgaagcagtaagggggaaggagggtgattatattgctttgtaatggtttgtgatacttgaaacatcacggtgcataataaagtaggtctgcagtaaa

SEQ ID NO: 455561 - DNA, 1745 bp, Homo sapiens
atctgacatcatcatgttaggccaatcaccggacgcgttggtgggaggcctcacggacagcgcgcccggaggaaggaagacaagagagaggaagcttgaagccaatatggagtccgtcagttgctccgctgctgctgtcaggaccggagacatggagtcccagcgggacctgagcctggtgcctgagcggcttcagagacgcgaacaagaacggcagctggaagttgaaaggcggaaacaaaagcggcagaaccaggaggtagagaaggagaacagccactttttcgtcgccacctttgctcgggagcgagcggccgtggaagagcttctggagcgcgcggagtcggtcgagcggctggaggaggcggcctctcggctccaggggctgcagaaactaatcaacgactcagtttttttcctagccgcttacgacctgcggcagggacaagaggcgctggcgcggctgcaggcggccttggccgagcggcgccgggggctgcagcccaagaagcgtttcgctttcaagacccggggaaaggatgctgcttcgtctaccaaagtagacgcggctcctggcatccccccggcagttgaaagcatacaggactccccgctgcccaagaaggcggaaggagacctcggccccagctgggtctgcggtttctccaacctggagtcccaagtcttggagaagagagccagcgagttgcaccagcgcgacgttcttttgaccgaactgagcaactgcacggtcagactgtatggaaatcccaacaccctgcggctaaccaaggcccacagctgcaagctgctctgcggtccggtgtctacctctgttttcctggaggactgcagtgactgcgtgctggcagtggcctgccaacagctccgcatacacagtacgaaagacacccgcatcttcctgcaggtgaccagcagggccatcgtggaggactgcagtgggatccagttcgccccttacacctggagctacccggagatcgacaaggacttcgagagctctggtttagataggagcaaaaataactggaacgatgttgacgattttaactggctggcccgggatatggcctccccaaactggagtattcttcctgaagaggagcgaaatatccagtgggactaagcagttgtcactctgttcttcactcctaccaaatactttccacgttggactttcccccttattgggtctcgaagtttacttattgtcacactgtgtatgttttcagcattttaaggctagagattgtaatgggctcctacttgtaatttccattaaattcgtaacaggtataacactaaagcatttttgctattttcgtcatgcctttgagactgagtcttactccgtcccccagcgtggtggcgcgctgggattacaggcgcgcgccaccacgcgaacttgtatttttagtagagacggggtttcgccatgttgtccgggctgctctcgaactcctgacctcaggtgatccacccgcttcagcttcccaaagtgctggcattacaggcgtgagccaccacgccagggctttatttatttatttttaccacaatagtttgaagcagtaagggggaaggagggtgattatattgctttgtaatggtttgtgatacttgaaacatcacggtgcataataaagtaggtctgcagtaaaaaaaaaaaaaaacacaacaccacacaacaattgcgcccggcccagggggggcgggggcccggg

SEQ ID NO: 455562 - DNA, 1092 bp, Homo sapiens
atctgacatcatcatgttaggccaatcaccggacgcgttggtgggaggcctcacggacagcgcgcccggaggaaggaagacaagagagaggaagcttgaagccaatatggagtccgtcagttgctccgctgctgctgtcaggaccggagacatggagtcccagcgggacctgagcctggtgcctgagcggcttcagagacgcgaacaagaacggcagctggaagttgaaaggcggaaacaaaagcggcagaaccaggaggtagagaaggagaacagccactttttcgtcgccacctttgctcgggagcgagcggccgtggaagagcttctggagcgcgcggagtcggtcgagcggctggaggaggcggcctctcggctccaggggctgcagaaactaatcaacgactcagtttttttcctagccgcttacgacctgcggcagggacaagaggcgctggcgcggctgcaggcggccttggccgagcggcgccgggggctgcagcccaagaagcgtttcgctttcaagacccggggaaaggatgctgcttcgtctaccaaagtagacgcggctcctggcatccccccggcagttgaaagcatacaggactccccgctgcccaagaaggcggaaggagacctcggccccagctgggtctgcggtttctccaacctggagtcccaagtcttggagaagagagccagcgagttgcaccagcgcgacgttcttttgaccgaactgagcaactgcacggtcagactgtatggaaatcccaacaccctgcggctaaccaaggcccacagctgcaagctgctctgcggtccggtgtctacctctgttttcctggaggactgcagtgactgcgtgctggcagtggcctgccaacagctccgcatacacagtacgaaagaacccgcttcagcttcccaaagtgctggcattacaggcgtgagccaccacgccagggctttatttatttatttttaccacaatagtttgaagcagtaagggggaaggagggtgattatattgctttgtaatggtttgtgatacttgaaacatcacggtgcataataaagtaggtctgcagtaaa

SEQ ID NO: 455563 - DNA, 1381 bp, Homo sapiens
atctgacatcatcatgttaggccaatcaccggacgcgttggtgggaggcctcacggacagcgcgcccggaggaaggaagacaagagagaggaagcttgaagccaatatggagtccgtcagttgctccgctgctgctgtcaggaccggagacatggagtcccagcgggacctgagcctggtgcctgagcggcttcagagacgcgaacaagaacggcagctggaagttgaaaggcggaaacaaaagcggcagaaccaggaggtagagaaggagaacagccactttttcgtcgccacctttgctcgggagcgagcggccgtggaagagcttctggagcgcgcggagtcggtcgagcggctggaggaggcggcctctcggctccaggggctgcagaaactaatcaacgactcagtttttttcctagccgcttacgacctgcggcagggacaagaggcgctggcgcggctgcaggcggccttggccgagcggcgccgggggctgcagcccaagaagcgtttcgctttcaagacccggggaaaggatgctgcttcgtctaccaaagtagacgcggctcctggcatccccccggcagttgaaagcatacaggactccccgctgcccaagaaggcggaaggagacctcggccccagctgggtctgcggtttctccaacctggagtcccaagtcttggagaagagagccagcgagttgcaccagcgcgacgttcttttgaccgaactgagcaactgcacggtcagactgtatggaaatcccaacaccctgcggctaaccaaggcccacagctgcaagctgctctgcggtccggtgtctacctctgttttcctggaggactgcagtgactgcgtgctggcagtggcctgccaacagctccgcatacacagtacgaaagacacccgcatcttcctgcaggtgaccagcagggccatcgtggaggactgcagtgggatccagttcgccccttacacctggagctacccggagatcgacaaggacttcgagagctctggtttagataggagcaaaaataactggaacgatgttgacgattttaactggctggcccgggatatggcctccccaaactggagtattcttcctgaagaggagcgaaatatccagtgggactaagcagttgtcactctgttcttcactcctaccaaatactttccacgttggactttcccccttattgggtctcgaagtttacttattgtcacactgtgtatgttttcagcattttaaggctagagattgtaatgggctcctacttgtaatttccattaaattcgtaacaggtataacactatagagaagatacctcgagggggggccctgtaccccattggccctatagtgagtcgt

SEQ ID NO: 455564 - DNA, 699 bp, Homo sapiens
agccgttgtcagtgtgacaataagtaaacttcgagagctctggtttagataggagcaaaaataactggaacgatgttgacgattttaactggctggcccgggatatggcctccccaaactggagtattcttcctgaagaggagcgaaatatccagtgggactaagcagttgtcactctgttcttcactcctaccaaatactttccacgttggactttcccccttattgggtctcgaagtttacttattgtcacactgtgtatgttttcagcattttaaggctagagattgtaatgggctcctacttgtaatttccattaaattcgtaacaggtataacactaaagcatttttgctattttcgtcatgcctttgagactgagtcttactccgtcccccagcgtggtggcgcgctgggattacaggcgcgcgccaccacgcgaacttgtatttttagtagagacggggtttcgccatgttgtccgggctgctctcgaactcctgacctcaggtgatccacccgcttcagcttcccaaagtgctggcattacaggcgtgagccaccacgccagggctttatttatttatttttaccacaatagtttgaagcagtaagggggaaggagggtgattatattgctttgtaatggtttgtgatacttgaaacatcacggtgcataataaagtaggtctgcagtaaa

SEQ ID NO: 455565 - DNA, 483 bp, Homo sapiens
agacggggcccctaatccgacatacaccactgtttttacttctgctcattggctgagtgcagtggttcctggaagccagtggcacgtttccccgcgtagctcgcttatcccacagcacacacccaagggttctgttgctaacacgctgaattaattctttgctcatcttacagagtgtgttttgactgcccccatttctgaggccttgtaaggccagagctttgttgcttcatcggcaggttgggacttagatggccgtgaatgtttcctctctgctgctgcagtaagtaagtgcccgcaccatagtgtgtttggaggctgaagttgaagcgaggctgtgaggggagatggacgtgtgaggagggatgatggggcttgagcaaagtgggggagggggcaaaggcagttggcccaacacattccccacccctttgagaggtctgaggcctgcagacctggctcggagcccacctggtagtcctc

SEQ ID NO: 455566 - DNA, 10416 bp, Homo sapiens
tcccacaccacccgcctcccctgccgcctcctgccaccccctaggccaaggtaataatcatcctgaatcctgggtttatctctcacttgctttcttttcatataattttgcaaaagaatctgatctaaatgtgtttttcagagtatatatttatattttagctgttcttagagaaaatttattattttgcatgtaatcttatggaacattctcatttaataccatggtaagattcagcccttgcccaggggatagttcatttagtttgtttactggatagagctcatcatgtgactatacctcagttagtttatcagttctcccatccatggtgactaggttgcctctcagcctctcaacaacactgtttctcagtgtccttgtagaagtgatatgtgggtgttttctccttacacagagttgaaaggtgacgacaacaacgttggcactaccaatcccccaccctccagaggggtaaccagtgttaccagtttgctgtgtttcctgctacacctcgccttattcacttccatttgtatctgaaaaacgtgttgcatggtttcttttctatagaagtggtaaaatgctattgtgtcctgtacattattgattactttttttcatttaacagtagggagatgcctgggagtacacagagaactgccctcattgttttcaacttctgcactgtatgtctgtgagtttagccattctgctgttaatggaaatttacagtattctaatcttttgatattacaaacagttctgtgcgatcatcgtcatacacaaccccttgtgcacaatgcatgagtgtttctcagggtaggtaccaagaagtgaaattcctgggtcatagggcgtgagtccgacatttttctccattctgccctgttgccctccagagtgggtgtccagctttgcatacctaagtatgagagtatctgttgttcatatcctctacgacgctccatatatgaaacttaagtttctgctagttgccatctttgatctatcatgtatgcagtgacctactaagactgtaattggtacagtagattcttgtcatctgtgtgtgaatttagcattcatgggcttaatgctgacaaggcccccagggtccaagacatataatcatgtataattttgtcaaggtataattttttaaattgcttttgtcatgtgtctgctggtgatgcccaacccagtgctctgcacccaggtcacactgtggctttgtcctctgcttatgcctgcattgcagcaactgtcctgaagagaccaaaattatgcagatttaggtaagtccatggctaatgttattatattatgtgctattgtaatggatggggctgtggagtgtatgaatttataaatcactggtcttgtaattaaaattcaaacactatagaaaaaggccatgtagaagataaaagttcctctataatcccggacccctaagataactactaatgacaacttcatttatattccttcagacattttctggctgtggatgtactaaaatgtatcctattattctctgccctaaaatggaatcatacaaggtgtactgttatttttatggctctataacatgtcatattgtacgtgttggtatggtcattttaaccatttttctagtgatggctttgaggttatttgcagtttcctagccatctcaaagtgtgctgcggggatctcttttgcatccctctgggtgcagagctgaggcacccagaggcagtgtccagaggaggcagcatctgtaggtgtcttcacctgctctggctcttggcacatctggttggtgacactgttttgtgagatgggttgaaagcacgtgctgccaaaatagaataatgttggtcctctcctcatgtgccgtggaactggggtaaaactgcgtagtggctgcagctgcctgtccataccggaatcgagtataacacggtgcctggcttagcacaaaacagtagtgggtcctgcaggccccagagtctaattcctggtattctttcccctacacagattaaataaaccaaaaacaaactattctaggaaagcgtctgtgacatttgtaaaaagtggtatttaatgatcttttattcacttgtctgtttagtttgttgaaatcttaagtggcatcctggtctgggaaggagtgctgtctgcgcctgccctccgctgggcacagcgtggctgcttcaggggctaagcacacactttctgtcttctaaagggccgccacatgccaggagctcaggtgtgagcccggctctggctcttacctcatagggtcactcataggggcacagggagcagaacattgtacacagcgaggcaccacccggcttggcatctgcctcggtggacttactacctctagaaggaaatacctgagttcctctggcctcagctcctagagtgactggtgtgctgtccctgttactcttctgtcaaggtgacaactgtgtgacccatcatctgtgtgtcaaagcaaggccctgcctgggcctctgctcctgtccgggctgcacaaaggcaaatgctttgctagtttccttccagttaatttcacctatgaatagatgtgtgaaaactgttcaaagccatacctgcacatgtttgaacttcaaaccctgtgggtgattcagtggcatctttctctaacccccagcctcccttcccacagaggccaccgtcatggccagttgctgcagtttctttccagagaacctgtgtatgtgtaaagctgtacaggcgtgggtacaccacacagcctgtcttgcactgtggactgttgagttactagtacatctaggtaagcaccgcatatctgtattcatgtctgccttggtcttttcaacatctttgtggtagccgtgtttgaattacccattccctttttggggaaccattaagttgtttcagcaatttttactgtagataaggctataccgcatatctgtgtacatgggtttttatgtacatgggcaagtatatctgtgagagaaaagtttcctcaggaggaattctgggcacagcatgtgtaaatttctaaatatgatggacacccccagcttccacctcaaggaggttggtcccattgacatttccccacaccttcacccaggctgtgcccttaaacttggttatttgtcaatgtgagaagtggaaaatagtatttaattgtagtttggatttgtatttctattgggttgtatacttactgattaataataagagctctttacatattaaggaaattaacccttttcaaatacattcctatttctcactaatctttaagttttattgtaatattttgctctttagtttatatatatatgtatatatatatatatgtatatatatatatatacatatatatatacatatatatatactaattttcttttatggttcctggattttgtgagtagtttgaaaaggctaatccagctgaagattttgttgttgttgttaaaccccatgttttctcctaactctttttatttttattttggaggactctatctagacttaattttagcataacaagtgacagggttagttagcctgttgtccttacaccattttctggctaatacagctattaactattgatctgtctattcacgtgccagttcctaatggttttacatagtgtaatctgcacttcaaaatagcgaagggaagccctacctcattattctacttttccagaattctcctggctattccaggctgcatgtttaccttaaccttccctgtgatgtcttcatgccgttgtcttcttatgcaagaataaggtacgtctttccatccactcacgtctatttaatttgactttgcattacacagaaagctggtcttggtctgtctacctcggcatctagttgtcctcactgccccctagccgaccccaccccatctgactgactaccccatcacagagtacttttatttacgttttgctctgcctaatggttacttgatactgtcacgccgacagtgtccagttcagtggtctttgcagttgaaatgctcccgtacacactgtcttgttaaaaatgccagtaagttcatacaaacccagcttgcacccaaggtcacattcagagagcgtagggctgggatgggttgttttccaagcttctgccactgtgtggctagctcttcccactgggaagttctgtgtacccggaatgtcggagtggagtcctgttctagtgtccagcacctgaccctgtgcccaacccctcaacagcctattcctgctgtccacagcctgctggaactttttacaaaatatgttgccatgctggaccctgggcactggacataagccccctggcagcctttttcatgtcacccaaaggggtaattgtcctactggtggtctgtaagatgagttagggtgacttgctaatagacattgtaaatcttaatatttatgtatgtattttattattaccggttttccatttatgatggtaatattgtttcttctaagaatatttatttttccttctaaatattgagataaaattcatgcttttgaaatgttctattcagtggcttttagtatatttgctatgttgtgcaaccatcgacactatccatttctagaactttttcgtcatcccaaacagacgctctgtattcataaaaaaataacttcctacctgtctctccccctagtctttggtaacctttgttatactggtaaactttgttgtgctctctgtctgtgtgaatttgcctattctaggggcctcatataagtgtaatcatacagtatttgtctttttgggtctgtctgatttcacttagcgggttttcagggttcattcatgttgcagcatataacagtactgcgttcctttttctggctgaataatattccactgtatggatagaccccattttgtttattcacacatcatttggacatttggattatttctggtttttggctattatgaacaatggtgctatgaacagttgcgtacaagtttttgtgtgaacatatgttttcaattctctcattatatacctaggagtagaattactgggtcatatggtaactgtatatttttgaggaactgccaaactattttcccacgtccatgcaccatttcacattcccaccagtaagtaagagggttccaatttctgcgcattcttgccaacactagttattatctgactttctggttataatcattctaatgagtgtgaagtagcctctggtgtcatttggatttgcatttctctgatgagtgatgctatcaagcacctttgctggtgctgttggccatatgtgtatgttccctggagaagtgtctgtgctgagccttggcccactttttaattaggcgtttgtctttttattactgagttgtaagagttctttatatattctggattctagacccttatcagatacatggtttgcaaatattttctcccattctgtgggttgtgttttcactttatcgataatgtccttagacatataataaatttgtattttaaaagtgacttgatttggctgtgcaaggtggctcacgcttgtaatcccagcactttgggagactgaggtgggtggatcatatgaggaggctaggagttcgaggtcagcctggccagcatagcgaaaacttgtctctactaaaaatacaaaaattagtcaggcatggtggtgcacgtctgtaataccagcttctcaggaggctgaggcacgaggatcacttgaacccaggaggaggaggttgcagtgagctgagatcatgccagggcaacagaatgagactttgtttaaaaaaaaaaaaaagtgacttgatttaagggaaaaaatgactggctatattcagtcagatatggcaaaaagtctcaaggtgttaatgtgaatgattaaggtcttggggggggtgtcccctatcagactacaggtgtttagaggcacagaaaaaggtgcagttgggttcttaatgtgaaatgatgagaagcacaactccagtgtgtctctttgtgtagaatgtcagcagacaccccctgctagatgtgctggatcatgggaaagcatttccatttgttactagattgttcagaagttttaatttatgatgggtgtggtggctcatgcctgtagtcccagcactgtgggaggctgaggcaggaggatcatctgaggccaagagttcaagatcagcctgggcaacatagtgataccctatctcttaaaaaagaagaagtttttaaatttgaaataataataggtactggatttatgcaaatgtcttttctgcgtcttttgagatgagtatcaggtttttttttttccttttatcatctgatgatgaacttaatgtttccatttgtattaatggaatactaagtccctctgtgatttctgaaccaagctattcctaggcctgagttttattttgttgacacagaaataaattagaaggccaagcgtggtggcatgtgcctgtagtcctagttgctgaggtaagaggattgcttgagcccaggagttcaaggctgcagcaagctttgattgcgccactgcactccagccttggcgacagactaagacgctgtctcaaaaaaaaacaaaaacgacaaaaaaaaaacaaaacagaaaaaataaactaaggcaatgacagtccctggcaaatgctgggagggaggcagcagtggtcagggaaggtaaccctgaagcaggacttgtaaagcaaataagattgggaggccaaggtgggtggatcacgaggtcaggagttcgagaccagcctggccaacatagtgaaaccccgtctttactaaaaatacaaaaaaattagccaggtgtggtggtgggtgcctgtagtcccagctacttgggaggctgaggcaggagaatctcgaacccaggaggcggaggttacagtcagctgagaccgcaccattgcactccagcctgggtgacagagcaagattccgtctcaaaaaaaaaaaaaaaaaaaaaaaaccaagaagaaaaggaatgaattagaacttcttctgcttggacttaagggcatcatcaggcaggttttgggtaggatagcaggggaggcagagacatagtcggggtcagtggtcatgagtgtggctttgagcccaaaaacttggtttctgttccctactttgccactcagtagtgcatgactttggccaaatttcttaaattcatgaagcaagtttccgggtgaatgaaatggggataaaaatagtgttcaaacctatccgttggtttgtgtgaaactgaaatgaatagtatcgtgcaggtacttgtgagcaaggggagctgctgtttcctgtccctttatgatgggaaatatctagacaagttcccaaccctctgcactgcaggctgcatggcacggagggtcttgtaacaccagctggggctggccttcttttaggagcttcagtggttctgaaaacttttatttgtttgtttgttttagtagatgtggggtctttctgtgttgcccggactggtctcaaacttctggactcaagtgatcctcccccgctcaacctcccaaagtgttgggattacaggtgtgagccactgtgcccagccttgaaaactttttcaggttcttccagggttactgggctattaaatatttctatttcattataagtcagtttttcaaagttatattatcttaattaccttttttatatgtattagtgtagagtagcattttatattttgatatcctccttatgcatagtttttcactttttattcctagtttttcgtttttaataagactttcaagaaatttattttattggccttttgaaaaaagcagctttagataaagtaagcagttctgctttcattttataatttatttctacttttgtttcattaatcttttcctccggcatgccttggattttgttgtgttactctttttctagaggctcgcattgtgtgtctggttcacttatgatcacgcttgcctacttttaagaatggaagaggggaggtggagggtggctgcacagtcgagggtgtgaggcagtcttgctctagccccaccatgccctcagcccgctgtggccacgctggttcctcaattgctggggcgtgcagtgtctgtaagggaggctactgatgccatccgaggaagatgtaaggtttcgtgtgggcagcgagagcctagcaggcatgtggggtgcccagcaaagggtaacagtggacagttgttgcctcattccacagagttttgattttttttttttttttaatggtcactccatcaacatcccccatggccagagcctgagctggtccccagagacacaggcattcagctgacagcctcgccttcacgctgctgctgttctcatgggggacaggcctcaggtggcaatgcacaaatcattagttaagggcagttgtgacagttaccaaggagtgtagtcccccgccccccgcccagtgaaaacagccctaaccaggggtggggacctttgggctctgacccgaagggtaggagaagctggaaggacagcattcctgtctgcgaaggcaggagcaaagctgccaggctatgaaggaaatggctggagcctgaagtcatgcaagctggggctggcagggacagggccaacttccaggcctgggggccaccatgaggattcaggacgtgacccccagggcacatgaaggccttccatctgtatttaagaaaagactttatcagacgagtatggtggctcacgcctgaatcttagcactttgggaggctgaggcaggtggatcacgaggtcaggagttcaataccagcctggccaatatggtaaaaccccatctctactaaaactacaaaaattagccaggcatggtggcgcacgcctgtagtcccagctactcgggaggctgaggcagaagaatcacttgaacccgggaggtggaggttacagtgagccaagatcgcgccactacactccagcctgggtgacagagtgagactccgtctcaaaaaaaccaaaagactttatcttatttcctatatgtttgtggtttcagtcctgatgtataatttgaccctagttagaatggttatctgaggaagtggcctgtacgatttctgcttttttaaatgtgtggctccctttcttcattgattaacgtatgattatttttataaatgttccatggcagtgggaagggattctctgtcacattccacatctggatcagttcctccccattttgttggtcaaatccgatctgccatatcctgtgtaatgacaagtgagttgcattctcaccgtcactcctggggtctctccgcttcccctgagctggctcagcagtctgctccatgtgttttgatgcagggtgacccattggtattcccgacactaacgcccccgtctgtggactgcttgctgcttgggcttcactgtgtctggtgttgacagtgcagacctaaaggtgtgcacacatgtgcacacacactccgctgtcttcttgtttgcactggacttaaatatctatgagggttattttcaactgctgaatttggaatgatttttatatcttttctgctttctgcccatgtacatgtgtttattttacactgttgtgattggtagttactatgtggggacacaattacttgggctgaaataatccacctgttgtggttggggtcctctggggcattccagggtgagaggttgtcactgccacctgggccatgtgggccggcaccagcattttgtggttacgaattctacagtcacaaatatctttgggcaaatccccttctatacctcaaggcagcttttggtttgcaaccccactggccagagggaagggccagtcacttggctctctcactgccctgcgccccagatggttctagggctgctgttttcccttggccctgccaacaccactgtttttacttctgctcattggctgagtgcagtggttcctggaagccagtggcacgtttccccgcgtagctcgcttatcccacagcacacacccaagggttctgttgctaacacgctgaattaattctttgctcatcttacagagtgtgttttgactgcccccatttctgaggccttgtaaggccagagctttgttgcttcatcggcaggttgggacttagatggccgtgaatgtttcctctctgctgctgcagtaagtaagtgcccgcaccatagtgtgtttggaggctgaagttgaagcgaggctgtgaggggagatggacgtgtgaggagggatgatggggcttgagcaaagtgggggagggggcaaaggcagttggcccaacacattccccacccctttgagaggtctgaggcctgcagacctggctcggagcccacctggtagtcctc

SEQ ID NO: 455567 - DNA, 10362 bp, Homo sapiens
tcccacaccacccgcctcccctgccgcctcctgccaccccctaggccaaggtaataatcatcctgaatcctgggtttatctctcacttgctttcttttcatataattttgcaaaagaatctgatctaaatgtgtttttcagagtatatatttatattttagctgttcttagagaaaatttattattttgcatgtaatcttatggaacattctcatttaataccatggtaagattcagcccttgcccaggggatagttcatttagtttgtttactggatagagctcatcatgtgactatacctcagttagtttatcagttctcccatccatggtgactaggttgcctctcagcctctcaacaacactgtttctcagtgtccttgtagaagtgatatgtgggtgttttctccttacacagagttgaaaggtgacgacaacaacgttggcactaccaatcccccaccctccagaggggtaaccagtgttaccagtttgctgtgtttcctgctacacctcgccttattcacttccatttgtatctgaaaaacgtgttgcatggtttcttttctatagaagtggtaaaatgctattgtgtcctgtacattattgattactttttttcatttaacagtagggagatgcctgggagtacacagagaactgccctcattgttttcaacttctgcactgtatgtctgtgagtttagccattctgctgttaatggaaatttacagtattctaatcttttgatattacaaacagttctgtgcgatcatcgtcatacacaaccccttgtgcacaatgcatgagtgtttctcagggtaggtaccaagaagtgaaattcctgggtcatagggcgtgagtccgacatttttctccattctgccctgttgccctccagagtgggtgtccagctttgcatacctaagtatgagagtatctgttgttcatatcctctacgacgctccatatatgaaacttaagtttctgctagttgccatctttgatctatcatgtatgcagtgacctactaagactgtaattggtacagtagattcttgtcatctgtgtgtgaatttagcattcatgggcttaatgctgacaaggcccccagggtccaagacatataatcatgtataattttgtcaaggtataattttttaaattgcttttgtcatgtgtctgctggtgatgcccaacccagtgctctgcacccaggtcacactgtggctttgtcctctgcttatgcctgcattgcagcaactgtcctgaagagaccaaaattatgcagatttaggtaagtccatggctaatgttattatattatgtgctattgtaatggatggggctgtggagtgtatgaatttataaatcactggtcttgtaattaaaattcaaacactatagaaaaaggccatgtagaagataaaagttcctctataatcccggacccctaagataactactaatgacaacttcatttatattccttcagacattttctggctgtggatgtactaaaatgtatcctattattctctgccctaaaatggaatcatacaaggtgtactgttatttttatggctctataacatgtcatattgtacgtgttggtatggtcattttaaccatttttctagtgatggctttgaggttatttgcagtttcctagccatctcaaagtgtgctgcggggatctcttttgcatccctctgggtgcagagctgaggcacccagaggcagtgtccagaggaggcagcatctgtaggtgtcttcacctgctctggctcttggcacatctggttggtgacactgttttgtgagatgggttgaaagcacgtgctgccaaaatagaataatgttggtcctctcctcatgtgccgtggaactggggtaaaactgcgtagtggctgcagctgcctgtccataccggaatcgagtataacacggtgcctggcttagcacaaaacagtagtgggtcctgcaggccccagagtctaattcctggtattctttcccctacacagattaaataaaccaaaaacaaactattctaggaaagcgtctgtgacatttgtaaaaagtggtatttaatgatcttttattcacttgtctgtttagtttgttgaaatcttaagtggcatcctggtctgggaaggagtgctgtctgcgcctgccctccgctgggcacagcgtggctgcttcaggggctaagcacacactttctgtcttctaaagggccgccacatgccaggagctcaggtgtgagcccggctctggctcttacctcatagggtcactcataggggcacagggagcagaacattgtacacagcgaggcaccacccggcttggcatctgcctcggtggacttactacctctagaaggaaatacctgagttcctctggcctcagctcctagagtgactggtgtgctgtccctgttactcttctgtcaaggtgacaactgtgtgacccatcatctgtgtgtcaaagcaaggccctgcctgggcctctgctcctgtccgggctgcacaaaggcaaatgctttgctagtttccttccagttaatttcacctatgaatagatgtgtgaaaactgttcaaagccatacctgcacatgtttgaacttcaaaccctgtgggtgattcagtggcatctttctctaacccccagcctcccttcccacagaggccaccgtcatggccagttgctgcagtttctttccagagaacctgtgtatgtgtaaagctgtacaggcgtgggtacaccacacagcctgtcttgcactgtggactgttgagttactagtacatctaggtaagcaccgcatatctgtattcatgtctgccttggtcttttcaacatctttgtggtagccgtgtttgaattacccattccctttttggggaaccattaagttgtttcagcaatttttactgtagataaggctataccgcatatctgtgtacatgggtttttatgtacatgggcaagtatatctgtgagagaaaagtttcctcaggaggaattctgggcacagcatgtgtaaatttctaaatatgatggacacccccagcttccacctcaaggaggttggtcccattgacatttccccacaccttcacccaggctgtgcccttaaacttggttatttgtcaatgtgagaagtggaaaatagtatttaattgtagtttggatttgtatttctattgggttgtatacttactgattaataataagagctctttacatattaaggaaattaacccttttcaaatacattcctatttctcactaatctttaagttttattgtaatattttgctctttagtttatatatatatgtatatatatatatatgtatatatatatatatacatatatatatacatatatatatactaattttcttttatggttcctggattttgtgagtagtttgcctaactctttttatttttattttggaggactctatctagacttaattttagcataacaagtgacagggttagttagcctgttgtccttacaccattttctggctaatacagctattaactattgatctgtctattcacgtgccagttcctaatggttttacatagtgtaatctgcacttcaaaatagcgaagggaagccctacctcattattctacttttccagaattctcctggctattccaggctgcatgtttaccttaaccttccctgtgatgtcttcatgccgttgtcttcttatgcaagaataaggtacgtctttccatccactcacgtctatttaatttgactttgcattacacagaaagctggtcttggtctgtctacctcggcatctagttgtcctcactgccccctagccgaccccaccccatctgactgactaccccatcacagagtacttttatttacgttttgctctgcctaatggttacttgatactgtcacgccgacagtgtccagttcagtggtctttgcagttgaaatgctcccgtacacactgtcttgttaaaaatgccagtaagttcatacaaacccagcttgcacccaaggtcacattcagagagcgtagggctgggatgggttgttttccaagcttctgccactgtgtggctagctcttcccactgggaagttctgtgtacccggaatgtcggagtggagtcctgttctagtgtccagcacctgaccctgtgcccaacccctcaacagcctattcctgctgtccacagcctgctggaactttttacaaaatatgttgccatgctggaccctgggcactggacataagccccctggcagcctttttcatgtcacccaaaggggtaattgtcctactggtggtctgtaagatgagttagggtgacttgctaatagacattgtaaatcttaatatttatgtatgtattttattattaccggttttccatttatgatggtaatattgtttcttctaagaatatttatttttccttctaaatattgagataaaattcatgcttttgaaatgttctattcagtggcttttagtatatttgctatgttgtgcaaccatcgacactatccatttctagaactttttcgtcatcccaaacagacgctctgtattcataaaaaaataacttcctacctgtctctccccctagtctttggtaacctttgttatactggtaaactttgttgtgctctctgtctgtgtgaatttgcctattctaggggcctcatataagtgtaatcatacagtatttgtctttttgggtctgtctgatttcacttagcgggttttcagggttcattcatgttgcagcatataacagtactgcgttcctttttctggctgaataatattccactgtatggatagaccccattttgtttattcacacatcatttggacatttggattatttctggtttttggctattatgaacaatggtgctatgaacagttgcgtacaagtttttgtgtgaacatatgttttcaattctctcattatatacctaggagtagaattactgggtcatatggtaactgtatatttttgaggaactgccaaactattttcccacgtccatgcaccatttcacattcccaccagtaagtaagagggttccaatttctgcgcattcttgccaacactagttattatctgactttctggttataatcattctaatgagtgtgaagtagcctctggtgtcatttggatttgcatttctctgatgagtgatgctatcaagcacctttgctggtgctgttggccatatgtgtatgttccctggagaagtgtctgtgctgagccttggcccactttttaattaggcgtttgtctttttattactgagttgtaagagttctttatatattctggattctagacccttatcagatacatggtttgcaaatattttctcccattctgtgggttgtgttttcactttatcgataatgtccttagacatataataaatttgtattttaaaagtgacttgatttggctgtgcaaggtggctcacgcttgtaatcccagcactttgggagactgaggtgggtggatcatatgaggaggctaggagttcgaggtcagcctggccagcatagcgaaaacttgtctctactaaaaatacaaaaattagtcaggcatggtggtgcacgtctgtaataccagcttctcaggaggctgaggcacgaggatcacttgaacccaggaggaggaggttgcagtgagctgagatcatgccagggcaacagaatgagactttgtttaaaaaaaaaaaaaagtgacttgatttaagggaaaaaatgactggctatattcagtcagatatggcaaaaagtctcaaggtgttaatgtgaatgattaaggtcttggggggggtgtcccctatcagactacaggtgtttagaggcacagaaaaaggtgcagttgggttcttaatgtgaaatgatgagaagcacaactccagtgtgtctctttgtgtagaatgtcagcagacaccccctgctagatgtgctggatcatgggaaagcatttccatttgttactagattgttcagaagttttaatttatgatgggtgtggtggctcatgcctgtagtcccagcactgtgggaggctgaggcaggaggatcatctgaggccaagagttcaagatcagcctgggcaacatagtgataccctatctcttaaaaaagaagaagtttttaaatttgaaataataataggtactggatttatgcaaatgtcttttctgcgtcttttgagatgagtatcaggtttttttttttccttttatcatctgatgatgaacttaatgtttccatttgtattaatggaatactaagtccctctgtgatttctgaaccaagctattcctaggcctgagttttattttgttgacacagaaataaattagaaggccaagcgtggtggcatgtgcctgtagtcctagttgctgaggtaagaggattgcttgagcccaggagttcaaggctgcagcaagctttgattgcgccactgcactccagccttggcgacagactaagacgctgtctcaaaaaaaaacaaaaacgacaaaaaaaaaacaaaacagaaaaaataaactaaggcaatgacagtccctggcaaatgctgggagggaggcagcagtggtcagggaaggtaaccctgaagcaggacttgtaaagcaaataagattgggaggccaaggtgggtggatcacgaggtcaggagttcgagaccagcctggccaacatagtgaaaccccgtctttactaaaaatacaaaaaaattagccaggtgtggtggtgggtgcctgtagtcccagctacttgggaggctgaggcaggagaatctcgaacccaggaggcggaggttacagtcagctgagaccgcaccattgcactccagcctgggtgacagagcaagattccgtctcaaaaaaaaaaaaaaaaaaaaaaaaccaagaagaaaaggaatgaattagaacttcttctgcttggacttaagggcatcatcaggcaggttttgggtaggatagcaggggaggcagagacatagtcggggtcagtggtcatgagtgtggctttgagcccaaaaacttggtttctgttccctactttgccactcagtagtgcatgactttggccaaatttcttaaattcatgaagcaagtttccgggtgaatgaaatggggataaaaatagtgttcaaacctatccgttggtttgtgtgaaactgaaatgaatagtatcgtgcaggtacttgtgagcaaggggagctgctgtttcctgtccctttatgatgggaaatatctagacaagttcccaaccctctgcactgcaggctgcatggcacggagggtcttgtaacaccagctggggctggccttcttttaggagcttcagtggttctgaaaacttttatttgtttgtttgttttagtagatgtggggtctttctgtgttgcccggactggtctcaaacttctggactcaagtgatcctcccccgctcaacctcccaaagtgttgggattacaggtgtgagccactgtgcccagccttgaaaactttttcaggttcttccagggttactgggctattaaatatttctatttcattataagtcagtttttcaaagttatattatcttaattaccttttttatatgtattagtgtagagtagcattttatattttgatatcctccttatgcatagtttttcactttttattcctagtttttcgtttttaataagactttcaagaaatttattttattggccttttgaaaaaagcagctttagataaagtaagcagttctgctttcattttataatttatttctacttttgtttcattaatcttttcctccggcatgccttggattttgttgtgttactctttttctagaggctcgcattgtgtgtctggttcacttatgatcacgcttgcctacttttaagaatggaagaggggaggtggagggtggctgcacagtcgagggtgtgaggcagtcttgctctagccccaccatgccctcagcccgctgtggccacgctggttcctcaattgctggggcgtgcagtgtctgtaagggaggctactgatgccatccgaggaagatgtaaggtttcgtgtgggcagcgagagcctagcaggcatgtggggtgcccagcaaagggtaacagtggacagttgttgcctcattccacagagttttgattttttttttttttttaatggtcactccatcaacatcccccatggccagagcctgagctggtccccagagacacaggcattcagctgacagcctcgccttcacgctgctgctgttctcatgggggacaggcctcaggtggcaatgcacaaatcattagttaagggcagttgtgacagttaccaaggagtgtagtcccccgccccccgcccagtgaaaacagccctaaccaggggtggggacctttgggctctgacccgaagggtaggagaagctggaaggacagcattcctgtctgcgaaggcaggagcaaagctgccaggctatgaaggaaatggctggagcctgaagtcatgcaagctggggctggcagggacagggccaacttccaggcctgggggccaccatgaggattcaggacgtgacccccagggcacatgaaggccttccatctgtatttaagaaaagactttatcagacgagtatggtggctcacgcctgaatcttagcactttgggaggctgaggcaggtggatcacgaggtcaggagttcaataccagcctggccaatatggtaaaaccccatctctactaaaactacaaaaattagccaggcatggtggcgcacgcctgtagtcccagctactcgggaggctgaggcagaagaatcacttgaacccgggaggtggaggttacagtgagccaagatcgcgccactacactccagcctgggtgacagagtgagactccgtctcaaaaaaaccaaaagactttatcttatttcctatatgtttgtggtttcagtcctgatgtataatttgaccctagttagaatggttatctgaggaagtggcctgtacgatttctgcttttttaaatgtgtggctccctttcttcattgattaacgtatgattatttttataaatgttccatggcagtgggaagggattctctgtcacattccacatctggatcagttcctccccattttgttggtcaaatccgatctgccatatcctgtgtaatgacaagtgagttgcattctcaccgtcactcctggggtctctccgcttcccctgagctggctcagcagtctgctccatgtgttttgatgcagggtgacccattggtattcccgacactaacgcccccgtctgtggactgcttgctgcttgggcttcactgtgtctggtgttgacagtgcagacctaaaggtgtgcacacatgtgcacacacactccgctgtcttcttgtttgcactggacttaaatatctatgagggttattttcaactgctgaatttggaatgatttttatatcttttctgctttctgcccatgtacatgtgtttattttacactgttgtgattggtagttactatgtggggacacaattacttgggctgaaataatccacctgttgtggttggggtcctctggggcattccagggtgagaggttgtcactgccacctgggccatgtgggccggcaccagcattttgtggttacgaattctacagtcacaaatatctttgggcaaatccccttctatacctcaaggcagcttttggtttgcaaccccactggccagagggaagggccagtcacttggctctctcactgccctgcgccccagatggttctagggctgctgttttcccttggccctgccaacaccactgtttttacttctgctcattggctgagtgcagtggttcctggaagccagtggcacgtttccccgcgtagctcgcttatcccacagcacacacccaagggttctgttgctaacacgctgaattaattctttgctcatcttacagagtgtgttttgactgcccccatttctgaggccttgtaaggccagagctttgttgcttcatcggcaggttgggacttagatggccgtgaatgtttcctctctgctgctgcagtaagtaagtgcccgcaccatagtgtgtttggaggctgaagttgaagcgaggctgtgaggggagatggacgtgtgaggagggatgatggggcttgagcaaagtgggggagggggcaaaggcagttggcccaacacattccccacccctttgagaggtctgaggcctgcagacctggctcggagcccacctggtagtcctc

SEQ ID NO: 455568 - DNA, 10362 bp, Homo sapiens
tcccacaccacccgcctcccctgccgcctcctgccaccccctaggccaaggtaataatcatcctgaatcctgggtttatctctcacttgctttcttttcatataattttgcaaaagaatctgatctaaatgtgtttttcagagtatatatttatattttagctgttcttagagaaaatttattattttgcatgtaatcttatggaacattctcatttaataccatggtaagattcagcccttgcccaggggatagttcatttagtttgtttactggatagagctcatcatgtgactatacctcagttagtttatcagttctcccatccatggtgactaggttgcctctcagcctctcaacaacactgtttctcagtgtccttgtagaagtgatatgtgggtgttttctccttacacagagttgaaaggtgacgacaacaacgttggcactaccaatcccccaccctccagaggggtaaccagtgttaccagtttgctgtgtttcctgctacacctcgccttattcacttccatttgtatctgaaaaacgtgttgcatggtttcttttctatagaagtggtaaaatgctattgtgtcctgtacattattgattactttttttcatttaacagtagggagatgcctgggagtacacagagaactgccctcattgttttcaacttctgcactgtatgtctgtgagtttagccattctgctgttaatggaaatttacagtattctaatcttttgatattacaaacagttctgtgcgatcatcgtcatacacaaccccttgtgcacaatgcatgagtgtttctcagggtaggtaccaagaagtgaaattcctgggtcatagggcgtgagtccgacatttttctccattctgccctgttgccctccagagtgggtgtccagctttgcatacctaagtatgagagtatctgttgttcatatcctctacgacgctccatatatgaaacttaagtttctgctagttgccatctttgatctatcatgtatgcagtgacctactaagactgtaattggtacagtagattcttgtcatctgtgtgtgaatttagcattcatgggcttaatgctgacaaggcccccagggtccaagacatataatcatgtataattttgtcaaggtataattttttaaattgcttttgtcatgtgtctgctggtgatgcccaacccagtgctctgcacccaggtcacactgtggctttgtcctctgcttatgcctgcattgcagcaactgtcctgaagagaccaaaattatgcagatttaggtaagtccatggctaatgttattatattatgtgctattgtaatggatggggctgtggagtgtatgaatttataaatcactggtcttgtaattaaaattcaaacactatagaaaaaggccatgtagaagataaaagttcctctataatcccggacccctaagataactactaatgacaacttcatttatattccttcagacattttctggctgtggatgtactaaaatgtatcctattattctctgccctaaaatggaatcatacaaggtgtactgttatttttatggctctataacatgtcatattgtacgtgttggtatggtcattttaaccatttttctagtgatggctttgaggttatttgcagtttcctagccatctcaaagtgtgctgcggggatctcttttgcatccctctgggtgcagagctgaggcacccagaggcagtgtccagaggaggcagcatctgtaggtgtcttcacctgctctggctcttggcacatctggttggtgacactgttttgtgagatgggttgaaagcacgtgctgccaaaatagaataatgttggtcctctcctcatgtgccgtggaactggggtaaaactgcgtagtggctgcagctgcctgtccataccggaatcgagtataacacggtgcctggcttagcacaaaacagtagtgggtcctgcaggccccagagtctaattcctggtattctttcccctacacagattaaataaaccaaaaacaaactattctaggaaagcgtctgtgacatttgtaaaaagtggtatttaatgatcttttattcacttgtctgtttagtttgttgaaatcttaagtggcatcctggtctgggaaggagtgctgtctgcgcctgccctccgctgggcacagcgtggctgcttcaggggctaagcacacactttctgtcttctaaagggccgccacatgccaggagctcaggtgtgagcccggctctggctcttacctcatagggtcactcataggggcacagggagcagaacattgtacacagcgaggcaccacccggcttggcatctgcctcggtggacttactacctctagaaggaaatacctgagttcctctggcctcagctcctagagtgactggtgtgctgtccctgttactcttctgtcaaggtgacaactgtgtgacccatcatctgtgtgtcaaagcaaggccctgcctgggcctctgctcctgtccgggctgcacaaaggcaaatgctttgctagtttccttccagttaatttcacctatgaatagatgtgtgaaaactgttcaaagccatacctgcacatgtttgaacttcaaaccctgtgggtgattcagtggcatctttctctaacccccagcctcccttcccacagaggccaccgtcatggccagttgctgcagtttctttccagagaacctgtgtatgtgtaaagctgtacaggcgtgggtacaccacacagcctgtcttgcactgtggactgttgagttactagtacatctaggtaagcaccgcatatctgtattcatgtctgccttggtcttttcaacatctttgtggtagccgtgtttgaattacccattccctttttggggaaccattaagttgtttcagcaatttttactgtagataaggctataccgcatatctgtgtacatgggtttttatgtacatgggcaagtatatctgtgagagaaaagtttcctcaggaggaattctgggcacagcatgtgtaaatttctaaatatgatggacacccccagcttccacctcaaggaggttggtcccattgacatttccccacaccttcacccaggctgtgcccttaaacttggttatttgtcaatgtgagaagtggaaaatagtatttaattgtagtttggatttgtatttctattgggttgtatacttactgattaataataagagctctttacatattaaggaaattaacccttttcaaatacattcctatttctcactaatctttaagttttattgtaatattttgctctttagtttatatatatatgtatatatatatatatgtatatatatatatatacatatatatatacatatatatatactaattttcttttatggttcctggattttgtgagtagtttgaaaaggctaatccagctgaagattttgttgttgttgttaaaccccatgttttctcctaactctttttatttttattttggaggactctatctagacttaattttagcataacaagtgacagggttagttagcctgttgtccttacaccattttctggctaatacagctattaactattgatctgtctattcacgtgccagttcctaatggttttacatagtgtaatctgcacttcgctattccaggctgcatgtttaccttaaccttccctgtgatgtcttcatgccgttgtcttcttatgcaagaataaggtacgtctttccatccactcacgtctatttaatttgactttgcattacacagaaagctggtcttggtctgtctacctcggcatctagttgtcctcactgccccctagccgaccccaccccatctgactgactaccccatcacagagtacttttatttacgttttgctctgcctaatggttacttgatactgtcacgccgacagtgtccagttcagtggtctttgcagttgaaatgctcccgtacacactgtcttgttaaaaatgccagtaagttcatacaaacccagcttgcacccaaggtcacattcagagagcgtagggctgggatgggttgttttccaagcttctgccactgtgtggctagctcttcccactgggaagttctgtgtacccggaatgtcggagtggagtcctgttctagtgtccagcacctgaccctgtgcccaacccctcaacagcctattcctgctgtccacagcctgctggaactttttacaaaatatgttgccatgctggaccctgggcactggacataagccccctggcagcctttttcatgtcacccaaaggggtaattgtcctactggtggtctgtaagatgagttagggtgacttgctaatagacattgtaaatcttaatatttatgtatgtattttattattaccggttttccatttatgatggtaatattgtttcttctaagaatatttatttttccttctaaatattgagataaaattcatgcttttgaaatgttctattcagtggcttttagtatatttgctatgttgtgcaaccatcgacactatccatttctagaactttttcgtcatcccaaacagacgctctgtattcataaaaaaataacttcctacctgtctctccccctagtctttggtaacctttgttatactggtaaactttgttgtgctctctgtctgtgtgaatttgcctattctaggggcctcatataagtgtaatcatacagtatttgtctttttgggtctgtctgatttcacttagcgggttttcagggttcattcatgttgcagcatataacagtactgcgttcctttttctggctgaataatattccactgtatggatagaccccattttgtttattcacacatcatttggacatttggattatttctggtttttggctattatgaacaatggtgctatgaacagttgcgtacaagtttttgtgtgaacatatgttttcaattctctcattatatacctaggagtagaattactgggtcatatggtaactgtatatttttgaggaactgccaaactattttcccacgtccatgcaccatttcacattcccaccagtaagtaagagggttccaatttctgcgcattcttgccaacactagttattatctgactttctggttataatcattctaatgagtgtgaagtagcctctggtgtcatttggatttgcatttctctgatgagtgatgctatcaagcacctttgctggtgctgttggccatatgtgtatgttccctggagaagtgtctgtgctgagccttggcccactttttaattaggcgtttgtctttttattactgagttgtaagagttctttatatattctggattctagacccttatcagatacatggtttgcaaatattttctcccattctgtgggttgtgttttcactttatcgataatgtccttagacatataataaatttgtattttaaaagtgacttgatttggctgtgcaaggtggctcacgcttgtaatcccagcactttgggagactgaggtgggtggatcatatgaggaggctaggagttcgaggtcagcctggccagcatagcgaaaacttgtctctactaaaaatacaaaaattagtcaggcatggtggtgcacgtctgtaataccagcttctcaggaggctgaggcacgaggatcacttgaacccaggaggaggaggttgcagtgagctgagatcatgccagggcaacagaatgagactttgtttaaaaaaaaaaaaaagtgacttgatttaagggaaaaaatgactggctatattcagtcagatatggcaaaaagtctcaaggtgttaatgtgaatgattaaggtcttggggggggtgtcccctatcagactacaggtgtttagaggcacagaaaaaggtgcagttgggttcttaatgtgaaatgatgagaagcacaactccagtgtgtctctttgtgtagaatgtcagcagacaccccctgctagatgtgctggatcatgggaaagcatttccatttgttactagattgttcagaagttttaatttatgatgggtgtggtggctcatgcctgtagtcccagcactgtgggaggctgaggcaggaggatcatctgaggccaagagttcaagatcagcctgggcaacatagtgataccctatctcttaaaaaagaagaagtttttaaatttgaaataataataggtactggatttatgcaaatgtcttttctgcgtcttttgagatgagtatcaggtttttttttttccttttatcatctgatgatgaacttaatgtttccatttgtattaatggaatactaagtccctctgtgatttctgaaccaagctattcctaggcctgagttttattttgttgacacagaaataaattagaaggccaagcgtggtggcatgtgcctgtagtcctagttgctgaggtaagaggattgcttgagcccaggagttcaaggctgcagcaagctttgattgcgccactgcactccagccttggcgacagactaagacgctgtctcaaaaaaaaacaaaaacgacaaaaaaaaaacaaaacagaaaaaataaactaaggcaatgacagtccctggcaaatgctgggagggaggcagcagtggtcagggaaggtaaccctgaagcaggacttgtaaagcaaataagattgggaggccaaggtgggtggatcacgaggtcaggagttcgagaccagcctggccaacatagtgaaaccccgtctttactaaaaatacaaaaaaattagccaggtgtggtggtgggtgcctgtagtcccagctacttgggaggctgaggcaggagaatctcgaacccaggaggcggaggttacagtcagctgagaccgcaccattgcactccagcctgggtgacagagcaagattccgtctcaaaaaaaaaaaaaaaaaaaaaaaaccaagaagaaaaggaatgaattagaacttcttctgcttggacttaagggcatcatcaggcaggttttgggtaggatagcaggggaggcagagacatagtcggggtcagtggtcatgagtgtggctttgagcccaaaaacttggtttctgttccctactttgccactcagtagtgcatgactttggccaaatttcttaaattcatgaagcaagtttccgggtgaatgaaatggggataaaaatagtgttcaaacctatccgttggtttgtgtgaaactgaaatgaatagtatcgtgcaggtacttgtgagcaaggggagctgctgtttcctgtccctttatgatgggaaatatctagacaagttcccaaccctctgcactgcaggctgcatggcacggagggtcttgtaacaccagctggggctggccttcttttaggagcttcagtggttctgaaaacttttatttgtttgtttgttttagtagatgtggggtctttctgtgttgcccggactggtctcaaacttctggactcaagtgatcctcccccgctcaacctcccaaagtgttgggattacaggtgtgagccactgtgcccagccttgaaaactttttcaggttcttccagggttactgggctattaaatatttctatttcattataagtcagtttttcaaagttatattatcttaattaccttttttatatgtattagtgtagagtagcattttatattttgatatcctccttatgcatagtttttcactttttattcctagtttttcgtttttaataagactttcaagaaatttattttattggccttttgaaaaaagcagctttagataaagtaagcagttctgctttcattttataatttatttctacttttgtttcattaatcttttcctccggcatgccttggattttgttgtgttactctttttctagaggctcgcattgtgtgtctggttcacttatgatcacgcttgcctacttttaagaatggaagaggggaggtggagggtggctgcacagtcgagggtgtgaggcagtcttgctctagccccaccatgccctcagcccgctgtggccacgctggttcctcaattgctggggcgtgcagtgtctgtaagggaggctactgatgccatccgaggaagatgtaaggtttcgtgtgggcagcgagagcctagcaggcatgtggggtgcccagcaaagggtaacagtggacagttgttgcctcattccacagagttttgattttttttttttttttaatggtcactccatcaacatcccccatggccagagcctgagctggtccccagagacacaggcattcagctgacagcctcgccttcacgctgctgctgttctcatgggggacaggcctcaggtggcaatgcacaaatcattagttaagggcagttgtgacagttaccaaggagtgtagtcccccgccccccgcccagtgaaaacagccctaaccaggggtggggacctttgggctctgacccgaagggtaggagaagctggaaggacagcattcctgtctgcgaaggcaggagcaaagctgccaggctatgaaggaaatggctggagcctgaagtcatgcaagctggggctggcagggacagggccaacttccaggcctgggggccaccatgaggattcaggacgtgacccccagggcacatgaaggccttccatctgtatttaagaaaagactttatcagacgagtatggtggctcacgcctgaatcttagcactttgggaggctgaggcaggtggatcacgaggtcaggagttcaataccagcctggccaatatggtaaaaccccatctctactaaaactacaaaaattagccaggcatggtggcgcacgcctgtagtcccagctactcgggaggctgaggcagaagaatcacttgaacccgggaggtggaggttacagtgagccaagatcgcgccactacactccagcctgggtgacagagtgagactccgtctcaaaaaaaccaaaagactttatcttatttcctatatgtttgtggtttcagtcctgatgtataatttgaccctagttagaatggttatctgaggaagtggcctgtacgatttctgcttttttaaatgtgtggctccctttcttcattgattaacgtatgattatttttataaatgttccatggcagtgggaagggattctctgtcacattccacatctggatcagttcctccccattttgttggtcaaatccgatctgccatatcctgtgtaatgacaagtgagttgcattctcaccgtcactcctggggtctctccgcttcccctgagctggctcagcagtctgctccatgtgttttgatgcagggtgacccattggtattcccgacactaacgcccccgtctgtggactgcttgctgcttgggcttcactgtgtctggtgttgacagtgcagacctaaaggtgtgcacacatgtgcacacacactccgctgtcttcttgtttgcactggacttaaatatctatgagggttattttcaactgctgaatttggaatgatttttatatcttttctgctttctgcccatgtacatgtgtttattttacactgttgtgattggtagttactatgtggggacacaattacttgggctgaaataatccacctgttgtggttggggtcctctggggcattccagggtgagaggttgtcactgccacctgggccatgtgggccggcaccagcattttgtggttacgaattctacagtcacaaatatctttgggcaaatccccttctatacctcaaggcagcttttggtttgcaaccccactggccagagggaagggccagtcacttggctctctcactgccctgcgccccagatggttctagggctgctgttttcccttggccctgccaacaccactgtttttacttctgctcattggctgagtgcagtggttcctggaagccagtggcacgtttccccgcgtagctcgcttatcccacagcacacacccaagggttctgttgctaacacgctgaattaattctttgctcatcttacagagtgtgttttgactgcccccatttctgaggccttgtaaggccagagctttgttgcttcatcggcaggttgggacttagatggccgtgaatgtttcctctctgctgctgcagtaagtaagtgcccgcaccatagtgtgtttggaggctgaagttgaagcgaggctgtgaggggagatggacgtgtgaggagggatgatggggcttgagcaaagtgggggagggggcaaaggcagttggcccaacacattccccacccctttgagaggtctgaggcctgcagacctggctcggagcccacctggtagtcctc

SEQ ID NO: 455569 - DNA, 9468 bp, Homo sapiens
  misc_feature (24)..(24): n is a, c, g, or t
gcctactactactaaattcgcggncgcgtcgattaagtttctgctagttgccatctttgatctatcatgtatgcagtgacctactaagactgtaattggtacagtagattcttgtcatctgtgtgtgaatttagcattcatgggcttaatgctgacaaggcccccagggtccaagacatataatcatgtataattttgtcaaggtataattttttaaattgcttttgtcatgtgtctgctggtgatgcccaacccagtgctctgcacccaggtcacactgtggctttgtcctctgcttatgcctgcattgcagcaactgtcctgaagagaccaaaattatgcagatttaggtaagtccatggctaatgttattatattatgtgctattgtaatggatggggctgtggagtgtatgaatttataaatcactggtcttgtaattaaaattcaaacactatagaaaaaggccatgtagaagataaaagttcctctataatcccggacccctaagataactactaatgacaacttcatttatattccttcagacattttctggctgtggatgtactaaaatgtatcctattattctctgccctaaaatggaatcatacaaggtgtactgttatttttatggctctataacatgtcatattgtacgtgttggtatggtcattttaaccatttttctagtgatggctttgaggttatttgcagtttcctagccatctcaaagtgtgctgcggggatctcttttgcatccctctgggtgcagagctgaggcacccagaggcagtgtccagaggaggcagcatctgtaggtgtcttcacctgctctggctcttggcacatctggttggtgacactgttttgtgagatgggttgaaagcacgtgctgccaaaatagaataatgttggtcctctcctcatgtgccgtggaactggggtaaaactgcgtagtggctgcagctgcctgtccataccggaatcgagtataacacggtgcctggcttagcacaaaacagtagtgggtcctgcaggccccagagtctaattcctggtattctttcccctacacagattaaataaaccaaaaacaaactattctaggaaagcgtctgtgacatttgtaaaaagtggtatttaatgatcttttattcacttgtctgtttagtttgttgaaatcttaagtggcatcctggtctgggaaggagtgctgtctgcgcctgccctccgctgggcacagcgtggctgcttcaggggctaagcacacactttctgtcttctaaagggccgccacatgccaggagctcaggtgtgagcccggctctggctcttacctcatagggtcactcataggggcacagggagcagaacattgtacacagcgaggcaccacccggcttggcatctgcctcggtggacttactacctctagaaggaaatacctgagttcctctggcctcagctcctagagtgactggtgtgctgtccctgttactcttctgtcaaggtgacaactgtgtgacccatcatctgtgtgtcaaagcaaggccctgcctgggcctctgctcctgtccgggctgcacaaaggcaaatgctttgctagtttccttccagttaatttcacctatgaatagatgtgtgaaaactgttcaaagccatacctgcacatgtttgaacttcaaaccctgtgggtgattcagtggcatctttctctaacccccagcctcccttcccacagaggccaccgtcatggccagttgctgcagtttctttccagagaacctgtgtatgtgtaaagctgtacaggcgtgggtacaccacacagcctgtcttgcactgtggactgttgagttactagtacatctaggtaagcaccgcatatctgtattcatgtctgccttggtcttttcaacatctttgtggtagccgtgtttgaattacccattccctttttggggaaccattaagttgtttcagcaatttttactgtagataaggctataccgcatatctgtgtacatgggtttttatgtacatgggcaagtatatctgtgagagaaaagtttcctcaggaggaattctgggcacagcatgtgtaaatttctaaatatgatggacacccccagcttccacctcaaggaggttggtcccattgacatttccccacaccttcacccaggctgtgcccttaaacttggttatttgtcaatgtgagaagtggaaaatagtatttaattgtagtttggatttgtatttctattgggttgtatacttactgattaataataagagctctttacatattaaggaaattaacccttttcaaatacattcctatttctcactaatctttaagttttattgtaatattttgctctttagtttatatatatatgtatatatatatatatgtatatatatatatatacatatatatatacatatatatatactaattttcttttatggttcctggattttgtgagtagtttgaaaaggctaatccagctgaagattttgttgttgttgttaaaccccatgttttctcctaactctttttatttttattttggaggactctatctagacttaattttagcataacaagtgacagggttagttagcctgttgtccttacaccattttctggctaatacagctattaactattgatctgtctattcacgtgccagttcctaatggttttacatagtgtaatctgcacttcaaaatagcgaagggaagccctacctcattattctacttttccagaattctcctggctattccaggctgcatgtttaccttaaccttccctgtgatgtcttcatgccgttgtcttcttatgcaagaataaggtacgtctttccatccactcacgtctatttaatttgactttgcattacacagaaagctggtcttggtctgtctacctcggcatctagttgtcctcactgccccctagccgaccccaccccatctgactgactaccccatcacagagtacttttatttacgttttgctctgcctaatggttacttgatactgtcacgccgacagtgtccagttcagtggtctttgcagttgaaatgctcccgtacacactgtcttgttaaaaatgccagtaagttcatacaaacccagcttgcacccaaggtcacattcagagagcgtagggctgggatgggttgttttccaagcttctgccactgtgtggctagctcttcccactgggaagttctgtgtacccggaatgtcggagtggagtcctgttctagtgtccagcacctgaccctgtgcccaacccctcaacagcctattcctgctgtccacagcctgctggaactttttacaaaatatgttgccatgctggaccctgggcactggacataagccccctggcagcctttttcatgtcacccaaaggggtaattgtcctactggtggtctgtaagatgagttagggtgacttgctaatagacattgtaaatcttaatatttatgtatgtattttattattaccggttttccatttatgatggtaatattgtttcttctaagaatatttatttttccttctaaatattgagataaaattcatgcttttgaaatgttctattcagtggcttttagtatatttgctatgttgtgcaaccatcgacactatccatttctagaactttttcgtcatcccaaacagacgctctgtattcataaaaaaataacttcctacctgtctctccccctagtctttggtaacctttgttatactggtaaactttgttgtgctctctgtctgtgtgaatttgcctattctaggggcctcatataagtgtaatcatacagtatttgtctttttgggtctgtctgatttcacttagcgggttttcagggttcattcatgttgcagcatataacagtactgcgttcctttttctggctgaataatattccactgtatggatagaccccattttgtttattcacacatcatttggacatttggattatttctggtttttggctattatgaacaatggtgctatgaacagttgcgtacaagtttttgtgtgaacatatgttttcaattctctcattatatacctaggagtagaattactgggtcatatggtaactgtatatttttgaggaactgccaaactattttcccacgtccatgcaccatttcacattcccaccagtaagtaagagggttccaatttctgcgcattcttgccaacactagttattatctgactttctggttataatcattctaatgagtgtgaagtagcctctggtgtcatttggatttgcatttctctgatgagtgatgctatcaagcacctttgctggtgctgttggccatatgtgtatgttccctggagaagtgtctgtgctgagccttggcccactttttaattaggcgtttgtctttttattactgagttgtaagagttctttatatattctggattctagacccttatcagatacatggtttgcaaatattttctcccattctgtgggttgtgttttcactttatcgataatgtccttagacatataataaatttgtattttaaaagtgacttgatttggctgtgcaaggtggctcacgcttgtaatcccagcactttgggagactgaggtgggtggatcatatgaggaggctaggagttcgaggtcagcctggccagcatagcgaaaacttgtctctactaaaaatacaaaaattagtcaggcatggtggtgcacgtctgtaataccagcttctcaggaggctgaggcacgaggatcacttgaacccaggaggaggaggttgcagtgagctgagatcatgccagggcaacagaatgagactttgtttaaaaaaaaaaaaaagtgacttgatttaagggaaaaaatgactggctatattcagtcagatatggcaaaaagtctcaaggtgttaatgtgaatgattaaggtcttggggggggtgtcccctatcagactacaggtgtttagaggcacagaaaaaggtgcagttgggttcttaatgtgaaatgatgagaagcacaactccagtgtgtctctttgtgtagaatgtcagcagacaccccctgctagatgtgctggatcatgggaaagcatttccatttgttactagattgttcagaagttttaatttatgatgggtgtggtggctcatgcctgtagtcccagcactgtgggaggctgaggcaggaggatcatctgaggccaagagttcaagatcagcctgggcaacatagtgataccctatctcttaaaaaagaagaagtttttaaatttgaaataataataggtactggatttatgcaaatgtcttttctgcgtcttttgagatgagtatcaggtttttttttttccttttatcatctgatgatgaacttaatgtttccatttgtattaatggaatactaagtccctctgtgatttctgaaccaagctattcctaggcctgagttttattttgttgacacagaaataaattagaaggccaagcgtggtggcatgtgcctgtagtcctagttgctgaggtaagaggattgcttgagcccaggagttcaaggctgcagcaagctttgattgcgccactgcactccagccttggcgacagactaagacgctgtctcaaaaaaaaacaaaaacgacaaaaaaaaaacaaaacagaaaaaataaactaaggcaatgacagtccctggcaaatgctgggagggaggcagcagtggtcagggaaggtaaccctgaagcaggacttgtaaagcaaataagattgggaggccaaggtgggtggatcacgaggtcaggagttcgagaccagcctggccaacatagtgaaaccccgtctttactaaaaatacaaaaaaattagccaggtgtggtggtgggtgcctgtagtcccagctacttgggaggctgaggcaggagaatctcgaacccaggaggcggaggttacagtcagctgagaccgcaccattgcactccagcctgggtgacagagcaagattccgtctcaaaaaaaaaaaaaaaaaaaaaaaaccaagaagaaaaggaatgaattagaacttcttctgcttggacttaagggcatcatcaggcaggttttgggtaggatagcaggggaggcagagacatagtcggggtcagtggtcatgagtgtggctttgagcccaaaaacttggtttctgttccctactttgccactcagtagtgcatgactttggccaaatttcttaaattcatgaagcaagtttccgggtgaatgaaatggggataaaaatagtgttcaaacctatccgttggtttgtgtgaaactgaaatgaatagtatcgtgcaggtacttgtgagcaaggggagctgctgtttcctgtccctttatgatgggaaatatctagacaagttcccaaccctctgcactgcaggctgcatggcacggagggtcttgtaacaccagctggggctggccttcttttaggagcttcagtggttctgaaaacttttatttgtttgtttgttttagtagatgtggggtctttctgtgttgcccggactggtctcaaacttctggactcaagtgatcctcccccgctcaacctcccaaagtgttgggattacaggtgtgagccactgtgcccagccttgaaaactttttcaggttcttccagggttactgggctattaaatatttctatttcattataagtcagtttttcaaagttatattatcttaattaccttttttatatgtattagtgtagagtagcattttatattttgatatcctccttatgcatagtttttcactttttattcctagtttttcgtttttaataagactttcaagaaatttattttattggccttttgaaaaaagcagctttagataaagtaagcagttctgctttcattttataatttatttctacttttgtttcattaatcttttcctccggcatgccttggattttgttgtgttactctttttctagaggctcgcattgtgtgtctggttcacttatgatcacgcttgcctacttttaagaatggaagaggggaggtggagggtggctgcacagtcgagggtgtgaggcagtcttgctctagccccaccatgccctcagcccgctgtggccacgctggttcctcaattgctggggcgtgcagtgtctgtaagggaggctactgatgccatccgaggaagatgtaaggtttcgtgtgggcagcgagagcctagcaggcatgtggggtgcccagcaaagggtaacagtggacagttgttgcctcattccacagagttttgattttttttttttttttaatggtcactccatcaacatcccccatggccagagcctgagctggtccccagagacacaggcattcagctgacagcctcgccttcacgctgctgctgttctcatgggggacaggcctcaggtggcaatgcacaaatcattagttaagggcagttgtgacagttaccaaggagtgtagtcccccgccccccgcccagtgaaaacagccctaaccaggggtggggacctttgggctctgacccgaagggtaggagaagctggaaggacagcattcctgtctgcgaaggcaggagcaaagctgccaggctatgaaggaaatggctggagcctgaagtcatgcaagctggggctggcagggacagggccaacttccaggcctgggggccaccatgaggattcaggacgtgacccccagggcacatgaaggccttccatctgtatttaagaaaagactttatcagacgagtatggtggctcacgcctgaatcttagcactttgggaggctgaggcaggtggatcacgaggtcaggagttcaataccagcctggccaatatggtaaaaccccatctctactaaaactacaaaaattagccaggcatggtggcgcacgcctgtagtcccagctactcgggaggctgaggcagaagaatcacttgaacccgggaggtggaggttacagtgagccaagatcgcgccactacactccagcctgggtgacagagtgagactccgtctcaaaaaaaccaaaagactttatcttatttcctatatgtttgtggtttcagtcctgatgtataatttgaccctagttagaatggttatctgaggaagtggcctgtacgatttctgcttttttaaatgtgtggctccctttcttcattgattaacgtatgattatttttataaatgttccatggcagtgggaagggattctctgtcacattccacatctggatcagttcctccccattttgttggtcaaatccgatctgccatatcctgtgtaatgacaagtgagttgcattctcaccgtcactcctggggtctctccgcttcccctgagctggctcagcagtctgctccatgtgttttgatgcagggtgacccattggtattcccgacactaacgcccccgtctgtggactgcttgctgcttgggcttcactgtgtctggtgttgacagtgcagacctaaaggtgtgcacacatgtgcacacacactccgctgtcttcttgtttgcactggacttaaatatctatgagggttattttcaactgctgaatttggaatgatttttatatcttttctgctttctgcccatgtacatgtgtttattttacactgttgtgattggtagttactatgtggggacacaattacttgggctgaaataatccacctgttgtggttggggtcctctggggcattccagggtgagaggttgtcactgccacctgggccatgtgggccggcaccagcattttgtggttacgaattctacagtcacaaatatctttgggcaaatccccttctatacctcaaggcagcttttggtttgcaaccccactggccagagggaagggccagtcacttggctctctcactgccctgcgccccagatggttctagggctgctgttttcccttggccctgccaacaccactgtttttacttctgctcattggctgagtgcagtggttcctggaagccagtggcacgtttccccgcgtagctcgcttatcccacagcacacacccaagggttctgttgctaacacgctgaattaattctttgctcatcttacagagtgtgttttgactgcccccatttctgaggccttgtaaggccagagctttgttgcttcatcggcaggttgggacttagatggccgtgaatgtttcctctctgctgctgcagtaagtaagtgcccgcaccatagtgtgtttggaggctgaagttgaagcgaggctgtgaggggagatggacgtgtgaggagggatgatggggcttgagcaaagtgggggagggggcaaaggcagttggcccaacacattccccacccctttgagaggtctgaggcctgcagacctggctcggagcccacctggtagtcctc

SEQ ID NO: 455570 - DNA, 10351 bp, Homo sapiens
tcccacaccacccgcctcccctgccgcctcctgccaccccctaggccaaggtaataatcatcctgaatcctgggtttatctctcacttgctttcttttcatataattttgcaaaagaatctgatctaaatgtgtttttcagagtatatatttatattttagctgttcttagagaaaatttattattttgcatgtaatcttatggaacattctcatttaataccatggtaagattcagcccttgcccaggggatagttcatttagtttgtttactggatagagctcatcatgtgactatacctcagttagtttatcagttctcccatccatggtgactaggttgcctctcagcctctcaacaacactgtttctcagtgtccttgtagaagtgatatgtgggtgttttctccttacacagagttgaaaggtgacgacaacaacgttggcactaccaatcccccaccctccagaggggtaaccagtgttaccagtttgctgtgtttcctgctacacctcgccttattcacttccatttgtatctgaaaaacgtgttgcatggtttcttttctatagaagtggtaaaatgctattgtgtcctgtacattattgattactttttttcatttaacagtagggagatgcctgggagtacacagagaactgccctcattgttttcaacttctgcactgtatgtctgtgagtttagccattctgctgttaatggaaatttacagtattctaatcttttgatattacaaacagttctgtgcgatcatcgtcatacacaaccccttgtgcacaatgcatgagtgtttctcagggtaggtaccaagaagtgaaattcctgggtcatagggcgtgagtccgacatttttctccattctgccctgttgccctccagagtgggtgtccagctttgcatacctaagtatgagagtatctgttgttcatatcctctacgacgctccatatatgaaacttaagtttctgctagttgccatctttgatctatcatgtatgcagtgacctactaagactgtaattggtacagtagattcttgtcatctgtgtgtgaatttagcattcatgggcttaatgctgacaaggcccccagggtccaagacatataatcatgtataattttgtcaaggtataattttttaaattgcttttgtcatgtgtctgctggtgatgcccaacccagtgctctgcacccaggtcacactgtggctttgtcctctgcttatgcctgcattgcagcaactgtcctgaagagaccaaaattatgcagatttaggtaagtccatggctaatgttattatattatgtgctattgtaatggatggggctgtggagtgtatgaatttataaatcactggtcttgtaattaaaattcaaacactatagaaaaaggccatgtagaagataaaagttcctctataatcccggacccctaagataactactaatgacaacttcatttatattccttcagacattttctggctgtggatgtactaaaatgtatcctattattctctgccctaaaatggaatcatacaaggtgtactgttatttttatggctctataacatgtcatattgtacgtgttggtatggtcattttaaccatttttctagtgatggctttgaggttatttgcagtttcctagccatctcaaagtgtgctgcggggatctcttttgcatccctctgggtgcagagctgaggcacccagaggcagtgtccagaggaggcagcatctgtaggtgtcttcacctgctctggctcttggcacatctggttggtgacactgttttgtgagatgggttgaaagcacgtgctgccaaaatagaataatgttggtcctctcctcatgtgccgtggaactggggtaaaactgcgtagtggctgcagctgcctgtccataccggaatcgagtataacacggtgcctggcttagcacaaaacagtagtgggtcctgcaggccccagagtctaattcctggtattctttcccctacacagattaaataaaccaaaaacaaactattctaggaaagcgtctgtgacatttgtaaaaagtggtatttaatgatcttttattcacttgtctgtttagtttgttgaaatcttaagtggcatcctggtctgggaaggagtgctgtctgcgcctgccctccgctgggcacagcgtggctgcttcaggggctaagcacacactttctgtcttctaaagggccgccacatgccaggagctcaggtgtgagcccggctctggctcttacctcatagggtcactcataggggcacagggagcagaacattgtacacagcgaggcaccacccggcttggcatctgcctcggtggacttactacctctagaaggaaatacctgagttcctctggcctcagctcctagagtgactggtgtgctgtccctgttactcttctgtcaaggtgacaactgtgtgacccatcatctgtgtgtcaaagcaaggccctgcctgggcctctgctcctgtccgggctgcacaaaggcaaatgctttgctagtttccttccagttaatttcacctatgaatagatgtgtgaaaactgttcaaagccatacctgcacatgtttgaacttcaaaccctgtgggtgattcagtggcatctttctctaacccccagcctcccttcccacagaggccaccgtcatggccagttgctgcagtttctttccagagaacctgtgtatgtgtaaagctgtacaggcgtgggtacaccacacagcctgtcttgcactgtggactgttgagttactagtacatctaggtaagcaccgcatatctgtattcatgtctgccttggtcttttcaacatctttgtggtagccgtgtttgaattacccattccctttttggggaaccattaagttgtttcagcaatttttactgtagataaggctataccgcatatctgtgtacatgggtttttatgtacatgggcaagtatatctgtgagagaaaagtttcctcaggaggaattctgggcacagcatgtgtaaatttctaaatatgatggacacccccagcttccacctcaaggaggttggtcccattgacatttccccacaccttcacccaggctgtgcccttaaacttggttatttgtcaatgtgagaagtggaaaatagtatttaattgtagtttggatttgtatttctattgggttgtatacttactgattaataataagagctctttacatattaaggaaattaacccttttcaaatacattcctatttctcactaatctttaagttttattgtaatattttgctctttagtttatatatatatgtatatatatatatatgtatatatatatatatacatatatatatacatatatatatactaattttcttttatggttcctggattttgtgagtagtttgaaaaggctaatccagctgaagattttgttgttgttgttaaaccccatgttttctcctaactctttttatttttattttggaggactctatctagacttaattttagcataacaagtgacagggttagttagcctgttgtccttacaccattttctggctaatacagctattaactattgatctgtctattcacgtgccagttcctaatggttttacatagtgtaatctgcacttcaaaatagcgaagggaagccctacctcattattctacttttccagaattctcctggctattccaggctgcatgtttaccttaaccttccctgtgatgtcttcatgccgttgtcttcttatgcaagaataaggtacgtctttccatccactcacgtctatttaatttgactttgcattacacagaaagctggtcttggtctgtctacctcggcatctagttgtcctcactgccccctagccgaccccaccccatctgactgactaccccatcacagagtacttttatttacgttttgctctgcctaatggttacttgatactgtcacgccgacagtgtccagttcagtggtctttgcagttgaaatgctcccgtacacactgtcttgttaaaaatgccagtaagttcatacaaacccagcttgcacccaaggtcacattcagagagcgtagggctgggatgggttgttttccaagcttctgccactgtgtggctagctcttcccactgggaagttctgtgtacccggaatgtcggagtggagtcctgttctagtgtccagcacctgaccctgtgcccaacccctcaacagcctattcctgctgtccacagcctgctggaactttttacaaaatatgttgccatgctggaccctgggcactggacataagccccctggcagcctttttcatgtcacccaaaggggtaattgtcctactggtggtctgtaagatgagttagggtgacttgctaatagacattgtaaatcttaatatttatgtatgtattttattattaccggttttccatttatgatggtaatattgtttcttctaagaatatttatttttccttctaaatattgagataaaattcatgcttttgaaatgttctattcagtggcttttagtatatttgctatgttgtgcaaccatcgacactatccatttctagaactttttcgtcatcccaaacagacgctctgtattcataaaaaaataacttcctacctgtctctccccctagtctttggtaacctttgttatactggtaaactttgttgtgctctctgtctgtgtgaatttgcctattctaggggcctcatataagtgtaatcatacagtatttgtctttttgggtctgtctgatttcacttagcgggttttcagggttcattcatgttgcagcatataacagtactgcgttcctttttctggctgaataatattccactgtatggatagaccccattttgtttattcacacatcatttggacatttggattatttctggtttttggctattatgaacaatggtgctatgaacagttgcgtacaagtttttgtgtgaacatatgttttcaattctctcattatatacctaggagtagaattactgggtcatatggtaactgtatatttttgaggaactgccaaactattttcccacgtccatgcaccatttcacattcccaccagtaagtaagagggttccaatttctgcgcattcttgccaacactagttattatctgactttctggttataatcattctaatgagtgtgaagtagcctctggtgtcatttggatttgcatttctctgatgagtgatgctatcaagcacctttgctggtgctgttggccatatgtgtatgttccctggagaagtgtctgtgctgagccttggcccactttttaattaggcgtttgtctttttattactgagttgtaagagttctttatatattctggattctagacccttatcagatacatggtttgcaaatattttctcccattctgtgggttgtgttttcactttatcgataatgtccttagacatataataaatttgtattttaaaagtgacttgatttggctgtgcaaggtggctcacgcttgtaatcccagcactttgggagactgaggtgggtggatcatatgaggaggctaggagttcgaggtcagcctggccagcatagcgaaaacttgtctctactaaaaatacaaaaattagtcaggcatggtggtgcacgtctgtaataccagcttctcaggaggctgaggcacgaggatcacttgaacccaggaggaggaggttgcagtgagctgagatcatgccagggcaacagaatgagactttgtttaaaaaaaaaaaaaagtgacttgatttaagggaaaaaatgactggctatattcagtcagatatggcaaaaagtctcaaggtgttaatgtgaatgattaaggtcttggggggggtgtcccctatcagactacaggtgtttagaggcacagaaaaaggtgcagttgggttcttaatgtgaaatgatgagaagcacaactccagtgtgtctctttgtgtagaatgtcagcagacaccccctgctagatgtgctggatcatgggaaagcatttccatttgttactagattgttcagaagttttaatttatgatgggtgtggtggctcatgcctgtagtcccagcactgtgggaggctgaggcaggaggatcatctgaggccaagagttcaagatcagcctgggcaacatagtgataccctatctcttaaaaaagaagaagtttttaaatttgaaataataataggtactggatttatgcaaatgtcttttctgcgtcttttgagatgagtatcaggtttttttttttccttttatcatctgatgatgaacttaatgtttccatttgtattaatggaatactaagtccctctgtgatttctgaaccaagctattcctaggcctgagttttattttgttgacacagaaataaattagaaggccaagcgtggtggcatgtgcctgtagtcctagttgctgaggtaagaggattgcttgagcccaggagttcaaggctgcagcaagctttgattgcgccactgcactccagccttggcgacagactaagacgctgtctcaaaaaaaaacaaaaacgacaaaaaaaaaacaaaacagaaaaaataaactaaggcaatgacagtccctggcaaatgctgggagggaggcagcagtggtcagggaaggtaaccctgaagcaggacttgtaaagcaaataagattgggaggccaaggtgggtggatcacgaggtcaggagttcgagaccagcctggccaacatagtgaaaccccgtctttgctgaggcaggagaatctcgaacccaggaggcggaggttacagtcagctgagaccgcaccattgcactccagcctgggtgacagagcaagattccgtctcaaaaaaaaaaaaaaaaaaaaaaaaccaagaagaaaaggaatgaattagaacttcttctgcttggacttaagggcatcatcaggcaggttttgggtaggatagcaggggaggcagagacatagtcggggtcagtggtcatgagtgtggctttgagcccaaaaacttggtttctgttccctactttgccactcagtagtgcatgactttggccaaatttcttaaattcatgaagcaagtttccgggtgaatgaaatggggataaaaatagtgttcaaacctatccgttggtttgtgtgaaactgaaatgaatagtatcgtgcaggtacttgtgagcaaggggagctgctgtttcctgtccctttatgatgggaaatatctagacaagttcccaaccctctgcactgcaggctgcatggcacggagggtcttgtaacaccagctggggctggccttcttttaggagcttcagtggttctgaaaacttttatttgtttgtttgttttagtagatgtggggtctttctgtgttgcccggactggtctcaaacttctggactcaagtgatcctcccccgctcaacctcccaaagtgttgggattacaggtgtgagccactgtgcccagccttgaaaactttttcaggttcttccagggttactgggctattaaatatttctatttcattataagtcagtttttcaaagttatattatcttaattaccttttttatatgtattagtgtagagtagcattttatattttgatatcctccttatgcatagtttttcactttttattcctagtttttcgtttttaataagactttcaagaaatttattttattggccttttgaaaaaagcagctttagataaagtaagcagttctgctttcattttataatttatttctacttttgtttcattaatcttttcctccggcatgccttggattttgttgtgttactctttttctagaggctcgcattgtgtgtctggttcacttatgatcacgcttgcctacttttaagaatggaagaggggaggtggagggtggctgcacagtcgagggtgtgaggcagtcttgctctagccccaccatgccctcagcccgctgtggccacgctggttcctcaattgctggggcgtgcagtgtctgtaagggaggctactgatgccatccgaggaagatgtaaggtttcgtgtgggcagcgagagcctagcaggcatgtggggtgcccagcaaagggtaacagtggacagttgttgcctcattccacagagttttgattttttttttttttttaatggtcactccatcaacatcccccatggccagagcctgagctggtccccagagacacaggcattcagctgacagcctcgccttcacgctgctgctgttctcatgggggacaggcctcaggtggcaatgcacaaatcattagttaagggcagttgtgacagttaccaaggagtgtagtcccccgccccccgcccagtgaaaacagccctaaccaggggtggggacctttgggctctgacccgaagggtaggagaagctggaaggacagcattcctgtctgcgaaggcaggagcaaagctgccaggctatgaaggaaatggctggagcctgaagtcatgcaagctggggctggcagggacagggccaacttccaggcctgggggccaccatgaggattcaggacgtgacccccagggcacatgaaggccttccatctgtatttaagaaaagactttatcagacgagtatggtggctcacgcctgaatcttagcactttgggaggctgaggcaggtggatcacgaggtcaggagttcaataccagcctggccaatatggtaaaaccccatctctactaaaactacaaaaattagccaggcatggtggcgcacgcctgtagtcccagctactcgggaggctgaggcagaagaatcacttgaacccgggaggtggaggttacagtgagccaagatcgcgccactacactccagcctgggtgacagagtgagactccgtctcaaaaaaaccaaaagactttatcttatttcctatatgtttgtggtttcagtcctgatgtataatttgaccctagttagaatggttatctgaggaagtggcctgtacgatttctgcttttttaaatgtgtggctccctttcttcattgattaacgtatgattatttttataaatgttccatggcagtgggaagggattctctgtcacattccacatctggatcagttcctccccattttgttggtcaaatccgatctgccatatcctgtgtaatgacaagtgagttgcattctcaccgtcactcctggggtctctccgcttcccctgagctggctcagcagtctgctccatgtgttttgatgcagggtgacccattggtattcccgacactaacgcccccgtctgtggactgcttgctgcttgggcttcactgtgtctggtgttgacagtgcagacctaaaggtgtgcacacatgtgcacacacactccgctgtcttcttgtttgcactggacttaaatatctatgagggttattttcaactgctgaatttggaatgatttttatatcttttctgctttctgcccatgtacatgtgtttattttacactgttgtgattggtagttactatgtggggacacaattacttgggctgaaataatccacctgttgtggttggggtcctctggggcattccagggtgagaggttgtcactgccacctgggccatgtgggccggcaccagcattttgtggttacgaattctacagtcacaaatatctttgggcaaatccccttctatacctcaaggcagcttttggtttgcaaccccactggccagagggaagggccagtcacttggctctctcactgccctgcgccccagatggttctagggctgctgttttcccttggccctgccaacaccactgtttttacttctgctcattggctgagtgcagtggttcctggaagccagtggcacgtttccccgcgtagctcgcttatcccacagcacacacccaagggttctgttgctaacacgctgaattaattctttgctcatcttacagagtgtgttttgactgcccccatttctgaggccttgtaaggccagagctttgttgcttcatcggcaggttgggacttagatggccgtgaatgtttcctctctgctgctgcagtaagtaagtgcccgcaccatagtgtgtttggaggctgaagttgaagcgaggctgtgaggggagatggacgtgtgaggagggatgatggggcttgagcaaagtgggggagggggcaaaggcagttggcccaacacattccccacccctttgagaggtctgaggcctgcagacctggctcggagcccacctggtagtcctc

SEQ ID NO: 455571 - DNA, 10384 bp, Homo sapiens
tcccacaccacccgcctcccctgccgcctcctgccaccccctaggccaaggtaataatcatcctgaatcctgggtttatctctcacttgctttcttttcatataattttgcaaaagaatctgatctaaatgtgtttttcagagtatatatttatattttagctgttcttagagaaaatttattattttgcatgtaatcttatggaacattctcatttaataccatggtaagattcagcccttgcccaggggatagttcatttagtttgtttactggatagagctcatcatgtgactatacctcagttagtttatcagttctcccatccatggtgactaggttgcctctcagcctctcaacaacactgtttctcagtgtccttgtagaagtgatatgtgggtgttttctccttacacagagttgaaaggtgacgacaacaacgttggcactaccaatcccccaccctccagaggggtaaccagtgttaccagtttgctgtgtttcctgctacacctcgccttattcacttccatttgtatctgaaaaacgtgttgcatggtttcttttctatagaagtggtaaaatgctattgtgtcctgtacattattgattactttttttcatttaacagtagggagatgcctgggagtacacagagaactgccctcattgttttcaacttctgcactgtatgtctgtgagtttagccattctgctgttaatggaaatttacagtattctaatcttttgatattacaaacagttctgtgcgatcatcgtcatacacaaccccttgtgcacaatgcatgagtgtttctcagggtaggtaccaagaagtgaaattcctgggtcatagggcgtgagtccgacatttttctccattctgccctgttgccctccagagtgggtgtccagctttgcatacctaagtatgagagtatctgttgttcatatcctctacgacgctccatatatgaaacttaagtttctgctagttgccatctttgatctatcatgtatgcagtgacctactaagactgtaattggtacagtagattcttgtcatctgtgtgtgaatttagcattcatgggcttaatgctgacaaggcccccagggtccaagacatataatcatgtataattttgtcaaggtataattttttaaattgcttttgtcatgtgtctgctggtgatgcccaacccagtgctctgcacccaggtcacactgtggctttgtcctctgcttatgcctgcattgcagcaactgtcctgaagagaccaaaattatgcagatttaggtaagtccatggctaatgttattatattatgtgctattgtaatggatggggctgtggagtgtatgaatttataaatcactggtcttgtaattaaaattcaaacactatagaaaaaggccatgtagaagataaaagttcctctataatcccggacccctaagataactactaatgacaacttcatttatattccttcagacattttctggctgtggatgtactaaaatgtatcctattattctctgccctaaaatggaatcatacaaggtgtactgttatttttatggctctataacatgtcatattgtacgtgttggtatggtcattttaaccatttttctagtgatggctttgaggttatttgcagtttcctagccatctcaaagtgtgctgcggggatctcttttgcatccctctgggtgcagagctgaggcacccagaggcagtgtccagaggaggcagcatctgtaggtgtcttcacctgctctggctcttggcacatctggttggtgacactgttttgtgagatgggttgaaagcacgtgctgccaaaatagaataatgttggtcctctcctcatgtgccgtggaactggggtaaaactgcgtagtggctgcagctgcctgtccataccggaatcgagtataacacggtgcctggcttagcacaaaacagtagtgggtcctgcaggccccagagtctaattcctggtattctttcccctacacagattaaataaaccaaaaacaaactattctaggaaagcgtctgtgacatttgtaaaaagtggtatttaatgatcttttattcacttgtctgtttagtttgttgaaatcttaagtggcatcctggtctgggaaggagtgctgtctgcgcctgccctccgctgggcacagcgtggctgcttcaggggctaagcacacactttctgtcttctaaagggccgccacatgccaggagctcaggtgtgagcccggctctggctcttacctcatagggtcactcataggggcacagggagcagaacattgtacacagcgaggcaccacccggcttggcatctgcctcggtggacttactacctctagaaggaaatacctgagttcctctggcctcagctcctagagtgactggtgtgctgtccctgttactcttctgtcaaggtgacaactgtgtgacccatcatctgtgtgtcaaagcaaggccctgcctgggcctctgctcctgtccgggctgcacaaaggcaaatgctttgctagtttccttccagttaatttcacctatgaatagatgtgtgaaaactgttcaaagccatacctgcacatgtttgaacttcaaaccctgtgggtgattcagtggcatctttctctaacccccagcctcccttcccacagaggccaccgtcatggccagttgctgcagtttctttccagagaacctgtgtatgtgtaaagctgtacaggcgtgggtacaccacacagcctgtcttgcactgtggactgttgagttactagtacatctaggtaagcaccgcatatctgtattcatgtctgccttggtcttttcaacatctttgtggtagccgtgtttgaattacccattccctttttggggaaccattaagttgtttcagcaatttttactgtagataaggctataccgcatatctgtgtacatgggtttttatgtacatgggcaagtatatctgtgagagaaaagtttcctcaggaggaattctgggcacagcatgtgtaaatttctaaatatgatggacacccccagcttccacctcaaggaggttggtcccattgacatttccccacaccttcacccaggctgtgcccttaaacttggttatttgtcaatgtgagaagtggaaaatagtatttaattgtagtttggatttgtatttctattgggttgtatacttactgattaataataagagctctttacatattaaggaaattaacccttttcaaatacattcctatttctcactaatctttaagttttattgtaatattttgctctttagtttatatatatatgtatatatatatatatgtatatatatatatatacatatatatatacatatatatatactaattttcttttatggttcctggattttgtgagtagtttgaaaaggctaatccagctgaagattttgttgttgttgttaaaccccatgttttctcctaactctttttatttttattttggaggactctatctagacttaattttagcataacaagtgacagggttagttagcctgttgtccttacaccattttctggctaatacagctattaactattgatctgtctattcacgtgccagttcctaatggttttacatagtgtaatctgcacttcaaaatagcgaagggaagccctacctcattattctacttttccagaattctcctggctattccaggctgcatgtttaccttaaccttccctgtgatgtcttcatgccgttgtcttcttatgcaagaataaggtacgtctttccatccactcacgtctatttaatttgactttgcattacacagaaagctggtcttggtctgtctacctcggcatctagttgtcctcactgccccctagccgaccccaccccatctgactgactaccccatcacagagtacttttatttacgttttgctctgcctaatggttacttgatactgtcacgccgacagtgtccagttcagtggtctttgcagttgaaatgctcccgtacacactgtcttgttaaaaatgccagtaagttcatacaaacccagcttgcacccaaggtcacattcagagagcgtagggctgggatgggttgttttccaagcttctgccactgtgtggctagctcttcccactgggaagttctgtgtacccggaatgtcggagtggagtcctgttctagtgtccagcacctgaccctgtgcccaacccctcaacagcctattcctgctgtccacagcctgctggaactttttacaaaatatgttgccatgctggaccctgggcactggacataagccccctggcagcctttttcatgtcacccaaaggggtaattgtcctactggtggtctgtaagatgagttagggtgacttgctaatagacattgtaaatcttaatatttatgtatgtattttattattaccggttttccatttatgatggtaatattgtttcttctaagaatatttatttttccttctaaatattgagataaaattcatgcttttgaaatgttctattcagtggcttttagtatatttgctatgttgtgcaaccatcgacactatccatttctagaactttttcgtcatcccaaacagacgctctgtattcataaaaaaataacttcctacctgtctctccccctagtctttggtaacctttgttatactggtaaactttgttgtgctctctgtctgtgtgaatttgcctattctaggggcctcatataagtgtaatcatacagtatttgtctttttgggtctgtctgatttcacttagcgggttttcagggttcattcatgttgcagcatataacagtactgcgttcctttttctggctgaataatattccactgtatggatagaccccattttgtttattcacacatcatttggacatttggattatttctggtttttggctattatgaacaatggtgctatgaacagttgcgtacaagtttttgtgtgaacatatgttttcaattctctcattatatacctaggagtagaattactgggtcatatggtaactgtatatttttgaggaactgccaaactattttcccacgtccatgcaccatttcacattcccaccagtaagtaagagggttccaatttctgcgcattcttgccaacactagttattatctgactttctggttataatcattctaatgagtgtgaagtagcctctggtgtcatttggatttgcatttctctgatgagtgatgctatcaagcacctttgctggtgctgttggccatatgtgtatgttccctggagaagtgtctgtgctgagccttggcccactttttaattaggcgtttgtctttttattactgagttgtaagagttctttatatattctggattctagacccttatcagatacatggtttgcaaatattttctcccattctgtgggttgtgttttcactttatcgataatgtccttagacatataataaatttgtattttaaaagtgacttgatttggctgtgcaaggtggctcacgcttgtaatcccagcactttgggagactgaggtgggtggatcatatgaggaggctaggagttcgaggtcagcctggccagcatagcgaaaacttgtctctactaaaaatacaaaaattagtcaggcatggtggtgcacgtctgtaataccagcttctcaggaggctgaggcacgaggatcacttgaacccaggaggaggaggttgcagtgagctgagatcatgccagggcaacagaatgagactttgtttaaaaaaaaaaaaaagtgacttgatttaagggaaaaaatgactggctatattcagtcagatatggcaaaaagtctcaaggtgttaatgtgaatgattaaggtcttggggggggtgtcccctatcagactacaggtgtttagaggcacagaaaaaggtgcagttgggttcttaatgtgaaatgatgagaagcacaactccagtgtgtctctttgtgtagaatgtcagcagacaccccctgctagatgtgctggatcatgggaaagcatttccatttgttactagattgttcagaagttttaatttatgatgggtgtggtggctcatgcctgtagtcccagcactgtgggaggctgaggcaggaggatcatctgaggccaagagttcaagatcagcctgggcaacatagtgataccctatctcttaaaaaagaagaagtttttaaatttgaaataataataggtactggatttatgcaaatgtcttttctgcgtcttttgagatgagtatcaggtttttttttttccttttatcatctgatgatgaacttaatgtttccatttgtattaatggaatactaagtccctctgtgatttctgaaccaagctattcctaggcctgagttttattttgttgacacagaaataaattagaaggccaagcgtggtggcatgtgcctgtagtcctagttgctgaggtaagaggattgcttgagcccaggagttcaaggctgcagcaagctttgattgcgccactgcactccagccttggcgacagactaagacgctgtctcaaaaaaaaacaaaaacgacaaaaaaaaaacaaaacagaaaaaataaactaaggcaatgacagtccctggcaaatgctgggagggaggcagcagtggtcagggaaggtaaccctgaagcaggacttgtaaagcaaataagattgggaggccaaggtgggtggatcacgaggtcaggagttcgagaccagcctggccaacatagtgaaaccccgtctttactaaaaatacaaaaaaattagccaggtgtggtggtgggtgcctgtagtcccagctacttgggaggctgaggcaggagaatctcgaacccaggaggcggaggttacagtcagctgagaccgcaccattgcactccagcctgggtgacagagcaagattccgtctcaaaaaaaaaaaaaaaaaaaaaaaaccaagaagaaaaggaatgaattagaacttcttctgcttggacttaagggcatcatcaggcaggttttgggtaggatagcaggggaggcagagacatagtcggggtcagtggtcatgagtgtggctttgagcccaaaaacttggtttctgttccctactttgccactcagtagtgcatgactttggccaaatttcttaaattcatgaagcaagtttccgggtgaatgaaatggggataaaaatagtgttcaaacctatccgttggtttgtgtgaaactgaaatgaatagtatcgtgcaggtacttgtgagcaaggggagctgctgtttcctgtccctttatgatgggaaatatctagacaagttcccaaccctctgcactgcaggctgcatggcacggagggtcttgtaacaccagctggggctggccttcttttaggagcttcagtggttctgaaaacttttatttgtttgtttgttttagtagatgtggggtctttctgtgttgcccggactggtctcaaacttctggactcaagtgatcctcccccgctcaacctcccaaagtgttgggattacaggtgtgagccactgtgcccagccttgaaaactttttcaggttcttccagggttactgggctattaaatatttctatttcattataagtcagtttttcaaagttatattatcttaattaccttttttatatgtattagtgtagagtagcattttatattttgatatcctccttatgcatagtttttcactttttattcctagtttttcgtttttaataagactttcaagaaatttattttattggccttttgaaaaaagcagctttagataaagtaagcagttctgctttcattttataatttatttctacttttgtttcattaatcttttcctccggcatgccttggattttgttgtgttactctttttctagaggctcgcattgtgtgtctggttcacttatgatcacgcttgcctacttttaagaatggaagaggggaggtggagggtggctgcacagtcgagggtgtgaggcagtcttgctctagccccaccatgccctcagcccgctgtggccacgctggttcctcaattgctggggcgtgcagtgtctgtaagggaggctactgatgccatccgaggaagatgtaaggtttcgtgtgggcagcgagagcctagcaggcatgtggggtgcccagcaaagggtaacagtggacagttgttgcctcattccacagagttttgattttttttttttttttaatggtcactccatcaacatcccccatggccagagcctgagctggtccccagagacacaggcattcagctgacagcctcgccttcacgctgctgctgttctcatgggggacaggcctcaggtggcaatgcacaaatcattagttaagggcagttgtgacagttaccaaggagtgtagtcccccgccccccgcccagtgaaaacagccctaaccaggggtggggacctttgggctctgacccgaagggtaggagaagctggaaggacagcattcctgtctgcgaaggcaggagcaaagctgccaggctatgaaggaaatggctggagcctgaagtcatgcaagctggggctggcagggacagggccaacttccaggcctgggggccaccatgaggattcaggacgtgacccccagggcacatgaaggccttccatctgtatttaagaaaagactttatcagacgagtatggtggctcacgcctgaatcttagcactttgggaggctgaggcaggtggatcacgaggtcaggagttcaataccagcctggccaatatggtaaaaccccatctctactaaaactacaaaaattagccaggcatggtggcgcacgcctgtagtcccagctactcgggaggctgaggcagaagaatcacttgaacccgggaggtggaggttacagtgagccaagatcgcgccactacactccagcctgggtgacagagtgagactccgtctcaaaaaaaccaaaagactttatcttatttcctatatgtttgtggtttcagtcctgatgtataatttgaccctagttagaatggttatctgaggaagtggcctgtacgatttctgcttttttaaatgtgtggctccctttcttcattgattaacgtatgattatttttataaatgttccatggcagtgggaagggattctctgtcacattccacatctggatcagttcctccccattttgttggtcaaatccgatctgccatatcctgtgtaatgacaagtgagttgcattctcaccgtcactcctggggtctctccgcttcccctgagctggctcagcagtctgctccatgtgttttgatgcagggtgacccattggtattcccgacactaacgcccccgtctgtggactgcttgctgcttgggcttcactgtgtctggtgttgacagtgcagacctaaaggttcttgtttgcactggacttaaatatctatgagggttattttcaactgctgaatttggaatgatttttatatcttttctgctttctgcccatgtacatgtgtttattttacactgttgtgattggtagttactatgtggggacacaattacttgggctgaaataatccacctgttgtggttggggtcctctggggcattccagggtgagaggttgtcactgccacctgggccatgtgggccggcaccagcattttgtggttacgaattctacagtcacaaatatctttgggcaaatccccttctatacctcaaggcagcttttggtttgcaaccccactggccagagggaagggccagtcacttggctctctcactgccctgcgccccagatggttctagggctgctgttttcccttggccctgccaacaccactgtttttacttctgctcattggctgagtgcagtggttcctggaagccagtggcacgtttccccgcgtagctcgcttatcccacagcacacacccaagggttctgttgctaacacgctgaattaattctttgctcatcttacagagtgtgttttgactgcccccatttctgaggccttgtaaggccagagctttgttgcttcatcggcaggttgggacttagatggccgtgaatgtttcctctctgctgctgcagtaagtaagtgcccgcaccatagtgtgtttggaggctgaagttgaagcgaggctgtgaggggagatggacgtgtgaggagggatgatggggcttgagcaaagtgggggagggggcaaaggcagttggcccaacacattccccacccctttgagaggtctgaggcctgcagacctggctcggagcccacctggtagtcctc

SEQ ID NO: 455572 - DNA, 10363 bp, Homo sapiens
tcccacaccacccgcctcccctgccgcctcctgccaccccctaggccaaggtaataatcatcctgaatcctgggtttatctctcacttgctttcttttcatataattttgcaaaagaatctgatctaaatgtgtttttcagagtatatatttatattttagctgttcttagagaaaatttattattttgcatgtaatcttatggaacattctcatttaataccatggtaagattcagcccttgcccaggggatagttcatttagtttgtttactggatagagctcatcatgtgactatacctcagttagtttatcagttctcccatccatggtgactaggttgcctctcagcctctcaacaacactgtttctcagtgtccttgtagaagtgatatgtgggtgttttctccttacacagagttgaaaggtgacgacaacaacgttggcactaccaatcccccaccctccagaggggtaaccagtgttaccagtttgctgtgtttcctgctacacctcgccttattcacttccatttgtatctgaaaaacgtgttgcatggtttcttttctatagaagtggtaaaatgctattgtgtcctgtacattattgattactttttttcatttaacagtagggagatgcctgggagtacacagagaactgccctcattgttttcaacttctgcactgtatgtctgtgagtttagccattctgctgttaatggaaatttacagtattctaatcttttgatattacaaacagttctgtgcgatcatcgtcatacacaaccccttgtgcacaatgcatgagtgtttctcagggtaggtaccaagaagtgaaattcctgggtcatagggcgtgagtccgacatttttctccattctgccctgttgccctccagagtgggtgtccagctttgcatacctaagtatgagagtatctgttgttcatatcctctacgacgctccatatatgaaacttaagtttctgctagttgccatctttgatctatcatgtatgcagtgacctactaagactgtaattggtacagtagattcttgtcatctgtgtgtgaatttagcattcatgggcttaatgctgacaaggcccccagggtccaagacatataatcatgtataattttgtcaaggtataattttttaaattgcttttgtcatgtgtctgctggtgatgcccaacccagtgctctgcacccaggtcacactgtggctttgtcctctgcttatgcctgcattgcagcaactgtcctgaagagaccaaaattatgcagatttaggtaagtccatggctaatgttattatattatgtgctattgtaatggatggggctgtggagtgtatgaatttataaatcactggtcttgtaattaaaattcaaacactatagaaaaaggccatgtagaagataaaagttcctctataatcccggacccctaagataactactaatgacaacttcatttatattccttcagacattttctggctgtggatgtactaaaatgtatcctattattctctgccctaaaatggaatcatacaaggtgtactgttatttttatggctctataacatgtcatattgtacgtgttggtatggtcattttaaccatttttctagtgatggctttgaggttatttgcagtttcctagccatctcaaagtgtgctgcggggatctcttttgcatccctctgggtgcagagctgaggcacccagaggcagtgtccagaggaggcagcatctgtaggtgtcttcacctgctctggctcttggcacatctggttggtgacactgttttgtgagatgggttgaaagcacgtgctgccaaaatagaataatgttggtcctctcctcatgtgccgtggaactggggtaaaactgcgtagtggctgcagctgcctgtccataccggaatcgagtataacacggtgcctggcttagcacaaaacagtagtgggtcctgcaggccccagagtctaattcctggtattctttcccctacacagattaaataaaccaaaaacaaactattctaggaaagcgtctgtgacatttgtaaaaagtggtatttaatgatcttttattcacttgtctgtttagtttgttgaaatcttaagtggcatcctggtctgggaaggagtgctgtctgcgcctgccctccgctgggcacagcgtggctgcttcaggggctaagcacacactttctgtcttctaaagggccgccacatgccaggagctcaggtgtgagcccggctctggctcttacctcatagggtcactcataggggcacagggagcagaacattgtacacagcgaggcaccacccggcttggcatctgcctcggtggacttactacctctagaaggaaatacctgagttcctctggcctcagctcctagagtgactggtgtgctgtccctgttactcttctgtcaaggtgacaactgtgtgacccatcatctgtgtgtcaaagcaaggccctgcctgggcctctgctcctgtccgggctgcacaaaggcaaatgctttgctagtttccttccagttaatttcacctatgaatagatgtgtgaaaactgttcaaagccatacctgcacatgtttgaacttcaaaccctgtgggtgattcagtggcatctttctctaacccccagcctcccttcccacagaggccaccgtcatggccagttgctgcagtttctttccagagaacctgtgtatgtgtaaagctgtacaggcgtgggtacaccacacagcctgtcttgcactgtggactgttgagttactagtacatctaggtaagcaccgcatatctgtattcatgtctgccttggtcttttcaacatctttgtggtagccgtgtttgaattacccattccctttttggggaaccattaagttgtttcagcaatttttactgtagataaggctataccgcatatctgtgtacatgggtttttatgtacatgggcaagtatatctgtgagagaaaagtttcctcaggaggaattctgggcacagcatgtgtaaatttctaaatatgatggacacccccagcttccacctcaaggaggttggtcccattgacatttccccacaccttcacccaggctgtgcccttaaacttggttatttgtcaatgtgagaagtggaaaatagtatttaattgtagtttggatttgtatttctattgggttgtatacttactgattaataataagagctctttacatattaaggaaattaacccttttcaaatacattcctatttctcactaatctttaagttttattgtaatattttgctctttagtttatatatatatgtatatatatatatatgtatatatatatatatacatatatatatacatatatatatactaattttcttttatggttcctggattttgtgagtagtttgaaaaggctaatccagctgaagattttgttgttgttgttaaaccccatgttttctcctaactctttttatttttattttggaggactctatctagacttaattttagcataacaagtgacagggttagttagcctgttgtccttacaccattttctggctaatacagctattaactattgatctgtctattcacgtgccagttcctaatggttttacatagtgtaatctgcacttcaaaatagcgaagggaagccctacctcattattctacttttccagaattctcctggctattccaggctgcatgtttaccttaaccttccctgtgatgtcttcatgccgttgtcttcttatgcaagaataaggtacgtctttccatccactcacgtctatttaatttgactttgcattacacagaaagctggtcttggtctgtctacctcggcatctagttgtcctcactgccccctagccgaccccaccccatctgactgactaccccatcacagagtacttttatttacgttttgctctgcctaatggttacttgatactgtcacgccgacagtgtccagttcagtggtctttgcagttgaaatgctcccgtacacactgtcttgttaaaaatgccagtaagttcatacaaacccagcttgcacccaaggtcacattcagagagcgtagggctgggatgggttgttttccaagcttctgccactgtgtggctagctcttcccactgggaagttctgtgtacccggaatgtcggagtggagtcctgttctagtgtccagcacctgaccctgtgcccaacccctcaacagcctattcctgctgtccacagcctgctggaactttttacaaaatatgttgccatgctggaccctgggcactggacataagccccctggcagcctttttcatgtcacccaaaggggtaattgtcctactggtggtctgtaagatgagttagggtgacttgctaatagacattgtaaatcttaatatttatgtatgtattttattattaccggttttccatttatgatggtaatattgtttcttctaagaatatttatttttccttctaaatattgagataaaattcatgcttttgaaatgttctattcagtggcttttagtatatttgctatgttgtgcaaccatcgacactatccatttctagaactttttcgtcatcccaaacagacgctctgtattcataaatggtaaactttgttgtgctctctgtctgtgtgaatttgcctattctaggggcctcatataagtgtaatcatacagtatttgtctttttgggtctgtctgatttcacttagcgggttttcagggttcattcatgttgcagcatataacagtactgcgttcctttttctggctgaataatattccactgtatggatagaccccattttgtttattcacacatcatttggacatttggattatttctggtttttggctattatgaacaatggtgctatgaacagttgcgtacaagtttttgtgtgaacatatgttttcaattctctcattatatacctaggagtagaattactgggtcatatggtaactgtatatttttgaggaactgccaaactattttcccacgtccatgcaccatttcacattcccaccagtaagtaagagggttccaatttctgcgcattcttgccaacactagttattatctgactttctggttataatcattctaatgagtgtgaagtagcctctggtgtcatttggatttgcatttctctgatgagtgatgctatcaagcacctttgctggtgctgttggccatatgtgtatgttccctggagaagtgtctgtgctgagccttggcccactttttaattaggcgtttgtctttttattactgagttgtaagagttctttatatattctggattctagacccttatcagatacatggtttgcaaatattttctcccattctgtgggttgtgttttcactttatcgataatgtccttagacatataataaatttgtattttaaaagtgacttgatttggctgtgcaaggtggctcacgcttgtaatcccagcactttgggagactgaggtgggtggatcatatgaggaggctaggagttcgaggtcagcctggccagcatagcgaaaacttgtctctactaaaaatacaaaaattagtcaggcatggtggtgcacgtctgtaataccagcttctcaggaggctgaggcacgaggatcacttgaacccaggaggaggaggttgcagtgagctgagatcatgccagggcaacagaatgagactttgtttaaaaaaaaaaaaaagtgacttgatttaagggaaaaaatgactggctatattcagtcagatatggcaaaaagtctcaaggtgttaatgtgaatgattaaggtcttggggggggtgtcccctatcagactacaggtgtttagaggcacagaaaaaggtgcagttgggttcttaatgtgaaatgatgagaagcacaactccagtgtgtctctttgtgtagaatgtcagcagacaccccctgctagatgtgctggatcatgggaaagcatttccatttgttactagattgttcagaagttttaatttatgatgggtgtggtggctcatgcctgtagtcccagcactgtgggaggctgaggcaggaggatcatctgaggccaagagttcaagatcagcctgggcaacatagtgataccctatctcttaaaaaagaagaagtttttaaatttgaaataataataggtactggatttatgcaaatgtcttttctgcgtcttttgagatgagtatcaggtttttttttttccttttatcatctgatgatgaacttaatgtttccatttgtattaatggaatactaagtccctctgtgatttctgaaccaagctattcctaggcctgagttttattttgttgacacagaaataaattagaaggccaagcgtggtggcatgtgcctgtagtcctagttgctgaggtaagaggattgcttgagcccaggagttcaaggctgcagcaagctttgattgcgccactgcactccagccttggcgacagactaagacgctgtctcaaaaaaaaacaaaaacgacaaaaaaaaaacaaaacagaaaaaataaactaaggcaatgacagtccctggcaaatgctgggagggaggcagcagtggtcagggaaggtaaccctgaagcaggacttgtaaagcaaataagattgggaggccaaggtgggtggatcacgaggtcaggagttcgagaccagcctggccaacatagtgaaaccccgtctttactaaaaatacaaaaaaattagccaggtgtggtggtgggtgcctgtagtcccagctacttgggaggctgaggcaggagaatctcgaacccaggaggcggaggttacagtcagctgagaccgcaccattgcactccagcctgggtgacagagcaagattccgtctcaaaaaaaaaaaaaaaaaaaaaaaaccaagaagaaaaggaatgaattagaacttcttctgcttggacttaagggcatcatcaggcaggttttgggtaggatagcaggggaggcagagacatagtcggggtcagtggtcatgagtgtggctttgagcccaaaaacttggtttctgttccctactttgccactcagtagtgcatgactttggccaaatttcttaaattcatgaagcaagtttccgggtgaatgaaatggggataaaaatagtgttcaaacctatccgttggtttgtgtgaaactgaaatgaatagtatcgtgcaggtacttgtgagcaaggggagctgctgtttcctgtccctttatgatgggaaatatctagacaagttcccaaccctctgcactgcaggctgcatggcacggagggtcttgtaacaccagctggggctggccttcttttaggagcttcagtggttctgaaaacttttatttgtttgtttgttttagtagatgtggggtctttctgtgttgcccggactggtctcaaacttctggactcaagtgatcctcccccgctcaacctcccaaagtgttgggattacaggtgtgagccactgtgcccagccttgaaaactttttcaggttcttccagggttactgggctattaaatatttctatttcattataagtcagtttttcaaagttatattatcttaattaccttttttatatgtattagtgtagagtagcattttatattttgatatcctccttatgcatagtttttcactttttattcctagtttttcgtttttaataagactttcaagaaatttattttattggccttttgaaaaaagcagctttagataaagtaagcagttctgctttcattttataatttatttctacttttgtttcattaatcttttcctccggcatgccttggattttgttgtgttactctttttctagaggctcgcattgtgtgtctggttcacttatgatcacgcttgcctacttttaagaatggaagaggggaggtggagggtggctgcacagtcgagggtgtgaggcagtcttgctctagccccaccatgccctcagcccgctgtggccacgctggttcctcaattgctggggcgtgcagtgtctgtaagggaggctactgatgccatccgaggaagatgtaaggtttcgtgtgggcagcgagagcctagcaggcatgtggggtgcccagcaaagggtaacagtggacagttgttgcctcattccacagagttttgattttttttttttttttaatggtcactccatcaacatcccccatggccagagcctgagctggtccccagagacacaggcattcagctgacagcctcgccttcacgctgctgctgttctcatgggggacaggcctcaggtggcaatgcacaaatcattagttaagggcagttgtgacagttaccaaggagtgtagtcccccgccccccgcccagtgaaaacagccctaaccaggggtggggacctttgggctctgacccgaagggtaggagaagctggaaggacagcattcctgtctgcgaaggcaggagcaaagctgccaggctatgaaggaaatggctggagcctgaagtcatgcaagctggggctggcagggacagggccaacttccaggcctgggggccaccatgaggattcaggacgtgacccccagggcacatgaaggccttccatctgtatttaagaaaagactttatcagacgagtatggtggctcacgcctgaatcttagcactttgggaggctgaggcaggtggatcacgaggtcaggagttcaataccagcctggccaatatggtaaaaccccatctctactaaaactacaaaaattagccaggcatggtggcgcacgcctgtagtcccagctactcgggaggctgaggcagaagaatcacttgaacccgggaggtggaggttacagtgagccaagatcgcgccactacactccagcctgggtgacagagtgagactccgtctcaaaaaaaccaaaagactttatcttatttcctatatgtttgtggtttcagtcctgatgtataatttgaccctagttagaatggttatctgaggaagtggcctgtacgatttctgcttttttaaatgtgtggctccctttcttcattgattaacgtatgattatttttataaatgttccatggcagtgggaagggattctctgtcacattccacatctggatcagttcctccccattttgttggtcaaatccgatctgccatatcctgtgtaatgacaagtgagttgcattctcaccgtcactcctggggtctctccgcttcccctgagctggctcagcagtctgctccatgtgttttgatgcagggtgacccattggtattcccgacactaacgcccccgtctgtggactgcttgctgcttgggcttcactgtgtctggtgttgacagtgcagacctaaaggtgtgcacacatgtgcacacacactccgctgtcttcttgtttgcactggacttaaatatctatgagggttattttcaactgctgaatttggaatgatttttatatcttttctgctttctgcccatgtacatgtgtttattttacactgttgtgattggtagttactatgtggggacacaattacttgggctgaaataatccacctgttgtggttggggtcctctggggcattccagggtgagaggttgtcactgccacctgggccatgtgggccggcaccagcattttgtggttacgaattctacagtcacaaatatctttgggcaaatccccttctatacctcaaggcagcttttggtttgcaaccccactggccagagggaagggccagtcacttggctctctcactgccctgcgccccagatggttctagggctgctgttttcccttggccctgccaacaccactgtttttacttctgctcattggctgagtgcagtggttcctggaagccagtggcacgtttccccgcgtagctcgcttatcccacagcacacacccaagggttctgttgctaacacgctgaattaattctttgctcatcttacagagtgtgttttgactgcccccatttctgaggccttgtaaggccagagctttgttgcttcatcggcaggttgggacttagatggccgtgaatgtttcctctctgctgctgcagtaagtaagtgcccgcaccatagtgtgtttggaggctgaagttgaagcgaggctgtgaggggagatggacgtgtgaggagggatgatggggcttgagcaaagtgggggagggggcaaaggcagttggcccaacacattccccacccctttgagaggtctgaggcctgcagacctggctcggagcccacctggtagtcctc

SEQ ID NO: 455573 - DNA, 10362 bp, Homo sapiens
tcccacaccacccgcctcccctgccgcctcctgccaccccctaggccaaggtaataatcatcctgaatcctgggtttatctctcacttgctttcttttcatataattttgcaaaagaatctgatctaaatgtgtttttcagagtatatatttatattttagctgttcttagagaaaatttattattttgcatgtaatcttatggaacattctcatttaataccatggtaagattcagcccttgcccaggggatagttcatttagtttgtttactggatagagctcatcatgtgactatacctcagttagtttatcagttctcccatccatggtgactaggttgcctctcagcctctcaacaacactgtttctcagtgtccttgtagaagtgatatgtgggtgttttctccttacacagagttgaaaggtgacgacaacaacgttggcactaccaatcccccaccctccagaggggtaaccagtgttaccagtttgctgtgtttcctgctacacctcgccttattcacttccatttgtatctgaaaaacgtgttgcatggtttcttttctatagaagtggtaaaatgctattgtgtcctgtacattattgattactttttttcatttaacagtagggagatgcctgggagtacacagagaactgccctcattgttttcaacttctgcactgtatgtctgtgagtttagccattctgctgttaatggaaatttacagtattctaatcttttgatattacaaacagttctgtgcgatcatcgtcatacacaaccccttgtgcacaatgcatgagtgtttctcagggtaggtaccaagaagtgaaattcctgggtcatagggcgtgagtccgacatttttctccattctgccctgttgccctccagagtgggtgtccagctttgcatacctaagtatgagagtatctgttgttcatatcctctacgacgctccatatatgaaacttaagtttctgctagttgccatctttgatctatcatgtatgcagtgacctactaagactgtaattggtacagtagattcttgtcatctgtgtgtgaatttagcattcatgggcttaatgctgacaaggcccccagggtccaagacatataatcatgtataattttgtcaaggtataattttttaaattgcttttgtcatgtgtctgctggtgatgcccaacccagtgctctgcacccaggtcacactgtggctttgtcctctgcttatgcctgcattgcagcaactgtcctgaagagaccaaaattatgcagatttaggtaagtccatggctaatgttattatattatgtgctattgtaatggatggggctgtggagtgtatgaatttataaatcactggtcttgtaattaaaattcaaacactatagaaaaaggccatgtagaagataaaagttcctctataatcccggacccctaagataactactaatgacaacttcatttatattccttcagacattttctggctgtggatgtactaaaatgtatcctattattctctgccctaaaatggaatcatacaaggtgtactgttatttttatggctctataacatgtcatattgtacgtgttggtatggtcattttaaccatttttctagtgatggctttgaggttatttgcagtttcctagccatctcaaagtgtgctgcggggatctcttttgcatccctctgggtgcagagctgaggcacccagaggcagtgtccagaggaggcagcatctgtaggtgtcttcacctgctctggctcttggcacatctggttggtgacactgttttgtgagatgggttgaaagcacgtgctgccaaaatagaataatgttggtcctctcctcatgtgccgtggaactggggtaaaactgcgtagtggctgcagctgcctgtccataccggaatcgagtataacacggtgcctggcttagcacaaaacagtagtgggtcctgcaggccccagagtctaattcctggtattctttcccctacacagattaaataaaccaaaaacaaactattctaggaaagcgtctgtgacatttgtaaaaagtggtatttaatgatcttttattcacttgtctgtttagtttgttgaaatcttaagtggcatcctggtctgggaaggagtgctgtctgcgcctgccctccgctgggcacagcgtggctgcttcaggggctaagcacacactttctgtcttctaaagggccgccacatgccaggagctcaggtgtgagcccggctctggctcttacctcatagggtcactcataggggcacagggagcagaacattgtacacagcgaggcaccacccggcttggcatctgcctcggtggacttactacctctagaaggaaatacctgagttcctctggcctcagctcctagagtgactggtgtgctgtccctgttactcttctgtcaaggtgacaactgtgtgacccatcatctgtgtgtcaaagcaaggccctgcctgggcctctgctcctgtccgggctgcacaaaggcaaatgctttgctagtttccttccagttaatttcacctatgaatagatgtgtgaaaactgttcaaagccatacctgcacatgtttgaacttcaaaccctgtgggtgattcagtggcatctttctctaacccccagcctcccttcccacagaggccaccgtcatggccagttgctgcagtttctttccagagaacctgtgtatgtgtaaagctgtacaggcgtgggtacaccacacagcctgtcttgcactgtggactgttgagttactagtacatctaggtaagcaccgcatatctgtattcatgtctgccttggtcttttcaacatctttgtggtagccgtgtttgaattacccattccctttttggggaaccattaagttgtttcagcaatttttactgtagataaggctataccgcatatctgtgtacatgggtttttatgtacatgggcaagtatatctgtgagagaaaagtttcctcaggaggaattctgggcacagcatgtgtaaatttctaaatatgatggacacccccagcttccacctcaaggaggttggtcccattgacatttccccacaccttcacccaggctgtgcccttaaacttggttatttgtcaatgtgagaagtggaaaatagtatttaattgtagtttggatttgtatttctattgggttgtatacttactgattaataataagagctctttacatattaaggaaattaacccttttcaaatacattcctatttctcactaatctttaagttttattgtaatattttgctctttagtttatatatatatgtatatatatatatatgtatatatatatatatacatatatatatacatatatatatactaattttcttttatggttcctggattttgtgagtagtttgaaaaggctaatccagctgaagattttgttgttgttgttaaaccccatgttttctcctaactctttttatttttattttggaggactctatctagacttaattttagcataacaagtgacagggttagttagcctgttgtccttacaccattttctggctaatacagctattaactattgatctgtctattcacgtgccagttcctaatggttttacatagtgtaatctgcacttcaaaatagcgaagggaagccctacctcattattctacttttccagaattctcctggctattccaggctgcatgtttaccttaaccttccctgtgatgtcttcatgccgttgtcttcttatgcaagaataaggtacgtctttccatccactcacgtctatttaatttgactttgcattacacagaaagctggtcttggtctgtctacctcggcatctagttgtcctcactgccccctagccgaccccaccccatctgactgactaccccatcacagagtacttttatttacgttttgctctgcctaatggttacttgatactgtcacgccgacagtgtccagttcagtggtctttgcagttgaaatgctcccgtacacactgtcttgttaaaaatgccagtaagttcatacaaacccagcttgcacccaaggtcacattcagagagcgtagggctgggatgggttgttttccaagcttctgccactgtgtggctagctcttcccactgggaagttctgtgtacccggaatgtcggagtggagtcctgttctagtgtccagcacctgaccctgtgcccaacccctcaacagcctattcctgctgtccacagcctgctggaactttttacaaaatatgttgccatgctggaccctgggcactggacataagccccctggcagcctttttcatgtcacccaaaggggtaattgtcctactggtggtctgtaagatgagttagggtgacttgctaatagacattgtaaatcttaatatttatgtatgtattttattattaccggttttccatttatgatggtaatattgtttcttctaagaatatttatttttccttctaaatattgagataaaattcatgcttttgaaatgttctattcagtggcttttagtatatttgctatgttgtgcaaccatcgacactatccatttctagaactttttcgtcatcccaaacagacgctctgtattcataaaaaaataacttcctacctgtctctccccctagtctttggtaacctttgttatactggtaaactttgttgtgctctctgtctgtgtgaatttgcctattctaggggcctcatataagtgtaatcatacagtatttgtctttttgggtctgtctgatttcacttagcgggttttcagggttcattcatgttgcagcatataacagtactgcgttcctttttctggctgaataatattccactgtatggatagaccccattttgtttattcacacatcatttggacatttggattatttctggtttttggctattatgaacaatggtgctatgaacagttgcgtacaagtttttgtgtgaacatatgttttcaattctctcattatatacctaggagtagaattactgggtcatatggtaactgtatatttttgaggaactgccaaactattttcccacgtccatgcaccatttcacattcccaccagtaagtaagagggttccaatttctgcgcattcttgccaacactagttattatctgactttctggttataatcattctaatgagtgtgaagtagcctctggtgtcatttggatttgcatttctctgatgagtgatgctatcaagcacctttgctggtgctgttggccatatgtgtatgttccctggagaagtgtctgtgctgagccttggcccactttttaattaggcgtttgtctttttattactgagttgtaagagttctttatatattctggattctagacccttatcagatacatggtttgcaaatattttctcccattctgtgggttgtgttttcactttatcgataatgtccttagacatataataaatttgtattttaaaagtgacttgatttggctgtgcaaggtggctcacgcttgtaatcccagcactttgggagactgaggtgggtggatcatatgaggaggctaggagttcgaggtcagcctggccagcatagcgaaaacttgtctctactaaaaatacaaaaattagtcaggcatggtggtgcacgtctgtaataccagcttctcaggaggctgaggcacgaggatcacttgaacccaggaggaggaggttgcagtgagctgagatcatgccagggcaacagaatgagactttgtttaaaaaaaaaaaaaagtgacttgatttaagggaaaaaatgactggctatattcagtcagatatggcaaaaagtctcaaggtgttaatgtgaatgattaaggtcttggggggggtgtcccctatcagactacaggtgtttagaggcacagaaaaaggtgcagttgggttcttaatgtgaaatgatgagaagcacaactccagtgtgtctctttgtgtagaatgtcagcagacaccccctgctagatgtgctggatcatgggaaagcatttccatttgttactagattgttcagaagttttaatttatgatgggtgtggtggctcatgcctgtagtcccagcactgtgggaggctgaggcaggaggatcatctgaggccaagagttcaagatcagcctgggcaacatagtgataccctatctcttaaaaaagaagaagtttttaaatttgaaataataataggtactggatttatgcaaatgtcttttctgcgtcttttgagatgagtatcaggtttttttttttccttttatcatctgatgatgaacttaatgtttccatttgtattaatggaatactaagtccctctgtgatttctgaaccaagctattcctaggcctgagttttattttgttgacacagaaataaattagaaggccaagcgtggtggcatgtgcctgtagtcctagttgctgaggtaagaggattgcttgagcccaggagttcaaggctgcagcaagctttgattgcgccactgcactccagccttggcgacagactaagacgctgtctcaaaaaaaaacaaaaacgacaaaaaaaaaacaaaacagaatggtcagggaaggtaaccctgaagcaggacttgtaaagcaaataagattgggaggccaaggtgggtggatcacgaggtcaggagttcgagaccagcctggccaacatagtgaaaccccgtctttactaaaaatacaaaaaaattagccaggtgtggtggtgggtgcctgtagtcccagctacttgggaggctgaggcaggagaatctcgaacccaggaggcggaggttacagtcagctgagaccgcaccattgcactccagcctgggtgacagagcaagattccgtctcaaaaaaaaaaaaaaaaaaaaaaaaccaagaagaaaaggaatgaattagaacttcttctgcttggacttaagggcatcatcaggcaggttttgggtaggatagcaggggaggcagagacatagtcggggtcagtggtcatgagtgtggctttgagcccaaaaacttggtttctgttccctactttgccactcagtagtgcatgactttggccaaatttcttaaattcatgaagcaagtttccgggtgaatgaaatggggataaaaatagtgttcaaacctatccgttggtttgtgtgaaactgaaatgaatagtatcgtgcaggtacttgtgagcaaggggagctgctgtttcctgtccctttatgatgggaaatatctagacaagttcccaaccctctgcactgcaggctgcatggcacggagggtcttgtaacaccagctggggctggccttcttttaggagcttcagtggttctgaaaacttttatttgtttgtttgttttagtagatgtggggtctttctgtgttgcccggactggtctcaaacttctggactcaagtgatcctcccccgctcaacctcccaaagtgttgggattacaggtgtgagccactgtgcccagccttgaaaactttttcaggttcttccagggttactgggctattaaatatttctatttcattataagtcagtttttcaaagttatattatcttaattaccttttttatatgtattagtgtagagtagcattttatattttgatatcctccttatgcatagtttttcactttttattcctagtttttcgtttttaataagactttcaagaaatttattttattggccttttgaaaaaagcagctttagataaagtaagcagttctgctttcattttataatttatttctacttttgtttcattaatcttttcctccggcatgccttggattttgttgtgttactctttttctagaggctcgcattgtgtgtctggttcacttatgatcacgcttgcctacttttaagaatggaagaggggaggtggagggtggctgcacagtcgagggtgtgaggcagtcttgctctagccccaccatgccctcagcccgctgtggccacgctggttcctcaattgctggggcgtgcagtgtctgtaagggaggctactgatgccatccgaggaagatgtaaggtttcgtgtgggcagcgagagcctagcaggcatgtggggtgcccagcaaagggtaacagtggacagttgttgcctcattccacagagttttgattttttttttttttttaatggtcactccatcaacatcccccatggccagagcctgagctggtccccagagacacaggcattcagctgacagcctcgccttcacgctgctgctgttctcatgggggacaggcctcaggtggcaatgcacaaatcattagttaagggcagttgtgacagttaccaaggagtgtagtcccccgccccccgcccagtgaaaacagccctaaccaggggtggggacctttgggctctgacccgaagggtaggagaagctggaaggacagcattcctgtctgcgaaggcaggagcaaagctgccaggctatgaaggaaatggctggagcctgaagtcatgcaagctggggctggcagggacagggccaacttccaggcctgggggccaccatgaggattcaggacgtgacccccagggcacatgaaggccttccatctgtatttaagaaaagactttatcagacgagtatggtggctcacgcctgaatcttagcactttgggaggctgaggcaggtggatcacgaggtcaggagttcaataccagcctggccaatatggtaaaaccccatctctactaaaactacaaaaattagccaggcatggtggcgcacgcctgtagtcccagctactcgggaggctgaggcagaagaatcacttgaacccgggaggtggaggttacagtgagccaagatcgcgccactacactccagcctgggtgacagagtgagactccgtctcaaaaaaaccaaaagactttatcttatttcctatatgtttgtggtttcagtcctgatgtataatttgaccctagttagaatggttatctgaggaagtggcctgtacgatttctgcttttttaaatgtgtggctccctttcttcattgattaacgtatgattatttttataaatgttccatggcagtgggaagggattctctgtcacattccacatctggatcagttcctccccattttgttggtcaaatccgatctgccatatcctgtgtaatgacaagtgagttgcattctcaccgtcactcctggggtctctccgcttcccctgagctggctcagcagtctgctccatgtgttttgatgcagggtgacccattggtattcccgacactaacgcccccgtctgtggactgcttgctgcttgggcttcactgtgtctggtgttgacagtgcagacctaaaggtgtgcacacatgtgcacacacactccgctgtcttcttgtttgcactggacttaaatatctatgagggttattttcaactgctgaatttggaatgatttttatatcttttctgctttctgcccatgtacatgtgtttattttacactgttgtgattggtagttactatgtggggacacaattacttgggctgaaataatccacctgttgtggttggggtcctctggggcattccagggtgagaggttgtcactgccacctgggccatgtgggccggcaccagcattttgtggttacgaattctacagtcacaaatatctttgggcaaatccccttctatacctcaaggcagcttttggtttgcaaccccactggccagagggaagggccagtcacttggctctctcactgccctgcgccccagatggttctagggctgctgttttcccttggccctgccaacaccactgtttttacttctgctcattggctgagtgcagtggttcctggaagccagtggcacgtttccccgcgtagctcgcttatcccacagcacacacccaagggttctgttgctaacacgctgaattaattctttgctcatcttacagagtgtgttttgactgcccccatttctgaggccttgtaaggccagagctttgttgcttcatcggcaggttgggacttagatggccgtgaatgtttcctctctgctgctgcagtaagtaagtgcccgcaccatagtgtgtttggaggctgaagttgaagcgaggctgtgaggggagatggacgtgtgaggagggatgatggggcttgagcaaagtgggggagggggcaaaggcagttggcccaacacattccccacccctttgagaggtctgaggcctgcagacctggctcggagcccacctggtagtcctc

SEQ ID NO: 455574 - DNA, 10394 bp, Homo sapiens
tcccacaccacccgcctcccctgccgcctcctgccaccccctaggccaaggtaataatcatcctgaatcctgggtttatctctcacttgctttcttttcatataattttgcaaaagaatctgatctaaatgtgtttttcagagtatatatttatattttagctgttcttagagaaaatttattattttgcatgtaatcttatggaacattctcatttaataccatggtaagattcagcccttgcccaggggatagttcatttagtttgtttactggatagagctcatcatgtgactatacctcagttagtttatcagttctcccatccatggtgactaggttgcctctcagcctctcaacaacactgtttctcagtgtccttgtagaagtgatatgtgggtgttttctccttacacagagttgaaaggtgacgacaacaacgttggcactaccaatcccccaccctccagaggggtaaccagtgttaccagtttgctgtgtttcctgctacacctcgccttattcacttccatttgtatctgaaaaacgtgttgcatggtttcttttctatagaagtggtaaaatgctattgtgtcctgtacattattgattactttttttcatttaacagtagggagatgcctgggagtacacagagaactgccctcattgttttcaacttctgcactgtatgtctgtgagtttagccattctgctgttaatggaaatttacagtattctaatcttttgatattacaaacagttctgtgcgatcatcgtcatacacaaccccttgtgcacaatgcatgagtgtttctcagggtaggtaccaagaagtgaaattcctgggtcatagggcgtgagtccgacatttttctccattctgccctgttgccctccagagtgggtgtccagctttgcatacctaagtatgagagtatctgttgttcatatcctctacgacgctccatatatgaaacttaagtttctgctagttgccatctttgatctatcatgtatgcagtgacctactaagactgtaattggtacagtagattcttgtcatctgtgtgtgaatttagcattcatgggcttaatgctgacaaggcccccagggtccaagacatataatcatgtataattttgtcaaggtataattttttaaattgcttttgtcatgtgtctgctggtgatgcccaacccagtgctctgcacccaggtcacactgtggctttgtcctctgcttatgcctgcattgcagcaactgtcctgaagagaccaaaattatgcagatttaggtaagtccatggctaatgttattatattatgtgctattgtaatggatggggctgtggagtgtatgaatttataaatcactggtcttgtaattaaaattcaaacactatagaaaaaggccatgtagaagataaaagttcctctataatcccggacccctaagataactactaatgacaacttcatttatattccttcagacattttctggctgtggatgtactaaaatgtatcctattattctctgccctaaaatggaatcatacaaggtgtactgttatttttatggctctataacatgtcatattgtacgtgttggtatggtcattttaaccatttttctagtgatggctttgaggttatttgcagtttcctagccatctcaaagtgtgctgcggggatctcttttgcatccctctgggtgcagagctgaggcacccagaggcagtgtccagaggaggcagcatctgtaggtgtcttcacctgctctggctcttggcacatctggttggtgacactgttttgtgagatgggttgaaagcacgtgctgccaaaatagaataatgttggtcctctcctcatgtgccgtggaactggggtaaaactgcgtagtggctgcagctgcctgtccataccggaatcgagtataacacggtgcctggcttagcacaaaacagtagtgggtcctgcaggccccagagtctaattcctggtattctttcccctacacagattaaataaaccaaaaacaaactattctaggaaagcgtctgtgacatttgtaaaaagtggtatttaatgatcttttattcacttgtctgtttagtttgttgaaatcttaagtggcatcctggtctgggaaggagtgctgtctgcgcctgccctccgctgggcacagcgtggctgcttcaggggctaagcacacactttctgtcttctaaagggccgccacatgccaggagctcaggtgtgagcccggctctggctcttacctcatagggtcactcataggggcacagggagcagaacattgtacacagcgaggcaccacccggcttggcatctgcctcggtggacttactacctctagaaggaaatacctgagttcctctggcctcagctcctagagtgactggtgtgctgtccctgttactcttctgtcaaggtgacaactgtgtgacccatcatctgtgtgtcaaagcaaggccctgcctgggcctctgctcctgtccgggctgcacaaaggcaaatgctttgctagtttccttccagttaatttcacctatgaatagatgtgtgaaaactgttcaaagccatacctgcacatgtttgaacttcaaaccctgtgggtgattcagtggcatctttctctaacccccagcctcccttcccacagaggccaccgtcatggccagttgctgcagtttctttccagagaacctgtgtatgtgtaaagctgtacaggcgtgggtacaccacacagcctgtcttgcactgtggactgttgagttactagtacatctaggtaagcaccgcatatctgtattcatgtctgccttggtcttttcaacatctttgtggtagccgtgtttgaattacccattccctttttggggaaccattaagttgtttcagcaatttttactgtagataaggctataccgcatatctgtgtacatgggtttttatgtacatgggcaagtatatctgtgagagaaaagtttcctcaggaggaattctgggcacagcatgtgtaaatttctaaatatgatggacacccccagcttccacctcaaggaggttggtcccattgacatttccccacaccttcacccaggctgtgcccttaaacttggttatttgtcaatgtgagaagtggaaaatagtatttaattgtagtttggatttgtatttctattgggttgtatacttactgattaataataagagctctttacatattaaggaaattaacccttttcaaatacattcctatttctcactaatctttaagttttattgtaatattttgctctttagtttatatatatatgtatatatatatatatgtatatatatatatatacatatatatatacatatatatatactaattttcttttatggttcctggattttgtgagtagtttgaaaaggctaatccagctgaagattttgttgttgttgttaaaccccatgttttctcctaactctttttatttttattttggaggactctatctagacttaattttagcataacaagtgacagggttagttagcctgttgtccttacaccattttctggctaatacagctattaactattgatctgtctattcacgtgccagttcctaatggttttacatagtgtaatctgcacttcaaaatagcgaagggaagccctacctcattattctacttttccagaattctcctggctattccaggctgcatgtttaccttaaccttccctgtgatgtcttcatgccgttgtcttcttatgcaagaataaggtacgtctttccatccactcacgtctatttaatttgactttgcattacacagaaagctggtcttggtctgtctacctcggcatctagttgtcctcactgccccctagccgaccccaccccatctgactgactaccccatcacagagtacttttatttacgttttgctctgcctaatggttacttgatactgtcacgccgacagtgtccagttcagtggtctttgcagttgaaatgctcccgtacacactgtcttgttaaaaatgccagtaagttcatacaaacccagcttgcacccaaggtcacattcagagagcgtagggctgggatgggttgttttccaagcttctgccactgtgtggctagctcttcccactgggaagttctgtgtacccggaatgtcggagtggagtcctgttctagtgtccagcacctgaccctgtgcccaacccctcaacagcctattcctgctgtccacagcctgctggaactttttacaaaatatgttgccatgctggaccctgggcactggacataagccccctggcagcctttttcatgtcacccaaaggggtaattgtcctactggtggtctgtaagatgagttagggtgacttgctaatagacattgtaaatcttaatatttatgtatgtattttattattaccggttttccatttatgatggtaatattgtttcttctaagaatatttatttttccttctaaatattgagataaaattcatgcttttgaaatgttctattcagtggcttttagtatatttgctatgttgtgcaaccatcgacactatccatttctagaactttttcgtcatcccaaacagacgctctgtattcataaaaaaataacttcctacctgtctctccccctagtctttggtaacctttgttatactggtaaactttgttgtgctctctgtctgtgtgaatttgcctattctaggggcctcatataagtgtaatcatacagtatttgtctttttgggtctgtctgatttcacttagcgggttttcagggttcattcatgttgcagcatataacagtactgcgttcctttttctggctgaataatattccactgtatggatagaccccattttgtttattcacacatcatttggacatttggattatttctggtttttggctattatgaacaatggtgctatgaacagttgcgtacaagtttttgtgtgaacatatgttttcaattctctcattatatacctaggagtagaattactgggtcatatggtaactgtatatttttgaggaactgccaaactattttcccacgtccatgcaccatttcacattcccaccagtaagtaagagggttccaatttctgcgcattcttgccaacactagttattatctgactttctggttataatcattctaatgagtgtgaagtagcctctggtgtcatttggatttgcatttctctgatgagtgatgctatcaagcacctttgctggtgctgttggccatatgtgtatgttccctggagaagtgtctgtgctgagccttggcccactttttaattaggcgtttgtctttttattactgagttgtaagagttctttatatattctggattctagacccttatcagatacatggtttgcaaatattttctcccattctgtgggttgtgttttcactttatcgataatgtccttagacatataataaatttgtattttaaaagtgacttgatttggctgtgcaaggtggctcacgcttgtaatcccagcactttgggagactgaggtgggtggatcatatgaggaggctaggagttcgaggtcagcctggccagcatagcgaaaacttgtctctactaaaaatacaaaaattagtcaggcatggtggtgcacgtctgtaataccagcttctcaggaggctgaggcacgaggatcacttgaacccaggaggaggaggttgcagtgagctgagatcatgccagggcaacagaatgagactttgtttaaaaaaaaaaaaaagtgacttgatttaagggaaaaaatgactggctatattcagtcagatatggcaaaaagtctcaaggtgttaatgtgaatgattaaggtcttggggggggtgtcccctatcagactacaggtgtttagaggcacagaaaaaggtgcagttgggttcttaatgtgaaatgatgagaagcacaactccagtgtgtctctttgtgtagaatgtcagcagacaccccctgctagatgtgctggatcatgggaaagcatttccatttgttactagattgttcagaagttttaatttatgatgggtgtggtggctcatgcctgtagtcccagcactgtgggaggctgaggcaggaggatcatctgaggccaagagttcaagatcagcctgggcaacatagtgataccctatctcttaaaaaagaagaagtttttaaatttgaaataataataggtactggatttatgcaaatgtcttttctgcgtcttttgagatgagtatcaggtttttttttttccttttatcatctgatgatgaacttaatgtttccatttgtattaatggaatactaagtccctctgtgatttctgaaccaagctattcctaggcctgagttttattttgttgacacagaaataaattagaaggccaagcgtggtggcatgtgcctgtagtcctagttgctgaggtaagaggattgcttgagcccaggagttcaaggctgcagcaagctttgattgcgccactgcactccagccttggcgacagactaagacgctgtaaaaaaaaaacaaaacagaaaaaataaactaaggcaatgacagtccctggcaaatgctgggagggaggcagcagtggtcagggaaggtaaccctgaagcaggacttgtaaagcaaataagattgggaggccaaggtgggtggatcacgaggtcaggagttcgagaccagcctggccaacatagtgaaaccccgtctttactaaaaatacaaaaaaattagccaggtgtggtggtgggtgcctgtagtcccagctacttgggaggctgaggcaggagaatctcgaacccaggaggcggaggttacagtcagctgagaccgcaccattgcactccagcctgggtgacagagcaagattccgtctcaaaaaaaaaaaaaaaaaaaaaaaaccaagaagaaaaggaatgaattagaacttcttctgcttggacttaagggcatcatcaggcaggttttgggtaggatagcaggggaggcagagacatagtcggggtcagtggtcatgagtgtggctttgagcccaaaaacttggtttctgttccctactttgccactcagtagtgcatgactttggccaaatttcttaaattcatgaagcaagtttccgggtgaatgaaatggggataaaaatagtgttcaaacctatccgttggtttgtgtgaaactgaaatgaatagtatcgtgcaggtacttgtgagcaaggggagctgctgtttcctgtccctttatgatgggaaatatctagacaagttcccaaccctctgcactgcaggctgcatggcacggagggtcttgtaacaccagctggggctggccttcttttaggagcttcagtggttctgaaaacttttatttgtttgtttgttttagtagatgtggggtctttctgtgttgcccggactggtctcaaacttctggactcaagtgatcctcccccgctcaacctcccaaagtgttgggattacaggtgtgagccactgtgcccagccttgaaaactttttcaggttcttccagggttactgggctattaaatatttctatttcattataagtcagtttttcaaagttatattatcttaattaccttttttatatgtattagtgtagagtagcattttatattttgatatcctccttatgcatagtttttcactttttattcctagtttttcgtttttaataagactttcaagaaatttattttattggccttttgaaaaaagcagctttagataaagtaagcagttctgctttcattttataatttatttctacttttgtttcattaatcttttcctccggcatgccttggattttgttgtgttactctttttctagaggctcgcattgtgtgtctggttcacttatgatcacgcttgcctacttttaagaatggaagaggggaggtggagggtggctgcacagtcgagggtgtgaggcagtcttgctctagccccaccatgccctcagcccgctgtggccacgctggttcctcaattgctggggcgtgcagtgtctgtaagggaggctactgatgccatccgaggaagatgtaaggtttcgtgtgggcagcgagagcctagcaggcatgtggggtgcccagcaaagggtaacagtggacagttgttgcctcattccacagagttttgattttttttttttttttaatggtcactccatcaacatcccccatggccagagcctgagctggtccccagagacacaggcattcagctgacagcctcgccttcacgctgctgctgttctcatgggggacaggcctcaggtggcaatgcacaaatcattagttaagggcagttgtgacagttaccaaggagtgtagtcccccgccccccgcccagtgaaaacagccctaaccaggggtggggacctttgggctctgacccgaagggtaggagaagctggaaggacagcattcctgtctgcgaaggcaggagcaaagctgccaggctatgaaggaaatggctggagcctgaagtcatgcaagctggggctggcagggacagggccaacttccaggcctgggggccaccatgaggattcaggacgtgacccccagggcacatgaaggccttccatctgtatttaagaaaagactttatcagacgagtatggtggctcacgcctgaatcttagcactttgggaggctgaggcaggtggatcacgaggtcaggagttcaataccagcctggccaatatggtaaaaccccatctctactaaaactacaaaaattagccaggcatggtggcgcacgcctgtagtcccagctactcgggaggctgaggcagaagaatcacttgaacccgggaggtggaggttacagtgagccaagatcgcgccactacactccagcctgggtgacagagtgagactccgtctcaaaaaaaccaaaagactttatcttatttcctatatgtttgtggtttcagtcctgatgtataatttgaccctagttagaatggttatctgaggaagtggcctgtacgatttctgcttttttaaatgtgtggctccctttcttcattgattaacgtatgattatttttataaatgttccatggcagtgggaagggattctctgtcacattccacatctggatcagttcctccccattttgttggtcaaatccgatctgccatatcctgtgtaatgacaagtgagttgcattctcaccgtcactcctggggtctctccgcttcccctgagctggctcagcagtctgctccatgtgttttgatgcagggtgacccattggtattcccgacactaacgcccccgtctgtggactgcttgctgcttgggcttcactgtgtctggtgttgacagtgcagacctaaaggtgtgcacacatgtgcacacacactccgctgtcttcttgtttgcactggacttaaatatctatgagggttattttcaactgctgaatttggaatgatttttatatcttttctgctttctgcccatgtacatgtgtttattttacactgttgtgattggtagttactatgtggggacacaattacttgggctgaaataatccacctgttgtggttggggtcctctggggcattccagggtgagaggttgtcactgccacctgggccatgtgggccggcaccagcattttgtggttacgaattctacagtcacaaatatctttgggcaaatccccttctatacctcaaggcagcttttggtttgcaaccccactggccagagggaagggccagtcacttggctctctcactgccctgcgccccagatggttctagggctgctgttttcccttggccctgccaacaccactgtttttacttctgctcattggctgagtgcagtggttcctggaagccagtggcacgtttccccgcgtagctcgcttatcccacagcacacacccaagggttctgttgctaacacgctgaattaattctttgctcatcttacagagtgtgttttgactgcccccatttctgaggccttgtaaggccagagctttgttgcttcatcggcaggttgggacttagatggccgtgaatgtttcctctctgctgctgcagtaagtaagtgcccgcaccatagtgtgtttggaggctgaagttgaagcgaggctgtgaggggagatggacgtgtgaggagggatgatggggcttgagcaaagtgggggagggggcaaaggcagttggcccaacacattccccacccctttgagaggtctgaggcctgcagacctggctcggagcccacctggtagtcctc

SEQ ID NO: 455575 - DNA, 8383 bp, Homo sapiens
tcccacaccacccgcctcccctgccgcctcctgccaccccctaggccaaggtaataatcatcctgaatcctgggtttatctctcacttgctttcttttcatataattttgcaaaagaatctgatctaaatgtgtttttcagagtatatatttatattttagctgttcttagagaaaatttattattttgcatgtaatcttatggaacattctcatttaataccatggtaagattcagcccttgcccaggggatagttcatttagtttgtttactggatagagctcatcatgtgactatacctcagttagtttatcagttctcccatccatggtgactaggttgcctctcagcctctcaacaacactgtttctcagtgtccttgtagaagtgatatgtgggtgttttctccttacacagagttgaaaggtgacgacaacaacgttggcactaccaatcccccaccctccagaggggtaaccagtgttaccagtttgctgtgtttcctgctacacctcgccttattcacttccatttgtatctgaaaaacgtgttgcatggtttcttttctatagaagtggtaaaatgctattgtgtcctgtacattattgattactttttttcatttaacagtagggagatgcctgggagtacacagagaactgccctcattgttttcaacttctgcactgtatgtctgtgagtttagccattctgctgttaatggaaatttacagtattctaatcttttgatattacaaacagttctgtgcgatcatcgtcatacacaaccccttgtgcacaatgcatgagtgtttctcagggtaggtaccaagaagtgaaattcctgggtcatagggcgtgagtccgacatttttctccattctgccctgttgccctccagagtgggtgtccagctttgcatacctaagtatgagagtatctgttgttcatatcctctacgacgctccatatatgaaacttaagtttctgctagttgccatctttgatctatcatgtatgcagtgacctactaagactgtaattggtacagtagattcttgtcatctgtgtgtgaatttagcattcatgggcttaatgctgacaaggcccccagggtccaagacatataatcatgtataattttgtcaaggtataattttttaaattgcttttgtcatgtgtctgctggtgatgcccaacccagtgctctgcacccaggtcacactgtggctttgtcctctgcttatgcctgcattgcagcaactgtcctgaagagaccaaaattatgcagatttaggtaagtccatggctaatgttattatattatgtgctattgtaatggatggggctgtggagtgtatgaatttataaatcactggtcttgtaattaaaattcaaacactatagaaaaaggccatgtagaagataaaagttcctctataatcccggacccctaagataactactaatgacaacttcatttatattccttcagacattttctggctgtggatgtactaaaatgtatcctattattctctgccctaaaatggaatcatacaaggtgtactgttatttttatggctctataacatgtcatattgtacgtgttggtatggtcattttaaccatttttctagtgatggctttgaggttatttgcagtttcctagccatctcaaagtgtgctgcggggatctcttttgcatccctctgggtgcagagctgaggcacccagaggcagtgtccagaggaggcagcatctgtaggtgtcttcacctgctctggctcttggcacatctggttggtgacactgttttgtgagatgggttgaaagcacgtgctgccaaaatagaataatgttggtcctctcctcatgtgccgtggaactggggtaaaactgcgtagtggctgcagctgcctgtccataccggaatcgagtataacacggtgcctggcttagcacaaaacagtagtgggtcctgcaggccccagagtctaattcctggtattctttcccctacacagattaaataaaccaaaaacaaactattctaggaaagcgtctgtgacatttgtaaaaagtggtatttaatgatcttttattcacttgtctgtttagtttgttgaaatcttaagtggcatcctggtctgggaaggagtgctgtctgcgcctgccctccgctgggcacagcgtggctgcttcaggggctaagcacacactttctgtcttctaaagggccgccacatgccaggagctcaggtgtgagcccggctctggctcttacctcatagggtcactcataggggcacagggagcagaacattgtacacagcgaggcaccacccggcttggcatctgcctcggtggacttactacctctagaaggaaatacctgagttcctctggcctcagctcctagagtgactggtgtgctgtccctgttactcttctgtcaaggtgacaactgtgtgacccatcatctgtgtgtcaaagcaaggccctgcctgggcctctgctcctgtccgggctgcacaaaggcaaatgctttgctagtttccttccagttaatttcacctatgaatagatgtgtgaaaactgttcaaagccatacctgcacatgtttgaacttcaaaccctgtgggtgattcagtggcatctttctctaacccccagcctcccttcccacagaggccaccgtcatggccagttgctgcagtttctttccagagaacctgtgtatgtgtaaagctgtacaggcgtgggtacaccacacagcctgtcttgcactgtggactgttgagttactagtacatctaggtaagcaccgcatatctgtattcatgtctgccttggtcttttcaacatctttgtggtagccgtgtttgaattacccattccctttttggggaaccattaagttgtttcagcaatttttactgtagataaggctataccgcatatctgtgtacatgggtttttatgtacatgggcaagtatatctgtgagagaaaagtttcctcaggaggaattctgggcacagcatgtgtaaatttctaaatatgatggacacccccagcttccacctcaaggaggttggtcccattgacatttccccacaccttcacccaggctgtgcccttaaacttggttatttgtcaatgtgagaagtggaaaatagtatttaattgtagtttggatttgtatttctattgggttgtatacttactgattaataataagagctctttacatattaaggaaattaacccttttcaaatacattcctatttctcactaatctttaagttttattgtaatattttgctctttagtttatatatatatgtatatatatatatatgtatatatatatatatacatatatatatacatatatatatactaattttcttttatggttcctggattttgtgagtagtttgaaaaggctaatccagctgaagattttgttgttgttgttaaaccccatgttttctcctaactctttttatttttattttggaggactctatctagacttaattttagcataacaagtgacagggttagttagcctgttgtccttacaccattttctggctaatacagctattaactattgatctgtctattcacgtgccagttcctaatggttttacatagtgtaatctgcacttcaaaatagcgaagggaagccctacctcattattctacttttccagaattctcctggctattccaggctgcatgtttaccttaaccttccctgtgatgtcttcatgccgttgtcttcttatgcaagaataaggtacgtctttccatccactcacgtctatttaatttgactttgcattacacagaaagctggtcttggtctgtctacctcggcatctagttgtcctcactgccccctagccgaccccaccccatctgactgactaccccatcacagagtacttttatttacgttttgctctgcctaatggttacttgatactgtcacgccgacagtgtccagttcagtggtctttgcagttgaaatgctcccgtacacactgtcttgttaaaaatgccagtaagttcatacaaacccagcttgcacccaaggtcacattcagagagcgtagggctgggatgggttgttttccaagcttctgccactgtgtggctagctcttcccactgggaagttctgtgtacccggaatgtcggagtggagtcctgttctagtgtccagcacctgaccctgtgcccaacccctcaacagcctattcctgctgtccacagcctgctggaactttttacaaaatatgttgccatgctggaccctgggcactggacataagccccctggcagcctttttcatgtcacccaaaggggtaattgtcctactggtggtctgtaagatgagttagggtgacttgctaatagacattgtaaatcttaatatttatgtatgtattttattattaccggttttccatttatgatggtaatattgtttcttctaagaatatttatttttccttctaaatattgagataaaattcatgcttttgaaatgttctattcagtggcttttagtatatttgctatgttgtgcaaccatcgacactatccatttctagaactttttcgtcatcccaaacagacgctctgtattcataaaaaaataacttcctacctgtctctccccctagtctttggtaacctttgttatactggtaaactttgttgtgctctctgtctgtgtgaatttgcctattctaggggcctcatataagtgtaatcatacagtatttgtctttttgggtctgtctgatttcacttagcgggttttcagggttcattcatgttgcagcatataacagtactgcgttcctttttctggctgaataatattccactgtatggatagaccccattttgtttattcacacatcatttggacatttggattatttctggtttttggctattatgaacaatggtgctatgaacagttgcgtacaagtttttgtgtgaacatatgttttcaattctctcattatatacctaggagtagaattactgggtcatatggtaactgtatatttttgaggaactgccaaactattttcccacgtccatgcaccatttcacattcccaccagtaagtaagagggttccaatttctgcgcattcttgccaacactagttattatctgactttctggttataatcattctaatgagtgtgaagtagcctctggtgtcatttggatttgcatttctctgatgagtgatgctatcaagcacctttgctggtgctgttggccatatgtgtatgttccctggagaagtgtctgtgctgagccttggcccactttttaattaggcgtttgtctttttattactgagttgtaagagttctttatatattctggattctagacccttatcagatacatggtttgcaaatattttctcccattctgtgggttgtgttttcactttatcgataatgtccttagacatataataaatttgtattttaaaagtgacttgatttggctgtgcaaggtggctcacgcttgtaatcccagcactttgggagactgaggtgggtggatcatatgaggaggctaggagttcgaggtcagcctggccagcatagcgaaaacttgtctctactaaaaatacaaaaattagtcaggcatggtggtgcacgtctgtaataccagcttctcaggaggctgaggcacgaggatcacttgaacccaggaggaggaggttgcagtgagctgagatcatgccagggcaacagaatgagactttgtttaaaaaaaaaaaaaagtgacttgatttaagggaaaaaatgactggctatattcagtcagatatggcaaaaagtctcaaggtgttaatgtgaatgattaaggtcttggggggggtgtcccctatcagactacaggtgtttagaggcacagaaaaaggtgcagttgggttcttaatgtgaaatgatgagaagcacaactccagtgtgtctctttgtgtagaatgtcagcagacaccccctgctagatgtgctggatcatgggaaagcatttccatttgttactagattgttcagaagttttaatttatgatgggtgtggtggctcatgcctgtagtcccagcactgtgggaggctgaggcaggaggatcatctgaggccaagagttcaagatcagcctgggcaacatagtgataccctatctcttaaaaaagaagaagtttttaaatttgaaataataataggtactggatttatgcaaatgtcttttctgcgtcttttgagatgagtatcaggtttttttttttccttttatcatctgatgatgaacttaatgtttccatttgtattaatggaatactaagtccctctgtgatttctgaaccaagctattcctaggcctgagttttattttgttgacacagaaataaattagaaggccaagcgtggtggcatgtgcctgtagtcctagttgctgaggtaagaggattgcttgagcccaggagttcaaggctgcagcaagctttgattgcgccactgcactccagccttggcgacagactaagacgctgtctcaaaaaaaaacaaaaacgacaaaaaaaaaacaaaacagaaaaaataaactaaggcaatgacagtccctggcaaatgctgggagggaggcagcagtggtcagggaaggtaaccctgaagcaggacttgtaaagcaaataagattgggaggccaaggtgggtggatcacgaggtcaggagttcgagaccagcctggccaacatagtgaaaccccgtctttatctctactaaaactacaaaaattagccaggcatggtggcgcacgcctgtagtcccagctactcgggaggctgaggcagaagaatcacttgaacccgggaggtggaggttacagtgagccaagatcgcgccactacactccagcctgggtgacagagtgagactccgtctcaaaaaaaccaaaagactttatcttatttcctatatgtttgtggtttcagtcctgatgtataatttgaccctagttagaatggttatctgaggaagtggcctgtacgatttctgcttttttaaatgtgtggctccctttcttcattgattaacgtatgattatttttataaatgttccatggcagtgggaagggattctctgtcacattccacatctggatcagttcctccccattttgttggtcaaatccgatctgccatatcctgtgtaatgacaagtgagttgcattctcaccgtcactcctggggtctctccgcttcccctgagctggctcagcagtctgctccatgtgttttgatgcagggtgacccattggtattcccgacactaacgcccccgtctgtggactgcttgctgcttgggcttcactgtgtctggtgttgacagtgcagacctaaaggtgtgcacacatgtgcacacacactccgctgtcttcttgtttgcactggacttaaatatctatgagggttattttcaactgctgaatttggaatgatttttatatcttttctgctttctgcccatgtacatgtgtttattttacactgttgtgattggtagttactatgtggggacacaattacttgggctgaaataatccacctgttgtggttggggtcctctggggcattccagggtgagaggttgtcactgccacctgggccatgtgggccggcaccagcattttgtggttacgaattctacagtcacaaatatctttgggcaaatccccttctatacctcaaggcagcttttggtttgcaaccccactggccagagggaagggccagtcacttggctctctcactgccctgcgccccagatggttctagggctgctgttttcccttggccctgccaacaccactgtttttacttctgctcattggctgagtgcagtggttcctggaagccagtggcacgtttccccgcgtagctcgcttatcccacagcacacacccaagggttctgttgctaacacgctgaattaattctttgctcatcttacagagtgtgttttgactgcccccatttctgaggccttgtaaggccagagctttgttgcttcatcggcaggttgggacttagatggccgtgaatgtttcctctctgctgctgcagtaagtaagtgcccgcaccatagtgtgtttggaggctgaagttgaagcgaggctgtgaggggagatggacgtgtgaggagggatgatggggcttgagcaaagtgggggagggggcaaaggcagttggcccaacacattccccacccctttgagaggtctgaggcctgcagacctggctcggagcccacctggtagtcctc

SEQ ID NO: 455576 - DNA, 7127 bp, Homo sapiens
  misc_feature (7047)..(7047): n is a, c, g, or t
tcccacaccacccgcctcccctgccgcctcctgccaccccctaggccaaggtaataatcatcctgaatcctgggtttatctctcacttgctttcttttcatataattttgcaaaagaatctgatctaaatgtgtttttcagagtatatatttatattttagctgttcttagagaaaatttattattttgcatgtaatcttatggaacattctcatttaataccatggtaagattcagcccttgcccaggggatagttcatttagtttgtttactggatagagctcatcatgtgactatacctcagttagtttatcagttctcccatccatggtgactaggttgcctctcagcctctcaacaacactgtttctcagtgtccttgtagaagtgatatgtgggtgttttctccttacacagagttgaaaggtgacgacaacaacgttggcactaccaatcccccaccctccagaggggtaaccagtgttaccagtttgctgtgtttcctgctacacctcgccttattcacttccatttgtatctgaaaaacgtgttgcatggtttcttttctatagaagtggtaaaatgctattgtgtcctgtacattattgattactttttttcatttaacagtagggagatgcctgggagtacacagagaactgccctcattgttttcaacttctgcactgtatgtctgtgagtttagccattctgctgttaatggaaatttacagtattctaatcttttgatattacaaacagttctgtgcgatcatcgtcatacacaaccccttgtgcacaatgcatgagtgtttctcagggtaggtaccaagaagtgaaattcctgggtcatagggcgtgagtccgacatttttctccattctgccctgttgccctccagagtgggtgtccagctttgcatacctaagtatgagagtatctgttgttcatatcctctacgacgctccatatatgaaacttaagtttctgctagttgccatctttgatctatcatgtatgcagtgacctactaagactgtaattggtacagtagattcttgtcatctgtgtgtgaatttagcattcatgggcttaatgctgacaaggcccccagggtccaagacatataatcatgtataattttgtcaaggtataattttttaaattgcttttgtcatgtgtctgctggtgatgcccaacccagtgctctgcacccaggtcacactgtggctttgtcctctgcttatgcctgcattgcagcaactgtcctgaagagaccaaaattatgcagatttaggtaagtccatggctaatgttattatattatgtgctattgtaatggatggggctgtggagtgtatgaatttataaatcactggtcttgtaattaaaattcaaacactatagaaaaaggccatgtagaagataaaagttcctctataatcccggacccctaagataactactaatgacaacttcatttatattccttcagacattttctggctgtggatgtactaaaatgtatcctattattctctgccctaaaatggaatcatacaaggtgtactgttatttttatggctctataacatgtcatattgtacgtgttggtatggtcattttaaccatttttctagtgatggctttgaggttatttgcagtttcctagccatctcaaagtgtgctgcggggatctcttttgcatccctctgggtgcagagctgaggcacccagaggcagtgtccagaggaggcagcatctgtaggtgtcttcacctgctctggctcttggcacatctggttggtgacactgttttgtgagatgggttgaaagcacgtgctgccaaaatagaataatgttggtcctctcctcatgtgccgtggaactggggtaaaactgcgtagtggctgcagctgcctgtccataccggaatcgagtataacacggtgcctggcttagcacaaaacagtagtgggtcctgcaggccccagagtctaattcctggtattctttcccctacacagattaaataaaccaaaaacaaactattctaggaaagcgtctgtgacatttgtaaaaagtggtatttaatgatcttttattcacttgtctgtttagtttgttgaaatcttaagtggcatcctggtctgggaaggagtgctgtctgcgcctgccctccgctgggcacagcgtggctgcttcaggggctaagcacacactttctgtcttctaaagggccgccacatgccaggagctcaggtgtgagcccggctctggctcttacctcatagggtcactcataggggcacagggagcagaacattgtacacagcgaggcaccacccggcttggcatctgcctcggtggacttactacctctagaaggaaatacctgagttcctctggcctcagctcctagagtgactggtgtgctgtccctgttactcttctgtcaaggtgacaactgtgtgacccatcatctgtgtgtcaaagcaaggccctgcctgggcctctgctcctgtccgggctgcacaaaggcaaatgctttgctagtttccttccagttaatttcacctatgaatagatgtgtgaaaactgttcaaagccatacctgcacatgtttgaacttcaaaccctgtgggtgattcagtggcatctttctctaacccccagcctcccttcccacagaggccaccgtcatggccagttgctgcagtttctttccagagaacctgtgtatgtgtaaagctgtacaggcgtgggtacaccacacagcctgtcttgcactgtggactgttgagttactagtacatctaggtaagcaccgcatatctgtattcatgtctgccttggtcttttcaacatctttgtggtagccgtgtttgaattacccattccctttttggggaaccattaagttgtttcagcaatttttactgtagataaggctataccgcatatctgtgtacatgggtttttatgtacatgggcaagtatatctgtgagagaaaagtttcctcaggaggaattctgggcacagcatgtgtaaatttctaaatatgatggacacccccagcttccacctcaaggaggttggtcccattgacatttccccacaccttcacccaggctgtgcccttaaacttggttatttgtcaatgtgagaagtggaaaatagtatttaattgtagtttggatttgtatttctattgggttgtatacttactgattaataataagagctctttacatattaaggaaattaacccttttcaaatacattcctatttctcactaatctttaagttttattgtaatattttgctctttagtttatatatatatgtatatatatatatatgtatatatatatatatacatatatatatacatatatatatactaattttcttttatggttcctggattttgtgagtagtttgaaaaggctaatccagctgaagattttgttgttgttgttaaaccccatgttttctcctaactctttttatttttattttggaggactctatctagacttaattttagcataacaagtgacagggttagttagcctgttgtccttacaccattttctggctaatacagctattaactattgatctgtctattcacgtgccagttcctaatggttttacatagtgtaatctgcacttcaaaatagcgaagggaagccctacctcattattctacttttccagaattctcctggctattccaggctgcatgtttaccttaaccttccctgtgatgtcttcatgccgttgtcttcttatgcaagaataaggtacgtctttccatccactcacgtctatttaatttgactttgcattacacagaaagctggtcttggtctgtctacctcggcatctagttgtcctcactgccccctagccgaccccaccccatctgactgactaccccatcacagagtacttttatttacgttttgctctgcctaatggttacttgatactgtcacgccgacagtgtccagttcagtggtctttgcagttgaaatgctcccgtacacactgtcttgttaaaaatgccagtaagttcatacaaacccagcttgcacccaaggtcacattcagagagcgtagggctgggatgggttgttttccaagcttctgccactgtgtggctagctcttcccactgggaagttctgtgtacccggaatgtcggagtggagtcctgttctagtgtccagcacctgaccctgtgcccaacccctcaacagcctattcctgctgtccacagcctgctggaactttttacaaaatatgttgccatgctggaccctgggcactggacataagccccctggcagcctttttcatgtcacccaaaggggtaattgtcctactggtggtctgtaagatgagttagggtgacttgctaatagacattgtaaatcttaatatttatgtatgtattttattattaccggttttccatttatgatggtaatattgtttcttctaagaatatttatttttccttctaaatattgagataaaattcatgcttttgaaatgttctattcagtggcttttagtatatttgctatgttgtgcaaccatcgacactatccatttctagaactttttcgtcatcccaaacagacgctctgtattcataaaaaaataacttcctacctgtctctccccctagtctttggtaacctttgttatactggtaaactttgttgtgctctctgtctgtgtgaatttgcctattctaggggcctcatataagtgtaatcatacagtatttgtctttttgggtctgtctgatttcacttagcgggttttcagggttcattcatgttgcagcatataacagtactgcgttcctttttctggctgaataatattccactgtatggatagaccccattttgtttattcacacatcatttggacatttggattatttctggtttttggctattatgaacaatggtgctatgaacagttgcgtacaagtttttgtgtgaacatatgttttcaattctctcattatatacctaggagtagaattactgggtcatatggtaactgtatatttttgaggaactgccaaactattttcccacgtccatgcaccatttcacattcccaccagtaagtaagagggttccaatttctgcgcattcttgccaacactagttattatctgactttctggttataatcattctaatgagtgtgaagtagcctctggtgtcatttggatttgcatttctctgatgagtgatgctatcaagcacctttgctggtgctgttggccatatgtgtatgttccctggagaagtgtctgtgctgagccttggcccactttttaattaggcgtttgtctttttattactgagttgtaagagttctttatatattctggattctagacccttatcagatacatggtttgcaaatattttctcccattctgtgggttgtgttttcactttatcgataatgtccttagacatataataaatttgtattttaaaagtgacttgatttggctgtgcaaggtggctcacgcttgtaatcccagcactttgggagactgaggtgggtggatcatatgaggaggctaggagttcgaggtcagcctggccagcatagcgaaaacttgtctctactaaaaatacaaaaattagtcaggcatggtggtgcacgtctgtaataccagcttctcaggaggctgaggcacgaggatcacttgaacccaggaggaggaggttgcagtgagctgagatcatgccagggcaacagaatgagactttgtttaaaaaaaaaaaaaagtgacttgatttaagggaaaaaatgactggctatattcagtcagatatggcaaaaagtctcaaggtgttaatgtgaatgattaaggtcttggggggggtgtcccctatcagactacaggtgtttagaggcacagaaaaaggtgcagttgggttcttaatgtgaaatgatgagaagcacaactccagtgtgtctctttgtgtagaatgtcagcagacaccccctgctagatgtgctggatcatgggaaagcatttccatttgttactagattgttcagaagttttaatttatgatgggtgtggtggctcatgcctgtagtcccagcactgtgggaggctgaggcaggaggatcatctgaggccaagagttcaagatcagcctgggcaacatagtgataccctatctcttaaaaaagaagaagtttttaaatttgaaataataataggtactggatttatgcaaatgtcttttctgcgtcttttgagatgagtatcaggtttttttttttccttttatcatctgatgatgaacttaatgtttccatttgtattaatggaatactaagtccctctgtgatttctgaaccaagctattcctaggcctgagttttattttgttgacacagaaataaattagaaggccaagcgtggtggcatgtgcctgtagtcctagttgctgaggtaagaggattgcttgagcccaggagttcaaggctgcagcaagctttgattgcgccactgcactccagccttggcgacagactaagacgctgtctcaaaaaaaaacaaaaacgacaaaaaaaaaacaaaacagaaaaaataaactaaggcaatgacagtccctggcaaatgctgggagggaggcagcagtggtcagggaaggtaaccctgaagcaggacttgtaaagcaaataagattgggaggccaaggtgggtggatcacgaggtcaggagttcgagaccagcctggccaacatagtgaaaccccgtctttactaaaaatacaaaaaaattagccaggtgtggtggtgggtgcctgtagtcccagctacttgggaggctgaggcaggagaatctcgaacccaggaggcggaggttacagtcagctgagaccgcaccattgcactccagcctgggtgacagagcaagattccgtctcaaaaaatacacgctgactgaaacctgcgtaccactaatcgctgagaatcncttcgcagtgcgatagcgccgacgacgcttcaacagtgcactatgcatgaatgagctaattgtaatccgttgtatagctt

SEQ ID NO: 455577 - DNA, 10362 bp, Homo sapiens
tcccacaccacccgcctcccctgccgcctcctgccaccccctaggccaaggtaataatcatcctgaatcctgggtttatctctcacttgctttcttttcatataattttgcaaaagaatctgatctaaatgtgtttttcagagtatatatttatattttagctgttcttagagaaaatttattattttgcatgtaatcttatggaacattctcatttaataccatggtaagattcagcccttgcccaggggatagttcatttagtttgtttactggatagagctcatcatgtgactatacctcagttagtttatcagttctcccatccatggtgactaggttgcctctcagcctctcaacaacactgtttctcagtgtccttgtagaagtgatatgtgggtgttttctccttacacagagttgaaaggtgacgacaacaacgttggcactaccaatcccccaccctccagaggggtaaccagtgttaccagtttgctgtgtttcctgctacacctcgccttattcacttccatttgtatctgaaaaacgtgttgcatggtttcttttctatagaagtggtaaaatgctattgtgtcctgtacattattgattactttttttcatttaacagtagggagatgcctgggagtacacagagaactgccctcattgttttcaacttctgcactgtatgtctgtgagtttagccattctgctgttaatggaaatttacagtattctaatcttttgatattacaaacagttctgtgcgatcatcgtcatacacaaccccttgtgcacaatgcatgagtgtttctcagggtaggtaccaagaagtgaaattcctgggtcatagggcgtgagtccgacatttttctccattctgccctgttgccctccagagtgggtgtccagctttgcatacctaagtatgagagtatctgttgttcatatcctctacgacgctccatatatgaaacttaagtttctgctagttgccatctttgatctatcatgtatgcagtgacctactaagactgtaattggtacagtagattcttgtcatctgtgtgtgaatttagcattcatgggcttaatgctgacaaggcccccagggtccaagacatataatcatgtataattttgtcaaggtataattttttaaattgcttttgtcatgtgtctgctggtgatgcccaacccagtgctctgcacccaggtcacactgtggctttgtcctctgcttatgcctgcattgcagcaactgtcctgaagagaccaaaattatgcagatttaggtaagtccatggctaatgttattatattatgtgctattgtaatggatggggctgtggagtgtatgaatttataaatcactggtcttgtaattaaaattcaaacactatagaaaaaggccatgtagaagataaaagttcctctataatcccggacccctaagataactactaatgacaacttcatttatattccttcagacattttctggctgtggatgtactaaaatgtatcctattattctctgccctaaaatggaatcatacaaggtgtactgttatttttatggctctataacatgtcatattgtacgtgttggtatggtcattttaaccatttttctagtgatggctttgaggttatttgcagtttcctagccatctcaaagtgtgctgcggggatctcttttgcatccctctgggtgcagagctgaggcacccagaggcagtgtccagaggaggcagcatctgtaggtgtcttcacctgctctggctcttggcacatctggttggtgacactgttttgtgagatgggttgaaagcacgtgctgccaaaatagaataatgttggtcctctcctcatgtgccgtggaactggggtaaaactgcgtagtggctgcagctgcctgtccataccggaatcgagtataacacggtgcctggcttagcacaaaacagtagtgggtcctgcaggccccagagtctaattcctggtattctttcccctacacagattaaataaaccaaaaacaaactattctaggaaagcgtctgtgacatttgtaaaaagtggtatttaatgatcttttattcacttgtctgtttagtttgttgaaatcttaagtggcatcctggtctgggaaggagtgctgtctgcgcctgccctccgctgggcacagcgtggctgcttcaggggctaagcacacactttctgtcttctaaagggccgccacatgccaggagctcaggtgtgagcccggctctggctcttacctcatagggtcactcataggggcacagggagcagaacattgtacacagcgaggcaccacccggcttggcatctgcctcggtggacttactacctctagaaggaaatacctgagttcctctggcctcagctcctagagtgactggtgtgctgtccctgttactcttctgtcaaggtgacaactgtgtgacccatcatctgtgtgtcaaagcaaggccctgcctgggcctctgctcctgtccgggctgcacaaaggcaaatgctttgctagtttccttccagttaatttcacctatgaatagatgtgtgttcagtggcatctttctctaacccccagcctcccttcccacagaggccaccgtcatggccagttgctgcagtttctttccagagaacctgtgtatgtgtaaagctgtacaggcgtgggtacaccacacagcctgtcttgcactgtggactgttgagttactagtacatctaggtaagcaccgcatatctgtattcatgtctgccttggtcttttcaacatctttgtggtagccgtgtttgaattacccattccctttttggggaaccattaagttgtttcagcaatttttactgtagataaggctataccgcatatctgtgtacatgggtttttatgtacatgggcaagtatatctgtgagagaaaagtttcctcaggaggaattctgggcacagcatgtgtaaatttctaaatatgatggacacccccagcttccacctcaaggaggttggtcccattgacatttccccacaccttcacccaggctgtgcccttaaacttggttatttgtcaatgtgagaagtggaaaatagtatttaattgtagtttggatttgtatttctattgggttgtatacttactgattaataataagagctctttacatattaaggaaattaacccttttcaaatacattcctatttctcactaatctttaagttttattgtaatattttgctctttagtttatatatatatgtatatatatatatatgtatatatatatatatacatatatatatacatatatatatactaattttcttttatggttcctggattttgtgagtagtttgaaaaggctaatccagctgaagattttgttgttgttgttaaaccccatgttttctcctaactctttttatttttattttggaggactctatctagacttaattttagcataacaagtgacagggttagttagcctgttgtccttacaccattttctggctaatacagctattaactattgatctgtctattcacgtgccagttcctaatggttttacatagtgtaatctgcacttcaaaatagcgaagggaagccctacctcattattctacttttccagaattctcctggctattccaggctgcatgtttaccttaaccttccctgtgatgtcttcatgccgttgtcttcttatgcaagaataaggtacgtctttccatccactcacgtctatttaatttgactttgcattacacagaaagctggtcttggtctgtctacctcggcatctagttgtcctcactgccccctagccgaccccaccccatctgactgactaccccatcacagagtacttttatttacgttttgctctgcctaatggttacttgatactgtcacgccgacagtgtccagttcagtggtctttgcagttgaaatgctcccgtacacactgtcttgttaaaaatgccagtaagttcatacaaacccagcttgcacccaaggtcacattcagagagcgtagggctgggatgggttgttttccaagcttctgccactgtgtggctagctcttcccactgggaagttctgtgtacccggaatgtcggagtggagtcctgttctagtgtccagcacctgaccctgtgcccaacccctcaacagcctattcctgctgtccacagcctgctggaactttttacaaaatatgttgccatgctggaccctgggcactggacataagccccctggcagcctttttcatgtcacccaaaggggtaattgtcctactggtggtctgtaagatgagttagggtgacttgctaatagacattgtaaatcttaatatttatgtatgtattttattattaccggttttccatttatgatggtaatattgtttcttctaagaatatttatttttccttctaaatattgagataaaattcatgcttttgaaatgttctattcagtggcttttagtatatttgctatgttgtgcaaccatcgacactatccatttctagaactttttcgtcatcccaaacagacgctctgtattcataaaaaaataacttcctacctgtctctccccctagtctttggtaacctttgttatactggtaaactttgttgtgctctctgtctgtgtgaatttgcctattctaggggcctcatataagtgtaatcatacagtatttgtctttttgggtctgtctgatttcacttagcgggttttcagggttcattcatgttgcagcatataacagtactgcgttcctttttctggctgaataatattccactgtatggatagaccccattttgtttattcacacatcatttggacatttggattatttctggtttttggctattatgaacaatggtgctatgaacagttgcgtacaagtttttgtgtgaacatatgttttcaattctctcattatatacctaggagtagaattactgggtcatatggtaactgtatatttttgaggaactgccaaactattttcccacgtccatgcaccatttcacattcccaccagtaagtaagagggttccaatttctgcgcattcttgccaacactagttattatctgactttctggttataatcattctaatgagtgtgaagtagcctctggtgtcatttggatttgcatttctctgatgagtgatgctatcaagcacctttgctggtgctgttggccatatgtgtatgttccctggagaagtgtctgtgctgagccttggcccactttttaattaggcgtttgtctttttattactgagttgtaagagttctttatatattctggattctagacccttatcagatacatggtttgcaaatattttctcccattctgtgggttgtgttttcactttatcgataatgtccttagacatataataaatttgtattttaaaagtgacttgatttggctgtgcaaggtggctcacgcttgtaatcccagcactttgggagactgaggtgggtggatcatatgaggaggctaggagttcgaggtcagcctggccagcatagcgaaaacttgtctctactaaaaatacaaaaattagtcaggcatggtggtgcacgtctgtaataccagcttctcaggaggctgaggcacgaggatcacttgaacccaggaggaggaggttgcagtgagctgagatcatgccagggcaacagaatgagactttgtttaaaaaaaaaaaaaagtgacttgatttaagggaaaaaatgactggctatattcagtcagatatggcaaaaagtctcaaggtgttaatgtgaatgattaaggtcttggggggggtgtcccctatcagactacaggtgtttagaggcacagaaaaaggtgcagttgggttcttaatgtgaaatgatgagaagcacaactccagtgtgtctctttgtgtagaatgtcagcagacaccccctgctagatgtgctggatcatgggaaagcatttccatttgttactagattgttcagaagttttaatttatgatgggtgtggtggctcatgcctgtagtcccagcactgtgggaggctgaggcaggaggatcatctgaggccaagagttcaagatcagcctgggcaacatagtgataccctatctcttaaaaaagaagaagtttttaaatttgaaataataataggtactggatttatgcaaatgtcttttctgcgtcttttgagatgagtatcaggtttttttttttccttttatcatctgatgatgaacttaatgtttccatttgtattaatggaatactaagtccctctgtgatttctgaaccaagctattcctaggcctgagttttattttgttgacacagaaataaattagaaggccaagcgtggtggcatgtgcctgtagtcctagttgctgaggtaagaggattgcttgagcccaggagttcaaggctgcagcaagctttgattgcgccactgcactccagccttggcgacagactaagacgctgtctcaaaaaaaaacaaaaacgacaaaaaaaaaacaaaacagaaaaaataaactaaggcaatgacagtccctggcaaatgctgggagggaggcagcagtggtcagggaaggtaaccctgaagcaggacttgtaaagcaaataagattgggaggccaaggtgggtggatcacgaggtcaggagttcgagaccagcctggccaacatagtgaaaccccgtctttactaaaaatacaaaaaaattagccaggtgtggtggtgggtgcctgtagtcccagctacttgggaggctgaggcaggagaatctcgaacccaggaggcggaggttacagtcagctgagaccgcaccattgcactccagcctgggtgacagagcaagattccgtctcaaaaaaaaaaaaaaaaaaaaaaaaccaagaagaaaaggaatgaattagaacttcttctgcttggacttaagggcatcatcaggcaggttttgggtaggatagcaggggaggcagagacatagtcggggtcagtggtcatgagtgtggctttgagcccaaaaacttggtttctgttccctactttgccactcagtagtgcatgactttggccaaatttcttaaattcatgaagcaagtttccgggtgaatgaaatggggataaaaatagtgttcaaacctatccgttggtttgtgtgaaactgaaatgaatagtatcgtgcaggtacttgtgagcaaggggagctgctgtttcctgtccctttatgatgggaaatatctagacaagttcccaaccctctgcactgcaggctgcatggcacggagggtcttgtaacaccagctggggctggccttcttttaggagcttcagtggttctgaaaacttttatttgtttgtttgttttagtagatgtggggtctttctgtgttgcccggactggtctcaaacttctggactcaagtgatcctcccccgctcaacctcccaaagtgttgggattacaggtgtgagccactgtgcccagccttgaaaactttttcaggttcttccagggttactgggctattaaatatttctatttcattataagtcagtttttcaaagttatattatcttaattaccttttttatatgtattagtgtagagtagcattttatattttgatatcctccttatgcatagtttttcactttttattcctagtttttcgtttttaataagactttcaagaaatttattttattggccttttgaaaaaagcagctttagataaagtaagcagttctgctttcattttataatttatttctacttttgtttcattaatcttttcctccggcatgccttggattttgttgtgttactctttttctagaggctcgcattgtgtgtctggttcacttatgatcacgcttgcctacttttaagaatggaagaggggaggtggagggtggctgcacagtcgagggtgtgaggcagtcttgctctagccccaccatgccctcagcccgctgtggccacgctggttcctcaattgctggggcgtgcagtgtctgtaagggaggctactgatgccatccgaggaagatgtaaggtttcgtgtgggcagcgagagcctagcaggcatgtggggtgcccagcaaagggtaacagtggacagttgttgcctcattccacagagttttgattttttttttttttttaatggtcactccatcaacatcccccatggccagagcctgagctggtccccagagacacaggcattcagctgacagcctcgccttcacgctgctgctgttctcatgggggacaggcctcaggtggcaatgcacaaatcattagttaagggcagttgtgacagttaccaaggagtgtagtcccccgccccccgcccagtgaaaacagccctaaccaggggtggggacctttgggctctgacccgaagggtaggagaagctggaaggacagcattcctgtctgcgaaggcaggagcaaagctgccaggctatgaaggaaatggctggagcctgaagtcatgcaagctggggctggcagggacagggccaacttccaggcctgggggccaccatgaggattcaggacgtgacccccagggcacatgaaggccttccatctgtatttaagaaaagactttatcagacgagtatggtggctcacgcctgaatcttagcactttgggaggctgaggcaggtggatcacgaggtcaggagttcaataccagcctggccaatatggtaaaaccccatctctactaaaactacaaaaattagccaggcatggtggcgcacgcctgtagtcccagctactcgggaggctgaggcagaagaatcacttgaacccgggaggtggaggttacagtgagccaagatcgcgccactacactccagcctgggtgacagagtgagactccgtctcaaaaaaaccaaaagactttatcttatttcctatatgtttgtggtttcagtcctgatgtataatttgaccctagttagaatggttatctgaggaagtggcctgtacgatttctgcttttttaaatgtgtggctccctttcttcattgattaacgtatgattatttttataaatgttccatggcagtgggaagggattctctgtcacattccacatctggatcagttcctccccattttgttggtcaaatccgatctgccatatcctgtgtaatgacaagtgagttgcattctcaccgtcactcctggggtctctccgcttcccctgagctggctcagcagtctgctccatgtgttttgatgcagggtgacccattggtattcccgacactaacgcccccgtctgtggactgcttgctgcttgggcttcactgtgtctggtgttgacagtgcagacctaaaggtgtgcacacatgtgcacacacactccgctgtcttcttgtttgcactggacttaaatatctatgagggttattttcaactgctgaatttggaatgatttttatatcttttctgctttctgcccatgtacatgtgtttattttacactgttgtgattggtagttactatgtggggacacaattacttgggctgaaataatccacctgttgtggttggggtcctctggggcattccagggtgagaggttgtcactgccacctgggccatgtgggccggcaccagcattttgtggttacgaattctacagtcacaaatatctttgggcaaatccccttctatacctcaaggcagcttttggtttgcaaccccactggccagagggaagggccagtcacttggctctctcactgccctgcgccccagatggttctagggctgctgttttcccttggccctgccaacaccactgtttttacttctgctcattggctgagtgcagtggttcctggaagccagtggcacgtttccccgcgtagctcgcttatcccacagcacacacccaagggttctgttgctaacacgctgaattaattctttgctcatcttacagagtgtgttttgactgcccccatttctgaggccttgtaaggccagagctttgttgcttcatcggcaggttgggacttagatggccgtgaatgtttcctctctgctgctgcagtaagtaagtgcccgcaccatagtgtgtttggaggctgaagttgaagcgaggctgtgaggggagatggacgtgtgaggagggatgatggggcttgagcaaagtgggggagggggcaaaggcagttggcccaacacattccccacccctttgagaggtctgaggcctgcagacctggctcggagcccacctggtagtcctc

SEQ ID NO: 455578 - DNA, 7828 bp, Homo sapiens
cgagctcggtaccctgatatgctgtctccaaaaaaaataccaaaacgaccaaaaaaaaacaaaacagaaaaaataaactaaggcaatgacctcccttcccacagaggccaccgtcatggccagttgctgcagtttctttccagagaacctgtgtatgtgtaaagctgtacaggcgtgggtacaccacacagcctgtcttgcactgtggactgttgagttactagtacatctaggtaagcaccgcatatctgtattcatgtctgccttggtcttttcaacatctttgtggtagccgtgtttgaattacccattccctttttggggaaccattaagttgtttcagcaatttttactgtagataaggctataccgcatatctgtgtacatgggtttttatgtacatgggcaagtatatctgtgagagaaaagtttcctcaggaggaattctgggcacagcatgtgtaaatttctaaatatgatggacacccccagcttccacctcaaggaggttggtcccattgacatttccccacaccttcacccaggctgtgcccttaaacttggttatttgtcaatgtgagaagtggaaaatagtatttaattgtagtttggatttgtatttctattgggttgtatacttactgattaataataagagctctttacatattaaggaaattaacccttttcaaatacattcctatttctcactaatctttaagttttattgtaatattttgctctttagtttatatatatatgtatatatatatatatgtatatatatatatatacatatatatatacatatatatatactaattttcttttatggttcctggattttgtgagtagtttgaaaaggctaatccagctgaagattttgttgttgttgttaaaccccatgttttctcctaactctttttatttttattttggaggactctatctagacttaattttagcataacaagtgacagggttagttagcctgttgtccttacaccattttctggctaatacagctattaactattgatctgtctattcacgtgccagttcctaatggttttacatagtgtaatctgcacttcaaaatagcgaagggaagccctacctcattattctacttttccagaattctcctggctattccaggctgcatgtttaccttaaccttccctgtgatgtcttcatgccgttgtcttcttatgcaagaataaggtacgtctttccatccactcacgtctatttaatttgactttgcattacacagaaagctggtcttggtctgtctacctcggcatctagttgtcctcactgccccctagccgaccccaccccatctgactgactaccccatcacagagtacttttatttacgttttgctctgcctaatggttacttgatactgtcacgccgacagtgtccagttcagtggtctttgcagttgaaatgctcccgtacacactgtcttgttaaaaatgccagtaagttcatacaaacccagcttgcacccaaggtcacattcagagagcgtagggctgggatgggttgttttccaagcttctgccactgtgtggctagctcttcccactgggaagttctgtgtacccggaatgtcggagtggagtcctgttctagtgtccagcacctgaccctgtgcccaacccctcaacagcctattcctgctgtccacagcctgctggaactttttacaaaatatgttgccatgctggaccctgggcactggacataagccccctggcagcctttttcatgtcacccaaaggggtaattgtcctactggtggtctgtaagatgagttagggtgacttgctaatagacattgtaaatcttaatatttatgtatgtattttattattaccggttttccatttatgatggtaatattgtttcttctaagaatatttatttttccttctaaatattgagataaaattcatgcttttgaaatgttctattcagtggcttttagtatatttgctatgttgtgcaaccatcgacactatccatttctagaactttttcgtcatcccaaacagacgctctgtattcataaaaaaataacttcctacctgtctctccccctagtctttggtaacctttgttatactggtaaactttgttgtgctctctgtctgtgtgaatttgcctattctaggggcctcatataagtgtaatcatacagtatttgtctttttgggtctgtctgatttcacttagcgggttttcagggttcattcatgttgcagcatataacagtactgcgttcctttttctggctgaataatattccactgtatggatagaccccattttgtttattcacacatcatttggacatttggattatttctggtttttggctattatgaacaatggtgctatgaacagttgcgtacaagtttttgtgtgaacatatgttttcaattctctcattatatacctaggagtagaattactgggtcatatggtaactgtatatttttgaggaactgccaaactattttcccacgtccatgcaccatttcacattcccaccagtaagtaagagggttccaatttctgcgcattcttgccaacactagttattatctgactttctggttataatcattctaatgagtgtgaagtagcctctggtgtcatttggatttgcatttctctgatgagtgatgctatcaagcacctttgctggtgctgttggccatatgtgtatgttccctggagaagtgtctgtgctgagccttggcccactttttaattaggcgtttgtctttttattactgagttgtaagagttctttatatattctggattctagacccttatcagatacatggtttgcaaatattttctcccattctgtgggttgtgttttcactttatcgataatgtccttagacatataataaatttgtattttaaaagtgacttgatttggctgtgcaaggtggctcacgcttgtaatcccagcactttgggagactgaggtgggtggatcatatgaggaggctaggagttcgaggtcagcctggccagcatagcgaaaacttgtctctactaaaaatacaaaaattagtcaggcatggtggtgcacgtctgtaataccagcttctcaggaggctgaggcacgaggatcacttgaacccaggaggaggaggttgcagtgagctgagatcatgccagggcaacagaatgagactttgtttaaaaaaaaaaaaaagtgacttgatttaagggaaaaaatgactggctatattcagtcagatatggcaaaaagtctcaaggtgttaatgtgaatgattaaggtcttggggggggtgtcccctatcagactacaggtgtttagaggcacagaaaaaggtgcagttgggttcttaatgtgaaatgatgagaagcacaactccagtgtgtctctttgtgtagaatgtcagcagacaccccctgctagatgtgctggatcatgggaaagcatttccatttgttactagattgttcagaagttttaatttatgatgggtgtggtggctcatgcctgtagtcccagcactgtgggaggctgaggcaggaggatcatctgaggccaagagttcaagatcagcctgggcaacatagtgataccctatctcttaaaaaagaagaagtttttaaatttgaaataataataggtactggatttatgcaaatgtcttttctgcgtcttttgagatgagtatcaggtttttttttttccttttatcatctgatgatgaacttaatgtttccatttgtattaatggaatactaagtccctctgtgatttctgaaccaagctattcctaggcctgagttttattttgttgacacagaaataaattagaaggccaagcgtggtggcatgtgcctgtagtcctagttgctgaggtaagaggattgcttgagcccaggagttcaaggctgcagcaagctttgattgcgccactgcactccagccttggcgacagactaagacgctgtctcaaaaaaaaacaaaaacgacaaaaaaaaaacaaaacagaaaaaataaactaaggcaatgacagtccctggcaaatgctgggagggaggcagcagtggtcagggaaggtaaccctgaagcaggacttgtaaagcaaataagattgggaggccaaggtgggtggatcacgaggtcaggagttcgagaccagcctggccaacatagtgaaaccccgtctttactaaaaatacaaaaaaattagccaggtgtggtggtgggtgcctgtagtcccagctacttgggaggctgaggcaggagaatctcgaacccaggaggcggaggttacagtcagctgagaccgcaccattgcactccagcctgggtgacagagcaagattccgtctcaaaaaaaaaaaaaaaaaaaaaaaaccaagaagaaaaggaatgaattagaacttcttctgcttggacttaagggcatcatcaggcaggttttgggtaggatagcaggggaggcagagacatagtcggggtcagtggtcatgagtgtggctttgagcccaaaaacttggtttctgttccctactttgccactcagtagtgcatgactttggccaaatttcttaaattcatgaagcaagtttccgggtgaatgaaatggggataaaaatagtgttcaaacctatccgttggtttgtgtgaaactgaaatgaatagtatcgtgcaggtacttgtgagcaaggggagctgctgtttcctgtccctttatgatgggaaatatctagacaagttcccaaccctctgcactgcaggctgcatggcacggagggtcttgtaacaccagctggggctggccttcttttaggagcttcagtggttctgaaaacttttatttgtttgtttgttttagtagatgtggggtctttctgtgttgcccggactggtctcaaacttctggactcaagtgatcctcccccgctcaacctcccaaagtgttgggattacaggtgtgagccactgtgcccagccttgaaaactttttcaggttcttccagggttactgggctattaaatatttctatttcattataagtcagtttttcaaagttatattatcttaattaccttttttatatgtattagtgtagagtagcattttatattttgatatcctccttatgcatagtttttcactttttattcctagtttttcgtttttaataagactttcaagaaatttattttattggccttttgaaaaaagcagctttagataaagtaagcagttctgctttcattttataatttatttctacttttgtttcattaatcttttcctccggcatgccttggattttgttgtgttactctttttctagaggctcgcattgtgtgtctggttcacttatgatcacgcttgcctacttttaagaatggaagaggggaggtggagggtggctgcacagtcgagggtgtgaggcagtcttgctctagccccaccatgccctcagcccgctgtggccacgctggttcctcaattgctggggcgtgcagtgtctgtaagggaggctactgatgccatccgaggaagatgtaaggtttcgtgtgggcagcgagagcctagcaggcatgtggggtgcccagcaaagggtaacagtggacagttgttgcctcattccacagagttttgattttttttttttttttaatggtcactccatcaacatcccccatggccagagcctgagctggtccccagagacacaggcattcagctgacagcctcgccttcacgctgctgctgttctcatgggggacaggcctcaggtggcaatgcacaaatcattagttaagggcagttgtgacagttaccaaggagtgtagtcccccgccccccgcccagtgaaaacagccctaaccaggggtggggacctttgggctctgacccgaagggtaggagaagctggaaggacagcattcctgtctgcgaaggcaggagcaaagctgccaggctatgaaggaaatggctggagcctgaagtcatgcaagctggggctggcagggacagggccaacttccaggcctgggggccaccatgaggattcaggacgtgacccccagggcacatgaaggccttccatctgtatttaagaaaagactttatcagacgagtatggtggctcacgcctgaatcttagcactttgggaggctgaggcaggtggatcacgaggtcaggagttcaataccagcctggccaatatggtaaaaccccatctctactaaaactacaaaaattagccaggcatggtggcgcacgcctgtagtcccagctactcgggaggctgaggcagaagaatcacttgaacccgggaggtggaggttacagtgagccaagatcgcgccactacactccagcctgggtgacagagtgagactccgtctcaaaaaaaccaaaagactttatcttatttcctatatgtttgtggtttcagtcctgatgtataatttgaccctagttagaatggttatctgaggaagtggcctgtacgatttctgcttttttaaatgtgtggctccctttcttcattgattaacgtatgattatttttataaatgttccatggcagtgggaagggattctctgtcacattccacatctggatcagttcctccccattttgttggtcaaatccgatctgccatatcctgtgtaatgacaagtgagttgcattctcaccgtcactcctggggtctctccgcttcccctgagctggctcagcagtctgctccatgtgttttgatgcagggtgacccattggtattcccgacactaacgcccccgtctgtggactgcttgctgcttgggcttcactgtgtctggtgttgacagtgcagacctaaaggtgtgcacacatgtgcacacacactccgctgtcttcttgtttgcactggacttaaatatctatgagggttattttcaactgctgaatttggaatgatttttatatcttttctgctttctgcccatgtacatgtgtttattttacactgttgtgattggtagttactatgtggggacacaattacttgggctgaaataatccacctgttgtggttggggtcctctggggcattccagggtgagaggttgtcactgccacctgggccatgtgggccggcaccagcattttgtggttacgaattctacagtcacaaatatctttgggcaaatccccttctatacctcaaggcagcttttggtttgcaaccccactggccagagggaagggccagtcacttggctctctcactgccctgcgccccagatggttctagggctgctgttttcccttggccctgccaacaccactgtttttacttctgctcattggctgagtgcagtggttcctggaagccagtggcacgtttccccgcgtagctcgcttatcccacagcacacacccaagggttctgttgctaacacgctgaattaattctttgctcatcttacagagtgtgttttgactgcccccatttctgaggccttgtaaggccagagctttgttgcttcatcggcaggttgggacttagatggccgtgaatgtttcctctctgctgctgcagtaagtaagtgcccgcaccatagtgtgtttggaggctgaagttgaagcgaggctgtgaggggagatggacgtgtgaggagggatgatggggcttgagcaaagtgggggagggggcaaaggcagttggcccaacacattccccacccctttgagaggtctgaggcctgcagacctggctcggagcccacctggtagtcctc

SEQ ID NO: 455579 - DNA, 7236 bp, Homo sapiens
tgtgctgagccttggcccactttttaattaggcgtttgtctttttattactgattaataataagagctctttacatattaaggaaattaacccttttcaaatacattcctatttctcactaatctttaagttttattgtaatattttgctctttagtttatatatatatgtatatatatatatatgtatatatatatatatacatatatatatacatatatatatactaattttcttttatggttcctggattttgtgagtagtttgaaaaggctaatccagctgaagattttgttgttgttgttaaaccccatgttttctcctaactctttttatttttattttggaggactctatctagacttaattttagcataacaagtgacagggttagttagcctgttgtccttacaccattttctggctaatacagctattaactattgatctgtctattcacgtgccagttcctaatggttttacatagtgtaatctgcacttcaaaatagcgaagggaagccctacctcattattctacttttccagaattctcctggctattccaggctgcatgtttaccttaaccttccctgtgatgtcttcatgccgttgtcttcttatgcaagaataaggtacgtctttccatccactcacgtctatttaatttgactttgcattacacagaaagctggtcttggtctgtctacctcggcatctagttgtcctcactgccccctagccgaccccaccccatctgactgactaccccatcacagagtacttttatttacgttttgctctgcctaatggttacttgatactgtcacgccgacagtgtccagttcagtggtctttgcagttgaaatgctcccgtacacactgtcttgttaaaaatgccagtaagttcatacaaacccagcttgcacccaaggtcacattcagagagcgtagggctgggatgggttgttttccaagcttctgccactgtgtggctagctcttcccactgggaagttctgtgtacccggaatgtcggagtggagtcctgttctagtgtccagcacctgaccctgtgcccaacccctcaacagcctattcctgctgtccacagcctgctggaactttttacaaaatatgttgccatgctggaccctgggcactggacataagccccctggcagcctttttcatgtcacccaaaggggtaattgtcctactggtggtctgtaagatgagttagggtgacttgctaatagacattgtaaatcttaatatttatgtatgtattttattattaccggttttccatttatgatggtaatattgtttcttctaagaatatttatttttccttctaaatattgagataaaattcatgcttttgaaatgttctattcagtggcttttagtatatttgctatgttgtgcaaccatcgacactatccatttctagaactttttcgtcatcccaaacagacgctctgtattcataaaaaaataacttcctacctgtctctccccctagtctttggtaacctttgttatactggtaaactttgttgtgctctctgtctgtgtgaatttgcctattctaggggcctcatataagtgtaatcatacagtatttgtctttttgggtctgtctgatttcacttagcgggttttcagggttcattcatgttgcagcatataacagtactgcgttcctttttctggctgaataatattccactgtatggatagaccccattttgtttattcacacatcatttggacatttggattatttctggtttttggctattatgaacaatggtgctatgaacagttgcgtacaagtttttgtgtgaacatatgttttcaattctctcattatatacctaggagtagaattactgggtcatatggtaactgtatatttttgaggaactgccaaactattttcccacgtccatgcaccatttcacattcccaccagtaagtaagagggttccaatttctgcgcattcttgccaacactagttattatctgactttctggttataatcattctaatgagtgtgaagtagcctctggtgtcatttggatttgcatttctctgatgagtgatgctatcaagcacctttgctggtgctgttggccatatgtgtatgttccctggagaagtgtctgtgctgagccttggcccactttttaattaggcgtttgtctttttattactgagttgtaagagttctttatatattctggattctagacccttatcagatacatggtttgcaaatattttctcccattctgtgggttgtgttttcactttatcgataatgtccttagacatataataaatttgtattttaaaagtgacttgatttggctgtgcaaggtggctcacgcttgtaatcccagcactttgggagactgaggtgggtggatcatatgaggaggctaggagttcgaggtcagcctggccagcatagcgaaaacttgtctctactaaaaatacaaaaattagtcaggcatggtggtgcacgtctgtaataccagcttctcaggaggctgaggcacgaggatcacttgaacccaggaggaggaggttgcagtgagctgagatcatgccagggcaacagaatgagactttgtttaaaaaaaaaaaaaagtgacttgatttaagggaaaaaatgactggctatattcagtcagatatggcaaaaagtctcaaggtgttaatgtgaatgattaaggtcttggggggggtgtcccctatcagactacaggtgtttagaggcacagaaaaaggtgcagttgggttcttaatgtgaaatgatgagaagcacaactccagtgtgtctctttgtgtagaatgtcagcagacaccccctgctagatgtgctggatcatgggaaagcatttccatttgttactagattgttcagaagttttaatttatgatgggtgtggtggctcatgcctgtagtcccagcactgtgggaggctgaggcaggaggatcatctgaggccaagagttcaagatcagcctgggcaacatagtgataccctatctcttaaaaaagaagaagtttttaaatttgaaataataataggtactggatttatgcaaatgtcttttctgcgtcttttgagatgagtatcaggtttttttttttccttttatcatctgatgatgaacttaatgtttccatttgtattaatggaatactaagtccctctgtgatttctgaaccaagctattcctaggcctgagttttattttgttgacacagaaataaattagaaggccaagcgtggtggcatgtgcctgtagtcctagttgctgaggtaagaggattgcttgagcccaggagttcaaggctgcagcaagctttgattgcgccactgcactccagccttggcgacagactaagacgctgtctcaaaaaaaaacaaaaacgacaaaaaaaaaacaaaacagaaaaaataaactaaggcaatgacagtccctggcaaatgctgggagggaggcagcagtggtcagggaaggtaaccctgaagcaggacttgtaaagcaaataagattgggaggccaaggtgggtggatcacgaggtcaggagttcgagaccagcctggccaacatagtgaaaccccgtctttactaaaaatacaaaaaaattagccaggtgtggtggtgggtgcctgtagtcccagctacttgggaggctgaggcaggagaatctcgaacccaggaggcggaggttacagtcagctgagaccgcaccattgcactccagcctgggtgacagagcaagattccgtctcaaaaaaaaaaaaaaaaaaaaaaaaccaagaagaaaaggaatgaattagaacttcttctgcttggacttaagggcatcatcaggcaggttttgggtaggatagcaggggaggcagagacatagtcggggtcagtggtcatgagtgtggctttgagcccaaaaacttggtttctgttccctactttgccactcagtagtgcatgactttggccaaatttcttaaattcatgaagcaagtttccgggtgaatgaaatggggataaaaatagtgttcaaacctatccgttggtttgtgtgaaactgaaatgaatagtatcgtgcaggtacttgtgagcaaggggagctgctgtttcctgtccctttatgatgggaaatatctagacaagttcccaaccctctgcactgcaggctgcatggcacggagggtcttgtaacaccagctggggctggccttcttttaggagcttcagtggttctgaaaacttttatttgtttgtttgttttagtagatgtggggtctttctgtgttgcccggactggtctcaaacttctggactcaagtgatcctcccccgctcaacctcccaaagtgttgggattacaggtgtgagccactgtgcccagccttgaaaactttttcaggttcttccagggttactgggctattaaatatttctatttcattataagtcagtttttcaaagttatattatcttaattaccttttttatatgtattagtgtagagtagcattttatattttgatatcctccttatgcatagtttttcactttttattcctagtttttcgtttttaataagactttcaagaaatttattttattggccttttgaaaaaagcagctttagataaagtaagcagttctgctttcattttataatttatttctacttttgtttcattaatcttttcctccggcatgccttggattttgttgtgttactctttttctagaggctcgcattgtgtgtctggttcacttatgatcacgcttgcctacttttaagaatggaagaggggaggtggagggtggctgcacagtcgagggtgtgaggcagtcttgctctagccccaccatgccctcagcccgctgtggccacgctggttcctcaattgctggggcgtgcagtgtctgtaagggaggctactgatgccatccgaggaagatgtaaggtttcgtgtgggcagcgagagcctagcaggcatgtggggtgcccagcaaagggtaacagtggacagttgttgcctcattccacagagttttgattttttttttttttttaatggtcactccatcaacatcccccatggccagagcctgagctggtccccagagacacaggcattcagctgacagcctcgccttcacgctgctgctgttctcatgggggacaggcctcaggtggcaatgcacaaatcattagttaagggcagttgtgacagttaccaaggagtgtagtcccccgccccccgcccagtgaaaacagccctaaccaggggtggggacctttgggctctgacccgaagggtaggagaagctggaaggacagcattcctgtctgcgaaggcaggagcaaagctgccaggctatgaaggaaatggctggagcctgaagtcatgcaagctggggctggcagggacagggccaacttccaggcctgggggccaccatgaggattcaggacgtgacccccagggcacatgaaggccttccatctgtatttaagaaaagactttatcagacgagtatggtggctcacgcctgaatcttagcactttgggaggctgaggcaggtggatcacgaggtcaggagttcaataccagcctggccaatatggtaaaaccccatctctactaaaactacaaaaattagccaggcatggtggcgcacgcctgtagtcccagctactcgggaggctgaggcagaagaatcacttgaacccgggaggtggaggttacagtgagccaagatcgcgccactacactccagcctgggtgacagagtgagactccgtctcaaaaaaaccaaaagactttatcttatttcctatatgtttgtggtttcagtcctgatgtataatttgaccctagttagaatggttatctgaggaagtggcctgtacgatttctgcttttttaaatgtgtggctccctttcttcattgattaacgtatgattatttttataaatgttccatggcagtgggaagggattctctgtcacattccacatctggatcagttcctccccattttgttggtcaaatccgatctgccatatcctgtgtaatgacaagtgagttgcattctcaccgtcactcctggggtctctccgcttcccctgagctggctcagcagtctgctccatgtgttttgatgcagggtgacccattggtattcccgacactaacgcccccgtctgtggactgcttgctgcttgggcttcactgtgtctggtgttgacagtgcagacctaaaggtgtgcacacatgtgcacacacactccgctgtcttcttgtttgcactggacttaaatatctatgagggttattttcaactgctgaatttggaatgatttttatatcttttctgctttctgcccatgtacatgtgtttattttacactgttgtgattggtagttactatgtggggacacaattacttgggctgaaataatccacctgttgtggttggggtcctctggggcattccagggtgagaggttgtcactgccacctgggccatgtgggccggcaccagcattttgtggttacgaattctacagtcacaaatatctttgggcaaatccccttctatacctcaaggcagcttttggtttgcaaccccactggccagagggaagggccagtcacttggctctctcactgccctgcgccccagatggttctagggctgctgttttcccttggccctgccaacaccactgtttttacttctgctcattggctgagtgcagtggttcctggaagccagtggcacgtttccccgcgtagctcgcttatcccacagcacacacccaagggttctgttgctaacacgctgaattaattctttgctcatcttacagagtgtgttttgactgcccccatttctgaggccttgtaaggccagagctttgttgcttcatcggcaggttgggacttagatggccgtgaatgtttcctctctgctgctgcagtaagtaagtgcccgcaccatagtgtgtttggaggctgaagttgaagcgaggctgtgaggggagatggacgtgtgaggagggatgatggggcttgagcaaagtgggggagggggcaaaggcagttggcccaacacattccccacccctttgagaggtctgaggcctgcagacctggctcggagcccacctggtagtcctc

SEQ ID NO: 455580 - DNA, 6201 bp, Homo sapiens
ttgaggggttgggcacagggtcaggtgctggacactagaacaggactccactccgcctattcctgctgtccacagcctgctggaactttttacaaaatatgttgccatgctggaccctgggcactggacataagccccctggcagcctttttcatgtcacccaaaggggtaattgtcctactggtggtctgtaagatgagttagggtgacttgctaatagacattgtaaatcttaatatttatgtatgtattttattattaccggttttccatttatgatggtaatattgtttcttctaagaatatttatttttccttctaaatattgagataaaattcatgcttttgaaatgttctattcagtggcttttagtatatttgctatgttgtgcaaccatcgacactatccatttctagaactttttcgtcatcccaaacagacgctctgtattcataaaaaaataacttcctacctgtctctccccctagtctttggtaacctttgttatactggtaaactttgttgtgctctctgtctgtgtgaatttgcctattctaggggcctcatataagtgtaatcatacagtatttgtctttttgggtctgtctgatttcacttagcgggttttcagggttcattcatgttgcagcatataacagtactgcgttcctttttctggctgaataatattccactgtatggatagaccccattttgtttattcacacatcatttggacatttggattatttctggtttttggctattatgaacaatggtgctatgaacagttgcgtacaagtttttgtgtgaacatatgttttcaattctctcattatatacctaggagtagaattactgggtcatatggtaactgtatatttttgaggaactgccaaactattttcccacgtccatgcaccatttcacattcccaccagtaagtaagagggttccaatttctgcgcattcttgccaacactagttattatctgactttctggttataatcattctaatgagtgtgaagtagcctctggtgtcatttggatttgcatttctctgatgagtgatgctatcaagcacctttgctggtgctgttggccatatgtgtatgttccctggagaagtgtctgtgctgagccttggcccactttttaattaggcgtttgtctttttattactgagttgtaagagttctttatatattctggattctagacccttatcagatacatggtttgcaaatattttctcccattctgtgggttgtgttttcactttatcgataatgtccttagacatataataaatttgtattttaaaagtgacttgatttggctgtgcaaggtggctcacgcttgtaatcccagcactttgggagactgaggtgggtggatcatatgaggaggctaggagttcgaggtcagcctggccagcatagcgaaaacttgtctctactaaaaatacaaaaattagtcaggcatggtggtgcacgtctgtaataccagcttctcaggaggctgaggcacgaggatcacttgaacccaggaggaggaggttgcagtgagctgagatcatgccagggcaacagaatgagactttgtttaaaaaaaaaaaaaagtgacttgatttaagggaaaaaatgactggctatattcagtcagatatggcaaaaagtctcaaggtgttaatgtgaatgattaaggtcttggggggggtgtcccctatcagactacaggtgtttagaggcacagaaaaaggtgcagttgggttcttaatgtgaaatgatgagaagcacaactccagtgtgtctctttgtgtagaatgtcagcagacaccccctgctagatgtgctggatcatgggaaagcatttccatttgttactagattgttcagaagttttaatttatgatgggtgtggtggctcatgcctgtagtcccagcactgtgggaggctgaggcaggaggatcatctgaggccaagagttcaagatcagcctgggcaacatagtgataccctatctcttaaaaaagaagaagtttttaaatttgaaataataataggtactggatttatgcaaatgtcttttctgcgtcttttgagatgagtatcaggtttttttttttccttttatcatctgatgatgaacttaatgtttccatttgtattaatggaatactaagtccctctgtgatttctgaaccaagctattcctaggcctgagttttattttgttgacacagaaataaattagaaggccaagcgtggtggcatgtgcctgtagtcctagttgctgaggtaagaggattgcttgagcccaggagttcaaggctgcagcaagctttgattgcgccactgcactccagccttggcgacagactaagacgctgtctcaaaaaaaaacaaaaacgacaaaaaaaaaacaaaacagaaaaaataaactaaggcaatgacagtccctggcaaatgctgggagggaggcagcagtggtcagggaaggtaaccctgaagcaggacttgtaaagcaaataagattgggaggccaaggtgggtggatcacgaggtcaggagttcgagaccagcctggccaacatagtgaaaccccgtctttactaaaaatacaaaaaaattagccaggtgtggtggtgggtgcctgtagtcccagctacttgggaggctgaggcaggagaatctcgaacccaggaggcggaggttacagtcagctgagaccgcaccattgcactccagcctgggtgacagagcaagattccgtctcaaaaaaaaaaaaaaaaaaaaaaaaccaagaagaaaaggaatgaattagaacttcttctgcttggacttaagggcatcatcaggcaggttttgggtaggatagcaggggaggcagagacatagtcggggtcagtggtcatgagtgtggctttgagcccaaaaacttggtttctgttccctactttgccactcagtagtgcatgactttggccaaatttcttaaattcatgaagcaagtttccgggtgaatgaaatggggataaaaatagtgttcaaacctatccgttggtttgtgtgaaactgaaatgaatagtatcgtgcaggtacttgtgagcaaggggagctgctgtttcctgtccctttatgatgggaaatatctagacaagttcccaaccctctgcactgcaggctgcatggcacggagggtcttgtaacaccagctggggctggccttcttttaggagcttcagtggttctgaaaacttttatttgtttgtttgttttagtagatgtggggtctttctgtgttgcccggactggtctcaaacttctggactcaagtgatcctcccccgctcaacctcccaaagtgttgggattacaggtgtgagccactgtgcccagccttgaaaactttttcaggttcttccagggttactgggctattaaatatttctatttcattataagtcagtttttcaaagttatattatcttaattaccttttttatatgtattagtgtagagtagcattttatattttgatatcctccttatgcatagtttttcactttttattcctagtttttcgtttttaataagactttcaagaaatttattttattggccttttgaaaaaagcagctttagataaagtaagcagttctgctttcattttataatttatttctacttttgtttcattaatcttttcctccggcatgccttggattttgttgtgttactctttttctagaggctcgcattgtgtgtctggttcacttatgatcacgcttgcctacttttaagaatggaagaggggaggtggagggtggctgcacagtcgagggtgtgaggcagtcttgctctagccccaccatgccctcagcccgctgtggccacgctggttcctcaattgctggggcgtgcagtgtctgtaagggaggctactgatgccatccgaggaagatgtaaggtttcgtgtgggcagcgagagcctagcaggcatgtggggtgcccagcaaagggtaacagtggacagttgttgcctcattccacagagttttgattttttttttttttttaatggtcactccatcaacatcccccatggccagagcctgagctggtccccagagacacaggcattcagctgacagcctcgccttcacgctgctgctgttctcatgggggacaggcctcaggtggcaatgcacaaatcattagttaagggcagttgtgacagttaccaaggagtgtagtcccccgccccccgcccagtgaaaacagccctaaccaggggtggggacctttgggctctgacccgaagggtaggagaagctggaaggacagcattcctgtctgcgaaggcaggagcaaagctgccaggctatgaaggaaatggctggagcctgaagtcatgcaagctggggctggcagggacagggccaacttccaggcctgggggccaccatgaggattcaggacgtgacccccagggcacatgaaggccttccatctgtatttaagaaaagactttatcagacgagtatggtggctcacgcctgaatcttagcactttgggaggctgaggcaggtggatcacgaggtcaggagttcaataccagcctggccaatatggtaaaaccccatctctactaaaactacaaaaattagccaggcatggtggcgcacgcctgtagtcccagctactcgggaggctgaggcagaagaatcacttgaacccgggaggtggaggttacagtgagccaagatcgcgccactacactccagcctgggtgacagagtgagactccgtctcaaaaaaaccaaaagactttatcttatttcctatatgtttgtggtttcagtcctgatgtataatttgaccctagttagaatggttatctgaggaagtggcctgtacgatttctgcttttttaaatgtgtggctccctttcttcattgattaacgtatgattatttttataaatgttccatggcagtgggaagggattctctgtcacattccacatctggatcagttcctccccattttgttggtcaaatccgatctgccatatcctgtgtaatgacaagtgagttgcattctcaccgtcactcctggggtctctccgcttcccctgagctggctcagcagtctgctccatgtgttttgatgcagggtgacccattggtattcccgacactaacgcccccgtctgtggactgcttgctgcttgggcttcactgtgtctggtgttgacagtgcagacctaaaggtgtgcacacatgtgcacacacactccgctgtcttcttgtttgcactggacttaaatatctatgagggttattttcaactgctgaatttggaatgatttttatatcttttctgctttctgcccatgtacatgtgtttattttacactgttgtgattggtagttactatgtggggacacaattacttgggctgaaataatccacctgttgtggttggggtcctctggggcattccagggtgagaggttgtcactgccacctgggccatgtgggccggcaccagcattttgtggttacgaattctacagtcacaaatatctttgggcaaatccccttctatacctcaaggcagcttttggtttgcaaccccactggccagagggaagggccagtcacttggctctctcactgccctgcgccccagatggttctagggctgctgttttcccttggccctgccaacaccactgtttttacttctgctcattggctgagtgcagtggttcctggaagccagtggcacgtttccccgcgtagctcgcttatcccacagcacacacccaagggttctgttgctaacacgctgaattaattctttgctcatcttacagagtgtgttttgactgcccccatttctgaggccttgtaaggccagagctttgttgcttcatcggcaggttgggacttagatggccgtgaatgtttcctctctgctgctgcagtaagtaagtgcccgcaccatagtgtgtttggaggctgaagttgaagcgaggctgtgaggggagatggacgtgtgaggagggatgatggggcttgagcaaagtgggggagggggcaaaggcagttggcccaacacattccccacccctttgagaggtctgaggcctgcagacctggctcggagcccacctggtagtcctc

SEQ ID NO: 455581 - DNA, 5979 bp, Homo sapiens
tcccacaccacccgcctcccctgccgcctcctgccaccccctaggccaaggtaataatcatcctgaatcctgggtttatctctcacttgctttcttttcatataattttgcaaaagaatctgatctaaatgtgtttttcagagtatatatttatattttagctgttcttagagaaaatttattattttgcatgtaatcttatggaacattctcatttaataccatggtaagattcagcccttgcccaggggatagttcatttagtttgtttactggatagagctcatcatgtgactatacctcagttagtttatcagttctcccatccatggtgactaggttgcctctcagcctctcaacaacactgtttctcagtgtccttgtagaagtgatatgtgggtgttttctccttacacagagttgaaaggtgacgacaacaacgttggcactaccaatcccccaccctccagaggggtaaccagtgttaccagtttgctgtgtttcctgctacacctcgccttattcacttccatttgtatctgaaaaacgtgttgcatggtttcttttctatagaagtggtaaaatgctattgtgtcctgtacattattgattactttttttcatttaacagtagggagatgcctgggagtacacagagaactgccctcattgttttcaacttctgcactgtatgtctgtgagtttagccattctgctgttaatggaaatttacagtattctaatcttttgatattacaaacagttctgtgcgatcatcgtcatacacaaccccttgtgcacaatgcatgagtgtttctcagggtaggtaccaagaagtgaaattcctgggtcatagggcgtgagtccgacatttttctccattctgccctgttgccctccagagtgggtgtccagctttgcatacctaagtatgagagtatctgttgttcatatcctctacgacgctccatatatgaaacttaagtttctgctagttgccatctttgatctatcatgtatgcagtgacctactaagactgtaattggtacagtagattcttgtcatctgtgtgtgaatttagcattcatgggcttaatgctgacaaggcccccagggtccaagacatataatcatgtataattttgtcaaggtataattttttaaattgcttttgtcatgtgtctgctggtgatgcccaacccagtgctctgcacccaggtcacactgtggctttgtcctctgcttatgcctgcattgcagcaactgtcctgaagagaccaaaattatgcagatttaggtaagtccatggctaatgttattatattatgtgctattgtaatggatggggctgtggagtgtatgaatttataaatcactggtcttgtaattaaaattcaaacactatagaaaaaggccatgtagaagataaaagttcctctataatcccggacccctaagataactactaatgacaacttcatttatattccttcagacattttctggctgtggatgtactaaaatgtatcctattattctctgccctaaaatggaatcatacaaggtgtactgttatttttatggctctataacatgtcatattgtacgtgttggtatggtcattttaaccatttttctagtgatggctttgaggttatttgcagtttcctagccatctcaaagtgtgctgcggggatctcttttgcatccctctgggtgcagagctgaggcacccagaggcagtgtccagaggaggcagcatctgtaggtgtcttcacctgctctggctcttggcacatctggttggtgacactgttttgtgagatgggttgaaagcacgtgctgccaaaatagaataatgttggtcctctcctcatgtgccgtggaactggggtaaaactgcgtagtggctgcagctgcctgtccataccggaatcgagtataacacggtgcctggcttagcacaaaacagtagtgggtcctgcaggccccagagtctaattcctggtattctttcccctacacagattaaataaaccaaaaacaaactattctaggaaagcgtctgtgacatttgtaaaaagtggtatttaatgatcttttattcacttgtctgtttagtttgttgaaatcttaagtggcatcctggtctgggaaggagtgctgtctgcgcctgccctccgctgggcacagcgtggctgcttcaggggctaagcacacactttctgtcttctaaagggccgccacatgccaggagctcaggtgtgagcccggctctggctcttacctcatagggtcactcataggggcacagggagcagaacattgtacacagcgaggcaccacccggcttggcatctgcctcggtggacttactacctctagaaggaaatacctgagttcctctggcctcagctcctagagtgactggtgtgctgtccctgttactcttctgtcaaggtgacaactgtgtgacccatcatctgtgtgtcaaagcaaggccctgcctgggcctctgctcctgtccgggctgcacaaaggcaaatgctttgctagtttccttccagttaatttcacctatgaatagatgtgtgaaaactgttcaaagccatacctgcacatgtttgaacttcaaaccctgtgggtgattcagtggcatctttctctaacccccagcctcccttcccacagaggccaccgtcatggccagttgctgcagtttctttccagagaacctgtgtatgtgtaaagctgtacaggcgtgggtacaccacacagcctgtcttgcactgtggactgttgagttactagtacatctaggtaagcaccgcatatctgtattcatgtctgccttggtcttttcaacatctttgtggtagccgtgtttgaattacccattccctttttggggaaccattaagttgtttcagcaatttttactgtagataaggctataccgcatatctgtgtacatgggtttttatgtacatgggcaagtatatctgtgagagaaaagtttcctcaggaggaattctgggcacagcatgtgtaaatttctaaatatgatggacacccccagcttccacctcaaggaggttggtcccattgacatttccccacaccttcacccaggctgtgcccttaaacttggttatttgtcaatgtgagaagtggaaaatagtatttaattgtagtttggatttgtatttctattgggttgtatacttactgattaataataagagctctttacatattaaggaaattaacccttttcaaatacattcctatttctcactaatctttaagttttattgtaatattttgctctttagtttatatatatatgtatatatatatatatgtatatatatatatatacatatatatatacatatatatatactaattttcttttatggttcctggattttgtgagtagtttgaaaaggctaatccagctgaagattttgttgttgttgttaaaccccatgttttctcctaactctttttatttttattttggaggactctatctagacttaattttagcataacaagtgacagggttagttagcctgttgtccttacaccattttctggctaatacagctattaactattgatctgtctattcacgtgccagttcctaatggttttacatagtgtaatctgcacttcaaaatagcgaagggaagccctacctcattattctacttttccagaattctcctggctattccaggctgcatgtttaccttaaccttccctgtgatgtcttcatgccgttgtcttcttatgcaagaataaggtacgtctttccatccactcacgtctatttaatttgactttgcattacacagaaagctggtcttggtctgtctacctcggcatctagttgtcctcactgccccctagccgaccccaccccatctgactgactaccccatcacagagtacttttatttacgttttgctctgcctaatggttacttgatactgtcacgccgacagtgtccagttcagtggtctttgcagttgaaatgctcccgtacacactgtcttgttaaaaatgccagtaagttcatacaaacccagcttgcacccaaggtcacattcagagagcgtagggctgggatgggttgttttccaagcttctgccactgtgtggctagctcttcccactgggaagttctgtgtacccggaatgtcggagtggagtcctgttctagtgtccagcacctgaccctgtgcccaacccctcaacagcctattcctgctgtccacagcctgctggaactttttacaaaatatgttgccatgctggaccctgggcactggacataagccccctggcagcctttttcatgtcacccaaaggggtaattgtcctactggtggtctgtaagatgagttagggtgacttgctaatagacattgtaaatcttaatatttatgtatgtattttattattaccggttttccatttatgatggtaatattgtttcttctaagaatatttatttttccttctaaatattgagataaaattcatgcttttgaaatgttctattcagtggcttttagtatatttgctatgttgtgcaaccatcgacactatccatttctagaactttttcgtcatcccaaacagacgctctgtattcataaaaaaataacttcctacctgtctctccccctagtctttggtaacctttgttatactggtaaactttgttgtgctctctgtctgtgtgaatttgcctattctaggggcctcatataagtgtaatcatacagtatttgtctttttgggtctgtctgatttcacttagcgggttttcagggttcattcatgttgcagcatataacagtactgcgttcctttttctggctgaataatattccactgtatggatagaccccattttgtttattcacacatcatttggacatttggattatttctggtttttggctattatgaacaatggtgctatgaacagttgcgtacaagtttttgtgtgaacatatgttttcaattctctcattatatacctaggagtagaattactgggtcatatggtaactgtatatttttgaggaactgccaaactattttcccacgtccatgcaccatttcacattcccaccagtaagtaagagggttccaatttctgcgcattcttgccaacactagttattatctgactttctggttataatcattctaatgagtgtgaagtagcctctggtgtcatttggatttgcatttctctgatgagtgatgctatcaagcacctttgctggtgctgttggccatatgtgtatgttccctggagaagtgtctgtgctgagccttggcccactttttaattaggcgtttgtctttttattactgagttgtaagagttctttatatattctggattctagacccttatcagatacatggtttgcaaatattttctcccattctgtgggttgtgttttcactttatcgataatgtccttagacatataataaatttgtattttaaaagtgacttgatttggctgtgcaaggtggctcacgcttgtaatcccagcactttgggagactgaggtgggtggatcatatgaggaggctaggagttcgaggtcagcctggccagcatagcgaaaacttgtctctactaaaaatacaaaaattagtcaggcatggtggtgcacgtctgtaataccagcttctcaggaggctgaggcacgaggatcacttgaacccaggaggaggaggttgcagtgagctgagatcatgccagggcaacagaatgagactttgtttaaaaaaaaaaaaaaaaaaactcgagggggggcccggttcccaattcgcccctatgtgagtcctattacaatttactggcccgcctttttacaacgtcgtgaactggggaaaaccctggcgttccccaaacttaatcgcctttgcagaacaatcc

SEQ ID NO: 455582 - DNA, 5864 bp, Homo sapiens
ttggcattatgcacatcatctgcatcatctccactgacattactcgataattcgcaaccatcgacactatccatttctagaactttttcgtcatcccaaacagacgctctgtattcataaaaaaataacttcctacctgtctctccccctagtctttggtaacctttgttatactggtaaactttgttgtgctctctgtctgtgtgaatttgcctattctaggggcctcatataagtgtaatcatacagtatttgtctttttgggtctgtctgatttcacttagcgggttttcagggttcattcatgttgcagcatataacagtactgcgttcctttttctggctgaataatattccactgtatggatagaccccattttgtttattcacacatcatttggacatttggattatttctggtttttggctattatgaacaatggtgctatgaacagttgcgtacaagtttttgtgtgaacatatgttttcaattctctcattatatacctaggagtagaattactgggtcatatggtaactgtatatttttgaggaactgccaaactattttcccacgtccatgcaccatttcacattcccaccagtaagtaagagggttccaatttctgcgcattcttgccaacactagttattatctgactttctggttataatcattctaatgagtgtgaagtagcctctggtgtcatttggatttgcatttctctgatgagtgatgctatcaagcacctttgctggtgctgttggccatatgtgtatgttccctggagaagtgtctgtgctgagccttggcccactttttaattaggcgtttgtctttttattactgagttgtaagagttctttatatattctggattctagacccttatcagatacatggtttgcaaatattttctcccattctgtgggttgtgttttcactttatcgataatgtccttagacatataataaatttgtattttaaaagtgacttgatttggctgtgcaaggtggctcacgcttgtaatcccagcactttgggagactgaggtgggtggatcatatgaggaggctaggagttcgaggtcagcctggccagcatagcgaaaacttgtctctactaaaaatacaaaaattagtcaggcatggtggtgcacgtctgtaataccagcttctcaggaggctgaggcacgaggatcacttgaacccaggaggaggaggttgcagtgagctgagatcatgccagggcaacagaatgagactttgtttaaaaaaaaaaaaaagtgacttgatttaagggaaaaaatgactggctatattcagtcagatatggcaaaaagtctcaaggtgttaatgtgaatgattaaggtcttggggggggtgtcccctatcagactacaggtgtttagaggcacagaaaaaggtgcagttgggttcttaatgtgaaatgatgagaagcacaactccagtgtgtctctttgtgtagaatgtcagcagacaccccctgctagatgtgctggatcatgggaaagcatttccatttgttactagattgttcagaagttttaatttatgatgggtgtggtggctcatgcctgtagtcccagcactgtgggaggctgaggcaggaggatcatctgaggccaagagttcaagatcagcctgggcaacatagtgataccctatctcttaaaaaagaagaagtttttaaatttgaaataataataggtactggatttatgcaaatgtcttttctgcgtcttttgagatgagtatcaggtttttttttttccttttatcatctgatgatgaacttaatgtttccatttgtattaatggaatactaagtccctctgtgatttctgaaccaagctattcctaggcctgagttttattttgttgacacagaaataaattagaaggccaagcgtggtggcatgtgcctgtagtcctagttgctgaggtaagaggattgcttgagcccaggagttcaaggctgcagcaagctttgattgcgccactgcactccagccttggcgacagactaagacgctgtctcaaaaaaaaacaaaaacgacaaaaaaaaaacaaaacagaaaaaataaactaaggcaatgacagtccctggcaaatgctgggagggaggcagcagtggtcagggaaggtaaccctgaagcaggacttgtaaagcaaataagattgggaggccaaggtgggtggatcacgaggtcaggagttcgagaccagcctggccaacatagtgaaaccccgtctttactaaaaatacaaaaaaattagccaggtgtggtggtgggtgcctgtagtcccagctacttgggaggctgaggcaggagaatctcgaacccaggaggcggaggttacagtcagctgagaccgcaccattgcactccagcctgggtgacagagcaagattccgtctcaaaaaaaaaaaaaaaaaaaaaaaaccaagaagaaaaggaatgaattagaacttcttctgcttggacttaagggcatcatcaggcaggttttgggtaggatagcaggggaggcagagacatagtcggggtcagtggtcatgagtgtggctttgagcccaaaaacttggtttctgttccctactttgccactcagtagtgcatgactttggccaaatttcttaaattcatgaagcaagtttccgggtgaatgaaatggggataaaaatagtgttcaaacctatccgttggtttgtgtgaaactgaaatgaatagtatcgtgcaggtacttgtgagcaaggggagctgctgtttcctgtccctttatgatgggaaatatctagacaagttcccaaccctctgcactgcaggctgcatggcacggagggtcttgtaacaccagctggggctggccttcttttaggagcttcagtggttctgaaaacttttatttgtttgtttgttttagtagatgtggggtctttctgtgttgcccggactggtctcaaacttctggactcaagtgatcctcccccgctcaacctcccaaagtgttgggattacaggtgtgagccactgtgcccagccttgaaaactttttcaggttcttccagggttactgggctattaaatatttctatttcattataagtcagtttttcaaagttatattatcttaattaccttttttatatgtattagtgtagagtagcattttatattttgatatcctccttatgcatagtttttcactttttattcctagtttttcgtttttaataagactttcaagaaatttattttattggccttttgaaaaaagcagctttagataaagtaagcagttctgctttcattttataatttatttctacttttgtttcattaatcttttcctccggcatgccttggattttgttgtgttactctttttctagaggctcgcattgtgtgtctggttcacttatgatcacgcttgcctacttttaagaatggaagaggggaggtggagggtggctgcacagtcgagggtgtgaggcagtcttgctctagccccaccatgccctcagcccgctgtggccacgctggttcctcaattgctggggcgtgcagtgtctgtaagggaggctactgatgccatccgaggaagatgtaaggtttcgtgtgggcagcgagagcctagcaggcatgtggggtgcccagcaaagggtaacagtggacagttgttgcctcattccacagagttttgattttttttttttttttaatggtcactccatcaacatcccccatggccagagcctgagctggtccccagagacacaggcattcagctgacagcctcgccttcacgctgctgctgttctcatgggggacaggcctcaggtggcaatgcacaaatcattagttaagggcagttgtgacagttaccaaggagtgtagtcccccgccccccgcccagtgaaaacagccctaaccaggggtggggacctttgggctctgacccgaagggtaggagaagctggaaggacagcattcctgtctgcgaaggcaggagcaaagctgccaggctatgaaggaaatggctggagcctgaagtcatgcaagctggggctggcagggacagggccaacttccaggcctgggggccaccatgaggattcaggacgtgacccccagggcacatgaaggccttccatctgtatttaagaaaagactttatcagacgagtatggtggctcacgcctgaatcttagcactttgggaggctgaggcaggtggatcacgaggtcaggagttcaataccagcctggccaatatggtaaaaccccatctctactaaaactacaaaaattagccaggcatggtggcgcacgcctgtagtcccagctactcgggaggctgaggcagaagaatcacttgaacccgggaggtggaggttacagtgagccaagatcgcgccactacactccagcctgggtgacagagtgagactccgtctcaaaaaaaccaaaagactttatcttatttcctatatgtttgtggtttcagtcctgatgtataatttgaccctagttagaatggttatctgaggaagtggcctgtacgatttctgcttttttaaatgtgtggctccctttcttcattgattaacgtatgattatttttataaatgttccatggcagtgggaagggattctctgtcacattccacatctggatcagttcctccccattttgttggtcaaatccgatctgccatatcctgtgtaatgacaagtgagttgcattctcaccgtcactcctggggtctctccgcttcccctgagctggctcagcagtctgctccatgtgttttgatgcagggtgacccattggtattcccgacactaacgcccccgtctgtggactgcttgctgcttgggcttcactgtgtctggtgttgacagtgcagacctaaaggtgtgcacacatgtgcacacacactccgctgtcttcttgtttgcactggacttaaatatctatgagggttattttcaactgctgaatttggaatgatttttatatcttttctgctttctgcccatgtacatgtgtttattttacactgttgtgattggtagttactatgtggggacacaattacttgggctgaaataatccacctgttgtggttggggtcctctggggcattccagggtgagaggttgtcactgccacctgggccatgtgggccggcaccagcattttgtggttacgaattctacagtcacaaatatctttgggcaaatccccttctatacctcaaggcagcttttggtttgcaaccccactggccagagggaagggccagtcacttggctctctcactgccctgcgccccagatggttctagggctgctgttttcccttggccctgccaacaccactgtttttacttctgctcattggctgagtgcagtggttcctggaagccagtggcacgtttccccgcgtagctcgcttatcccacagcacacacccaagggttctgttgctaacacgctgaattaattctttgctcatcttacagagtgtgttttgactgcccccatttctgaggccttgtaaggccagagctttgttgcttcatcggcaggttgggacttagatggccgtgaatgtttcctctctgctgctgcagtaagtaagtgcccgcaccatagtgtgtttggaggctgaagttgaagcgaggctgtgaggggagatggacgtgtgaggagggatgatggggcttgagcaaagtgggggagggggcaaaggcagttggcccaacacattccccacccctttgagaggtctgaggcctgcagacctggctcggagcccacctggtagtcctc

SEQ ID NO: 455583 - DNA, 5524 bp, Homo sapiens
agaccgtagaggaccctttctctgatcgctcccccattttgtttattcacacatcatttggacatttggattatttctggtttttggctattatgaacaatggtgctatgaacagttgcgtacaagtttttgtgtgaacatatgttttcaattctctcattatatacctaggagtagaattactgggtcatatggtaactgtatatttttgaggaactgccaaactattttcccacgtccatgcaccatttcacattcccaccagtaagtaagagggttccaatttctgcgcattcttgccaacactagttattatctgactttctggttataatcattctaatgagtgtgaagtagcctctggtgtcatttggatttgcatttctctgatgagtgatgctatcaagcacctttgctggtgctgttggccatatgtgtatgttccctggagaagtgtctgtgctgagccttggcccactttttaattaggcgtttgtctttttattactgagttgtaagagttctttatatattctggattctagacccttatcagatacatggtttgcaaatattttctcccattctgtgggttgtgttttcactttatcgataatgtccttagacatataataaatttgtattttaaaagtgacttgatttggctgtgcaaggtggctcacgcttgtaatcccagcactttgggagactgaggtgggtggatcatatgaggaggctaggagttcgaggtcagcctggccagcatagcgaaaacttgtctctactaaaaatacaaaaattagtcaggcatggtggtgcacgtctgtaataccagcttctcaggaggctgaggcacgaggatcacttgaacccaggaggaggaggttgcagtgagctgagatcatgccagggcaacagaatgagactttgtttaaaaaaaaaaaaaagtgacttgatttaagggaaaaaatgactggctatattcagtcagatatggcaaaaagtctcaaggtgttaatgtgaatgattaaggtcttggggggggtgtcccctatcagactacaggtgtttagaggcacagaaaaaggtgcagttgggttcttaatgtgaaatgatgagaagcacaactccagtgtgtctctttgtgtagaatgtcagcagacaccccctgctagatgtgctggatcatgggaaagcatttccatttgttactagattgttcagaagttttaatttatgatgggtgtggtggctcatgcctgtagtcccagcactgtgggaggctgaggcaggaggatcatctgaggccaagagttcaagatcagcctgggcaacatagtgataccctatctcttaaaaaagaagaagtttttaaatttgaaataataataggtactggatttatgcaaatgtcttttctgcgtcttttgagatgagtatcaggtttttttttttccttttatcatctgatgatgaacttaatgtttccatttgtattaatggaatactaagtccctctgtgatttctgaaccaagctattcctaggcctgagttttattttgttgacacagaaataaattagaaggccaagcgtggtggcatgtgcctgtagtcctagttgctgaggtaagaggattgcttgagcccaggagttcaaggctgcagcaagctttgattgcgccactgcactccagccttggcgacagactaagacgctgtctcaaaaaaaaacaaaaacgacaaaaaaaaaacaaaacagaaaaaataaactaaggcaatgacagtccctggcaaatgctgggagggaggcagcagtggtcagggaaggtaaccctgaagcaggacttgtaaagcaaataagattgggaggccaaggtgggtggatcacgaggtcaggagttcgagaccagcctggccaacatagtgaaaccccgtctttactaaaaatacaaaaaaattagccaggtgtggtggtgggtgcctgtagtcccagctacttgggaggctgaggcaggagaatctcgaacccaggaggcggaggttacagtcagctgagaccgcaccattgcactccagcctgggtgacagagcaagattccgtctcaaaaaaaaaaaaaaaaaaaaaaaaccaagaagaaaaggaatgaattagaacttcttctgcttggacttaagggcatcatcaggcaggttttgggtaggatagcaggggaggcagagacatagtcggggtcagtggtcatgagtgtggctttgagcccaaaaacttggtttctgttccctactttgccactcagtagtgcatgactttggccaaatttcttaaattcatgaagcaagtttccgggtgaatgaaatggggataaaaatagtgttcaaacctatccgttggtttgtgtgaaactgaaatgaatagtatcgtgcaggtacttgtgagcaaggggagctgctgtttcctgtccctttatgatgggaaatatctagacaagttcccaaccctctgcactgcaggctgcatggcacggagggtcttgtaacaccagctggggctggccttcttttaggagcttcagtggttctgaaaacttttatttgtttgtttgttttagtagatgtggggtctttctgtgttgcccggactggtctcaaacttctggactcaagtgatcctcccccgctcaacctcccaaagtgttgggattacaggtgtgagccactgtgcccagccttgaaaactttttcaggttcttccagggttactgggctattaaatatttctatttcattataagtcagtttttcaaagttatattatcttaattaccttttttatatgtattagtgtagagtagcattttatattttgatatcctccttatgcatagtttttcactttttattcctagtttttcgtttttaataagactttcaagaaatttattttattggccttttgaaaaaagcagctttagataaagtaagcagttctgctttcattttataatttatttctacttttgtttcattaatcttttcctccggcatgccttggattttgttgtgttactctttttctagaggctcgcattgtgtgtctggttcacttatgatcacgcttgcctacttttaagaatggaagaggggaggtggagggtggctgcacagtcgagggtgtgaggcagtcttgctctagccccaccatgccctcagcccgctgtggccacgctggttcctcaattgctggggcgtgcagtgtctgtaagggaggctactgatgccatccgaggaagatgtaaggtttcgtgtgggcagcgagagcctagcaggcatgtggggtgcccagcaaagggtaacagtggacagttgttgcctcattccacagagttttgattttttttttttttttaatggtcactccatcaacatcccccatggccagagcctgagctggtccccagagacacaggcattcagctgacagcctcgccttcacgctgctgctgttctcatgggggacaggcctcaggtggcaatgcacaaatcattagttaagggcagttgtgacagttaccaaggagtgtagtcccccgccccccgcccagtgaaaacagccctaaccaggggtggggacctttgggctctgacccgaagggtaggagaagctggaaggacagcattcctgtctgcgaaggcaggagcaaagctgccaggctatgaaggaaatggctggagcctgaagtcatgcaagctggggctggcagggacagggccaacttccaggcctgggggccaccatgaggattcaggacgtgacccccagggcacatgaaggccttccatctgtatttaagaaaagactttatcagacgagtatggtggctcacgcctgaatcttagcactttgggaggctgaggcaggtggatcacgaggtcaggagttcaataccagcctggccaatatggtaaaaccccatctctactaaaactacaaaaattagccaggcatggtggcgcacgcctgtagtcccagctactcgggaggctgaggcagaagaatcacttgaacccgggaggtggaggttacagtgagccaagatcgcgccactacactccagcctgggtgacagagtgagactccgtctcaaaaaaaccaaaagactttatcttatttcctatatgtttgtggtttcagtcctgatgtataatttgaccctagttagaatggttatctgaggaagtggcctgtacgatttctgcttttttaaatgtgtggctccctttcttcattgattaacgtatgattatttttataaatgttccatggcagtgggaagggattctctgtcacattccacatctggatcagttcctccccattttgttggtcaaatccgatctgccatatcctgtgtaatgacaagtgagttgcattctcaccgtcactcctggggtctctccgcttcccctgagctggctcagcagtctgctccatgtgttttgatgcagggtgacccattggtattcccgacactaacgcccccgtctgtggactgcttgctgcttgggcttcactgtgtctggtgttgacagtgcagacctaaaggtgtgcacacatgtgcacacacactccgctgtcttcttgtttgcactggacttaaatatctatgagggttattttcaactgctgaatttggaatgatttttatatcttttctgctttctgcccatgtacatgtgtttattttacactgttgtgattggtagttactatgtggggacacaattacttgggctgaaataatccacctgttgtggttggggtcctctggggcattccagggtgagaggttgtcactgccacctgggccatgtgggccggcaccagcattttgtggttacgaattctacagtcacaaatatctttgggcaaatccccttctatacctcaaggcagcttttggtttgcaaccccactggccagagggaagggccagtcacttggctctctcactgccctgcgccccagatggttctagggctgctgttttcccttggccctgccaacaccactgtttttacttctgctcattggctgagtgcagtggttcctggaagccagtggcacgtttccccgcgtagctcgcttatcccacagcacacacccaagggttctgttgctaacacgctgaattaattctttgctcatcttacagagtgtgttttgactgcccccatttctgaggccttgtaaggccagagctttgttgcttcatcggcaggttgggacttagatggccgtgaatgtttcctctctgctgctgcagtaagtaagtgcccgcaccatagtgtgtttggaggctgaagttgaagcgaggctgtgaggggagatggacgtgtgaggagggatgatggggcttgagcaaagtgggggagggggcaaaggcagttggcccaacacattccccacccctttgagaggtctgaggcctgcagacctggctcggagcccacctggtagtcctc

SEQ ID NO: 455584 - DNA, 5189 bp, Homo sapiens
aggtaaatcagccggtccgacaccatagaatgcatttggatttgcatttctctgatgagtgatgctatcaagcacctttgctggtgctgttggccatatgtgtatgttccctggagaagtgtctgtgctgagccttggcccactttttaattaggcgtttgtctttttattactgagttgtaagagttctttatatattctggattctagacccttatcagatacatggtttgcaaatattttctcccattctgtgggttgtgttttcactttatcgataatgtccttagacatataataaatttgtattttaaaagtgacttgatttggctgtgcaaggtggctcacgcttgtaatcccagcactttgggagactgaggtgggtggatcatatgaggaggctaggagttcgaggtcagcctggccagcatagcgaaaacttgtctctactaaaaatacaaaaattagtcaggcatggtggtgcacgtctgtaataccagcttctcaggaggctgaggcacgaggatcacttgaacccaggaggaggaggttgcagtgagctgagatcatgccagggcaacagaatgagactttgtttaaaaaaaaaaaaaagtgacttgatttaagggaaaaaatgactggctatattcagtcagatatggcaaaaagtctcaaggtgttaatgtgaatgattaaggtcttggggggggtgtcccctatcagactacaggtgtttagaggcacagaaaaaggtgcagttgggttcttaatgtgaaatgatgagaagcacaactccagtgtgtctctttgtgtagaatgtcagcagacaccccctgctagatgtgctggatcatgggaaagcatttccatttgttactagattgttcagaagttttaatttatgatgggtgtggtggctcatgcctgtagtcccagcactgtgggaggctgaggcaggaggatcatctgaggccaagagttcaagatcagcctgggcaacatagtgataccctatctcttaaaaaagaagaagtttttaaatttgaaataataataggtactggatttatgcaaatgtcttttctgcgtcttttgagatgagtatcaggtttttttttttccttttatcatctgatgatgaacttaatgtttccatttgtattaatggaatactaagtccctctgtgatttctgaaccaagctattcctaggcctgagttttattttgttgacacagaaataaattagaaggccaagcgtggtggcatgtgcctgtagtcctagttgctgaggtaagaggattgcttgagcccaggagttcaaggctgcagcaagctttgattgcgccactgcactccagccttggcgacagactaagacgctgtctcaaaaaaaaacaaaaacgacaaaaaaaaaacaaaacagaaaaaataaactaaggcaatgacagtccctggcaaatgctgggagggaggcagcagtggtcagggaaggtaaccctgaagcaggacttgtaaagcaaataagattgggaggccaaggtgggtggatcacgaggtcaggagttcgagaccagcctggccaacatagtgaaaccccgtctttactaaaaatacaaaaaaattagccaggtgtggtggtgggtgcctgtagtcccagctacttgggaggctgaggcaggagaatctcgaacccaggaggcggaggttacagtcagctgagaccgcaccattgcactccagcctgggtgacagagcaagattccgtctcaaaaaaaaaaaaaaaaaaaaaaaaccaagaagaaaaggaatgaattagaacttcttctgcttggacttaagggcatcatcaggcaggttttgggtaggatagcaggggaggcagagacatagtcggggtcagtggtcatgagtgtggctttgagcccaaaaacttggtttctgttccctactttgccactcagtagtgcatgactttggccaaatttcttaaattcatgaagcaagtttccgggtgaatgaaatggggataaaaatagtgttcaaacctatccgttggtttgtgtgaaactgaaatgaatagtatcgtgcaggtacttgtgagcaaggggagctgctgtttcctgtccctttatgatgggaaatatctagacaagttcccaaccctctgcactgcaggctgcatggcacggagggtcttgtaacaccagctggggctggccttcttttaggagcttcagtggttctgaaaacttttatttgtttgtttgttttagtagatgtggggtctttctgtgttgcccggactggtctcaaacttctggactcaagtgatcctcccccgctcaacctcccaaagtgttgggattacaggtgtgagccactgtgcccagccttgaaaactttttcaggttcttccagggttactgggctattaaatatttctatttcattataagtcagtttttcaaagttatattatcttaattaccttttttatatgtattagtgtagagtagcattttatattttgatatcctccttatgcatagtttttcactttttattcctagtttttcgtttttaataagactttcaagaaatttattttattggccttttgaaaaaagcagctttagataaagtaagcagttctgctttcattttataatttatttctacttttgtttcattaatcttttcctccggcatgccttggattttgttgtgttactctttttctagaggctcgcattgtgtgtctggttcacttatgatcacgcttgcctacttttaagaatggaagaggggaggtggagggtggctgcacagtcgagggtgtgaggcagtcttgctctagccccaccatgccctcagcccgctgtggccacgctggttcctcaattgctggggcgtgcagtgtctgtaagggaggctactgatgccatccgaggaagatgtaaggtttcgtgtgggcagcgagagcctagcaggcatgtggggtgcccagcaaagggtaacagtggacagttgttgcctcattccacagagttttgattttttttttttttttaatggtcactccatcaacatcccccatggccagagcctgagctggtccccagagacacaggcattcagctgacagcctcgccttcacgctgctgctgttctcatgggggacaggcctcaggtggcaatgcacaaatcattagttaagggcagttgtgacagttaccaaggagtgtagtcccccgccccccgcccagtgaaaacagccctaaccaggggtggggacctttgggctctgacccgaagggtaggagaagctggaaggacagcattcctgtctgcgaaggcaggagcaaagctgccaggctatgaaggaaatggctggagcctgaagtcatgcaagctggggctggcagggacagggccaacttccaggcctgggggccaccatgaggattcaggacgtgacccccagggcacatgaaggccttccatctgtatttaagaaaagactttatcagacgagtatggtggctcacgcctgaatcttagcactttgggaggctgaggcaggtggatcacgaggtcaggagttcaataccagcctggccaatatggtaaaaccccatctctactaaaactacaaaaattagccaggcatggtggcgcacgcctgtagtcccagctactcgggaggctgaggcagaagaatcacttgaacccgggaggtggaggttacagtgagccaagatcgcgccactacactccagcctgggtgacagagtgagactccgtctcaaaaaaaccaaaagactttatcttatttcctatatgtttgtggtttcagtcctgatgtataatttgaccctagttagaatggttatctgaggaagtggcctgtacgatttctgcttttttaaatgtgtggctccctttcttcattgattaacgtatgattatttttataaatgttccatggcagtgggaagggattctctgtcacattccacatctggatcagttcctccccattttgttggtcaaatccgatctgccatatcctgtgtaatgacaagtgagttgcattctcaccgtcactcctggggtctctccgcttcccctgagctggctcagcagtctgctccatgtgttttgatgcagggtgacccattggtattcccgacactaacgcccccgtctgtggactgcttgctgcttgggcttcactgtgtctggtgttgacagtgcagacctaaaggtgtgcacacatgtgcacacacactccgctgtcttcttgtttgcactggacttaaatatctatgagggttattttcaactgctgaatttggaatgatttttatatcttttctgctttctgcccatgtacatgtgtttattttacactgttgtgattggtagttactatgtggggacacaattacttgggctgaaataatccacctgttgtggttggggtcctctggggcattccagggtgagaggttgtcactgccacctgggccatgtgggccggcaccagcattttgtggttacgaattctacagtcacaaatatctttgggcaaatccccttctatacctcaaggcagcttttggtttgcaaccccactggccagagggaagggccagtcacttggctctctcactgccctgcgccccagatggttctagggctgctgttttcccttggccctgccaacaccactgtttttacttctgctcattggctgagtgcagtggttcctggaagccagtggcacgtttccccgcgtagctcgcttatcccacagcacacacccaagggttctgttgctaacacgctgaattaattctttgctcatcttacagagtgtgttttgactgcccccatttctgaggccttgtaaggccagagctttgttgcttcatcggcaggttgggacttagatggccgtgaatgtttcctctctgctgctgcagtaagtaagtgcccgcaccatagtgtgtttggaggctgaagttgaagcgaggctgtgaggggagatggacgtgtgaggagggatgatggggcttgagcaaagtgggggagggggcaaaggcagttggcccaacacattccccacccctttgagaggtctgaggcctgcagacctggctcggagcccacctggtagtcctc

SEQ ID NO: 455585 - DNA, 5567 bp, Homo sapiens
tcccacaccacccgcctcccctgccgcctcctgccaccccctaggccaaggtaataatcatcctgaatcctgggtttatctctcacttgctttcttttcatataattttgcaaaagaatctgatctaaatgtgtttttcagagtatatatttatattttagctgttcttagagaaaatttattattttgcatgtaatcttatggaacattctcatttaataccatggtaagattcagcccttgcccaggggatagttcatttagtttgtttactggatagagctcatcatgtgactatacctcagttagtttatcagttctcccatccatggtgactaggttgcctctcagcctctcaacaacactgtttctcagtgtccttgtagaagtgatatgtgggtgttttctccttacacagagttgaaaggtgacgacaacaacgttggcactaccaatcccccaccctccagaggggtaaccagtgttaccagtttgctgtgtttcctgctacacctcgccttattcacttccatttgtatctgaaaaacgtgttgcatggtttcttttctatagaagtggtaaaatgctattgtgtcctgtacattattgattactttttttcatttaacagtagggagatgcctgggagtacacagagaactgccctcattgttttcaacttctgcactgtatgtctgtgagtttagccattctgctgttaatggaaatttacagtattctaatcttttgatattacaaacagttctgtgcgatcatcgtcatacacaaccccttgtgcacaatgcatgagtgtttctcagggtaggtaccaagaagtgaaattcctgggtcatagggcgtgagtccgacatttttctccattctgccctgttgccctccagagtgggtgtccagctttgcatacctaagtatgagagtatctgttgttcatatcctctacgacgctccatatatgaaacttaagtttctgctagttgccatctttgatctatcatgtatgcagtgacctactaagactgtaattggtacagtagattcttgtcatctgtgtgtgaatttagcattcatgggcttaatgctgacaaggcccccagggtccaagacatataatcatgtataattttgtcaaggtataattttttaaattgcttttgtcatgtgtctgctggtgatgcccaacccagtgctctgcacccaggtcacactgtggctttgtcctctgcttatgcctgcattgcagcaactgtcctgaagagaccaaaattatgcagatttaggtaagtccatggctaatgttattatattatgtgctattgtaatggatggggctgtggagtgtatgaatttataaatcactggtcttgtaattaaaattcaaacactatagaaaaaggccatgtagaagataaaagttcctctataatcccggacccctaagataactactaatgacaacttcatttatattccttcagacattttctggctgtggatgtactaaaatgtatcctattattctctgccctaaaatggaatcatacaaggtgtactgttatttttatggctctataacatgtcatattgtacgtgttggtatggtcattttaaccatttttctagtgatggctttgaggttatttgcagtttcctagccatctcaaagtgtgctgcggggatctcttttgcatccctctgggtgcagagctgaggcacccagaggcagtgtccagaggaggcagcatctgtaggtgtcttcacctgctctggctcttggcacatctggttggtgacactgttttgtgagatgggttgaaagcacgtgctgccaaaatagaataatgttggtcctctcctcatgtgccgtggaactggggtaaaactgcgtagtggctgcagctgcctgtccataccggaatcgagtataacacggtgcctggcttagcacaaaacagtagtgggtcctgcaggccccagagtctaattcctggtattctttcccctacacagattaaataaaccaaaaacaaactattctaggaaagcgtctgtgacatttgtaaaaagtggtatttaatgatcttttattcacttgtctgtttagtttgttgaaatcttaagtggcatcctggtctgggaaggagtgctgtctgcgcctgccctccgctgggcacagcgtggctgcttcaggggctaagcacacactttctgtcttctaaagggccgccacatgccaggagctcaggtgtgagcccggctctggctcttacctcatagggtcactcataggggcacagggagcagaacattgtacacagcgaggcaccacccggcttggcatctgcctcggtggacttactacctctagaaggaaatacctgagttcctctggcctcagctcctagagtgactggtgtgctgtccctgttactcttctgtcaaggtgacaactgtgtgacccatcatctgtgtgtcaaagcaaggccctgcctgggcctctgctcctgtccgggctgcacaaaggcaaatgctttgctagtttccttccagttaatttcacctatgaatagatgtgtgaaaactgttcaaagccatacctgcacatgtttgaacttcaaaccctgtgggtgattcagtggcatctttctctaacccccagcctcccttcccacagaggccaccgtcatggccagttgctgcagtttctttccagagaacctgtgtatgtgtaaagctgtacaggcgtgggtacaccacacagcctgtcttgcactgtggactgttgagttactagtacatctaggtaagcaccgcatatctgtattcatgtctgccttggtcttttcaacatctttgtggtagccgtgtttgaattacccattccctttttggggaaccattaagttgtttcagcaatttttactgtagataaggctataccgcatatctgtgtacatgggtttttatgtacatgggcaagtatatctgtgagagaaaagtttcctcaggaggaattctgggcacagcatgtgtaaatttctaaatatgatggacacccccagcttccacctcaaggaggttggtcccattgacatttccccacaccttcacccaggctgtgcccttaaacttggttatttgtcaatgtgagaagtggaaaatagtatttaattgtagtttggatttgtatttctattgggttgtatacttactgattaataataagagctctttacatattaaggaaattaacccttttcaaatacattcctatttctcactaatctttaagttttattgtaatattttgctctttagtttatatatatatgtatatatatatatatgtatatatatatatatacatatatatatacatatatatatactaattttcttttatggttcctggattttgtgagtagtttgaaaaggctaatccagctgaagattttgttgttgttgttaaaccccatgttttctcctaactctttttatttttattttggaggactctatctagacttaattttagcataacaagtgacagggttagttagcctgttgtccttacaccattttctggctaatacagctattaactattgatctgtctattcacgtgccagttcctaatggttttacatagtgtaatctgcacttcaaaatagcgaagggaagccctacctcattattctacttttccagaattctcctggctattccaggctgcatgtttaccttaaccttccctgtgatgtcttcatgccgttgtcttcttatgcaagaataaggtacgtctttccatccactcacgtctatttaatttgactttgcattacacagaaagctggtcttggtctgtctacctcggcatctagttgtcctcactgccccctagccgaccccaccccatctgactgactaccccatcacagagtacttttatttacgttttgctctgcctaatggttacttgatactgtcacgccgacagtgtccagttcagtggtctttgcagttgaaatgctcccgtacacactgtcttgttaaaaatgccagtaagttcatacaaacccagcttgcacccaaggtcacattcagagagcgtagggctgggatgggttgttttccaagcttctgccactgtgtggctagctcttcccactgggaagttctgtgtacccggaatgtcggagtggagtcctgttctagtgtccagcacctgaccctgtgcccaacccctcaacagcctattcctgctgtccacagcctgctggaactttttacaaaatatgttgccatgctggaccctgggcactggacataagccccctggcagcctttttcatgtcacccaaaggggtaattgtcctactggtggtctgtaagatgagttagggtgacttgctaatagacattgtaaatcttaatatttatgtatgtattttattattaccggttttccatttatgatggtaatattgtttcttctaagaatatttatttttccttctaaatattgagataaaattcatgcttttgaaatgttctattcagtggcttttagtatatttgctatgttgtgcaaccatcgacactatccatttctagaactttttcgtcatcccaaacagacgctctgtattcataaaaaaataacttcctacctgtctctccccctagtctttggtaacctttgttatactggtaaactttgttgtgctctctgtctgtgtgaatttgcctattctaggggcctcatataagtgtaatcatacagtatttgtctttttgggtctgtctgatttcacttagcgggttttcagggttcattcatgttgcagcatataacagtactgcgttcctttttctggctgaataatattccactgtatggatagaccccattttgtttattcacacatcatttggacatttggattatttctggtttttggctattatgaacaatggtgctatgaacagttgcgtacaagtttttgtgtgaacatatgttttcaattctctcattatatacctaggagtagaattactgggtcatatggtaactgtatatttttgaggaactgccaaactattttcccacgtccatgcaccatttcacattcccaccagtaagtaagagggttccaatttctgcgcattcttgccaacactagttattatctgactttctggttataatcattctaatgagtgtgaagtagcctctggtgtcatttggatttgcatttctctgatgagtgatgctatcaagcacctttgctggtgctgttggccatatgtgtatgttccctggagaagtgtctgtgctgagccttggcccactttttaattaggcgtttgtctttttattactgagttgtaagagttctttatatattctggattctagacccttatcagatacatggtttgcaaatattttctcccattctgtgggttcaagtgatcctcgtgcctcagcctcctgagaagctggtattacagacgtgcaccaccatgcctgactaattttgtcgacc

SEQ ID NO: 455586 - DNA, 5002 bp, Homo sapiens
aggtgatctagaggttcccactctacactaatacatataaaaaaggtaattaagataatataactttgaaaaactgacttataatgaaatagaaatatttaatagcccagtaaccctggaagaacctgaaaaagttttcaaggctgggcacagtggctcacgcttgtaatcccagcactttgggagactgaggtgggtggatcatatgaggaggctaggagttcgaggtcagcctggccagcatagcgaaaacttgtctctactaaaaatacaaaaattagtcaggcatggtggtgcacgtctgtaataccagcttctcaggaggctgaggcacgaggatcacttgaacccaggaggaggaggttgcagtgagctgagatcatgccagggcaacagaatgagactttgtttaaaaaaaaaaaaaagtgacttgatttaagggaaaaaatgactggctatattcagtcagatatggcaaaaagtctcaaggtgttaatgtgaatgattaaggtcttggggggggtgtcccctatcagactacaggtgtttagaggcacagaaaaaggtgcagttgggttcttaatgtgaaatgatgagaagcacaactccagtgtgtctctttgtgtagaatgtcagcagacaccccctgctagatgtgctggatcatgggaaagcatttccatttgttactagattgttcagaagttttaatttatgatgggtgtggtggctcatgcctgtagtcccagcactgtgggaggctgaggcaggaggatcatctgaggccaagagttcaagatcagcctgggcaacatagtgataccctatctcttaaaaaagaagaagtttttaaatttgaaataataataggtactggatttatgcaaatgtcttttctgcgtcttttgagatgagtatcaggtttttttttttccttttatcatctgatgatgaacttaatgtttccatttgtattaatggaatactaagtccctctgtgatttctgaaccaagctattcctaggcctgagttttattttgttgacacagaaataaattagaaggccaagcgtggtggcatgtgcctgtagtcctagttgctgaggtaagaggattgcttgagcccaggagttcaaggctgcagcaagctttgattgcgccactgcactccagccttggcgacagactaagacgctgtctcaaaaaaaaacaaaaacgacaaaaaaaaaacaaaacagaaaaaataaactaaggcaatgacagtccctggcaaatgctgggagggaggcagcagtggtcagggaaggtaaccctgaagcaggacttgtaaagcaaataagattgggaggccaaggtgggtggatcacgaggtcaggagttcgagaccagcctggccaacatagtgaaaccccgtctttactaaaaatacaaaaaaattagccaggtgtggtggtgggtgcctgtagtcccagctacttgggaggctgaggcaggagaatctcgaacccaggaggcggaggttacagtcagctgagaccgcaccattgcactccagcctgggtgacagagcaagattccgtctcaaaaaaaaaaaaaaaaaaaaaaaaccaagaagaaaaggaatgaattagaacttcttctgcttggacttaagggcatcatcaggcaggttttgggtaggatagcaggggaggcagagacatagtcggggtcagtggtcatgagtgtggctttgagcccaaaaacttggtttctgttccctactttgccactcagtagtgcatgactttggccaaatttcttaaattcatgaagcaagtttccgggtgaatgaaatggggataaaaatagtgttcaaacctatccgttggtttgtgtgaaactgaaatgaatagtatcgtgcaggtacttgtgagcaaggggagctgctgtttcctgtccctttatgatgggaaatatctagacaagttcccaaccctctgcactgcaggctgcatggcacggagggtcttgtaacaccagctggggctggccttcttttaggagcttcagtggttctgaaaacttttatttgtttgtttgttttagtagatgtggggtctttctgtgttgcccggactggtctcaaacttctggactcaagtgatcctcccccgctcaacctcccaaagtgttgggattacaggtgtgagccactgtgcccagccttgaaaactttttcaggttcttccagggttactgggctattaaatatttctatttcattataagtcagtttttcaaagttatattatcttaattaccttttttatatgtattagtgtagagtagcattttatattttgatatcctccttatgcatagtttttcactttttattcctagtttttcgtttttaataagactttcaagaaatttattttattggccttttgaaaaaagcagctttagataaagtaagcagttctgctttcattttataatttatttctacttttgtttcattaatcttttcctccggcatgccttggattttgttgtgttactctttttctagaggctcgcattgtgtgtctggttcacttatgatcacgcttgcctacttttaagaatggaagaggggaggtggagggtggctgcacagtcgagggtgtgaggcagtcttgctctagccccaccatgccctcagcccgctgtggccacgctggttcctcaattgctggggcgtgcagtgtctgtaagggaggctactgatgccatccgaggaagatgtaaggtttcgtgtgggcagcgagagcctagcaggcatgtggggtgcccagcaaagggtaacagtggacagttgttgcctcattccacagagttttgattttttttttttttttaatggtcactccatcaacatcccccatggccagagcctgagctggtccccagagacacaggcattcagctgacagcctcgccttcacgctgctgctgttctcatgggggacaggcctcaggtggcaatgcacaaatcattagttaagggcagttgtgacagttaccaaggagtgtagtcccccgccccccgcccagtgaaaacagccctaaccaggggtggggacctttgggctctgacccgaagggtaggagaagctggaaggacagcattcctgtctgcgaaggcaggagcaaagctgccaggctatgaaggaaatggctggagcctgaagtcatgcaagctggggctggcagggacagggccaacttccaggcctgggggccaccatgaggattcaggacgtgacccccagggcacatgaaggccttccatctgtatttaagaaaagactttatcagacgagtatggtggctcacgcctgaatcttagcactttgggaggctgaggcaggtggatcacgaggtcaggagttcaataccagcctggccaatatggtaaaaccccatctctactaaaactacaaaaattagccaggcatggtggcgcacgcctgtagtcccagctactcgggaggctgaggcagaagaatcacttgaacccgggaggtggaggttacagtgagccaagatcgcgccactacactccagcctgggtgacagagtgagactccgtctcaaaaaaaccaaaagactttatcttatttcctatatgtttgtggtttcagtcctgatgtataatttgaccctagttagaatggttatctgaggaagtggcctgtacgatttctgcttttttaaatgtgtggctccctttcttcattgattaacgtatgattatttttataaatgttccatggcagtgggaagggattctctgtcacattccacatctggatcagttcctccccattttgttggtcaaatccgatctgccatatcctgtgtaatgacaagtgagttgcattctcaccgtcactcctggggtctctccgcttcccctgagctggctcagcagtctgctccatgtgttttgatgcagggtgacccattggtattcccgacactaacgcccccgtctgtggactgcttgctgcttgggcttcactgtgtctggtgttgacagtgcagacctaaaggtgtgcacacatgtgcacacacactccgctgtcttcttgtttgcactggacttaaatatctatgagggttattttcaactgctgaatttggaatgatttttatatcttttctgctttctgcccatgtacatgtgtttattttacactgttgtgattggtagttactatgtggggacacaattacttgggctgaaataatccacctgttgtggttggggtcctctggggcattccagggtgagaggttgtcactgccacctgggccatgtgggccggcaccagcattttgtggttacgaattctacagtcacaaatatctttgggcaaatccccttctatacctcaaggcagcttttggtttgcaaccccactggccagagggaagggccagtcacttggctctctcactgccctgcgccccagatggttctagggctgctgttttcccttggccctgccaacaccactgtttttacttctgctcattggctgagtgcagtggttcctggaagccagtggcacgtttccccgcgtagctcgcttatcccacagcacacacccaagggttctgttgctaacacgctgaattaattctttgctcatcttacagagtgtgttttgactgcccccatttctgaggccttgtaaggccagagctttgttgcttcatcggcaggttgggacttagatggccgtgaatgtttcctctctgctgctgcagtaagtaagtgcccgcaccatagtgtgtttggaggctgaagttgaagcgaggctgtgaggggagatggacgtgtgaggagggatgatggggcttgagcaaagtgggggagggggcaaaggcagttggcccaacacattccccacccctttgagaggtctgaggcctgcagacctggctcggagcccacctggtagtcctc

SEQ ID NO: 455587 - DNA, 4927 bp, Homo sapiens
  misc_feature (211)..(211): n is a, c, g, or t
  misc_feature (229)..(229): n is a, c, g, or t
  misc_feature (302)..(302): n is a, c, g, or t
gatccacccacctcagcctcccacagtgctgggactacaggcatgaggatcatctgaggccaagagttcaagatcagcctgggcaacatagtgataccctatctcttaaaaaagaagaagtttttaaatttgaaataataataggtactggatttatgcaaatgtcttttctgcgtcttttgagatgagtatcaggtttttttttttcctnttatcatctgatgatgancttaatgtttccatttgtattaatgggaatactaagtccctctgtgattttctgaacccaagctatttcctanggcctgagttttatttcagaatgagactttgtttaaaaaaaaaaaaaagtgacttgatttaagggaaaaaatgactggctatattcagtcagatatggcaaaaagtctcaaggtgttaatgtgaatgattaaggtcttggggggggtgtcccctatcagactacaggtgtttagaggcacagaaaaaggtgcagttgggttcttaatgtgaaatgatgagaagcacaactccagtgtgtctctttgtgtagaatgtcagcagacaccccctgctagatgtgctggatcatgggaaagcatttccatttgttactagattgttcagaagttttaatttatgatgggtgtggtggctcatgcctgtagtcccagcactgtgggaggctgaggcaggaggatcatctgaggccaagagttcaagatcagcctgggcaacatagtgataccctatctcttaaaaaagaagaagtttttaaatttgaaataataataggtactggatttatgcaaatgtcttttctgcgtcttttgagatgagtatcaggtttttttttttccttttatcatctgatgatgaacttaatgtttccatttgtattaatggaatactaagtccctctgtgatttctgaaccaagctattcctaggcctgagttttattttgttgacacagaaataaattagaaggccaagcgtggtggcatgtgcctgtagtcctagttgctgaggtaagaggattgcttgagcccaggagttcaaggctgcagcaagctttgattgcgccactgcactccagccttggcgacagactaagacgctgtctcaaaaaaaaacaaaaacgacaaaaaaaaaacaaaacagaaaaaataaactaaggcaatgacagtccctggcaaatgctgggagggaggcagcagtggtcagggaaggtaaccctgaagcaggacttgtaaagcaaataagattgggaggccaaggtgggtggatcacgaggtcaggagttcgagaccagcctggccaacatagtgaaaccccgtctttactaaaaatacaaaaaaattagccaggtgtggtggtgggtgcctgtagtcccagctacttgggaggctgaggcaggagaatctcgaacccaggaggcggaggttacagtcagctgagaccgcaccattgcactccagcctgggtgacagagcaagattccgtctcaaaaaaaaaaaaaaaaaaaaaaaaccaagaagaaaaggaatgaattagaacttcttctgcttggacttaagggcatcatcaggcaggttttgggtaggatagcaggggaggcagagacatagtcggggtcagtggtcatgagtgtggctttgagcccaaaaacttggtttctgttccctactttgccactcagtagtgcatgactttggccaaatttcttaaattcatgaagcaagtttccgggtgaatgaaatggggataaaaatagtgttcaaacctatccgttggtttgtgtgaaactgaaatgaatagtatcgtgcaggtacttgtgagcaaggggagctgctgtttcctgtccctttatgatgggaaatatctagacaagttcccaaccctctgcactgcaggctgcatggcacggagggtcttgtaacaccagctggggctggccttcttttaggagcttcagtggttctgaaaacttttatttgtttgtttgttttagtagatgtggggtctttctgtgttgcccggactggtctcaaacttctggactcaagtgatcctcccccgctcaacctcccaaagtgttgggattacaggtgtgagccactgtgcccagccttgaaaactttttcaggttcttccagggttactgggctattaaatatttctatttcattataagtcagtttttcaaagttatattatcttaattaccttttttatatgtattagtgtagagtagcattttatattttgatatcctccttatgcatagtttttcactttttattcctagtttttcgtttttaataagactttcaagaaatttattttattggccttttgaaaaaagcagctttagataaagtaagcagttctgctttcattttataatttatttctacttttgtttcattaatcttttcctccggcatgccttggattttgttgtgttactctttttctagaggctcgcattgtgtgtctggttcacttatgatcacgcttgcctacttttaagaatggaagaggggaggtggagggtggctgcacagtcgagggtgtgaggcagtcttgctctagccccaccatgccctcagcccgctgtggccacgctggttcctcaattgctggggcgtgcagtgtctgtaagggaggctactgatgccatccgaggaagatgtaaggtttcgtgtgggcagcgagagcctagcaggcatgtggggtgcccagcaaagggtaacagtggacagttgttgcctcattccacagagttttgattttttttttttttttaatggtcactccatcaacatcccccatggccagagcctgagctggtccccagagacacaggcattcagctgacagcctcgccttcacgctgctgctgttctcatgggggacaggcctcaggtggcaatgcacaaatcattagttaagggcagttgtgacagttaccaaggagtgtagtcccccgccccccgcccagtgaaaacagccctaaccaggggtggggacctttgggctctgacccgaagggtaggagaagctggaaggacagcattcctgtctgcgaaggcaggagcaaagctgccaggctatgaaggaaatggctggagcctgaagtcatgcaagctggggctggcagggacagggccaacttccaggcctgggggccaccatgaggattcaggacgtgacccccagggcacatgaaggccttccatctgtatttaagaaaagactttatcagacgagtatggtggctcacgcctgaatcttagcactttgggaggctgaggcaggtggatcacgaggtcaggagttcaataccagcctggccaatatggtaaaaccccatctctactaaaactacaaaaattagccaggcatggtggcgcacgcctgtagtcccagctactcgggaggctgaggcagaagaatcacttgaacccgggaggtggaggttacagtgagccaagatcgcgccactacactccagcctgggtgacagagtgagactccgtctcaaaaaaaccaaaagactttatcttatttcctatatgtttgtggtttcagtcctgatgtataatttgaccctagttagaatggttatctgaggaagtggcctgtacgatttctgcttttttaaatgtgtggctccctttcttcattgattaacgtatgattatttttataaatgttccatggcagtgggaagggattctctgtcacattccacatctggatcagttcctccccattttgttggtcaaatccgatctgccatatcctgtgtaatgacaagtgagttgcattctcaccgtcactcctggggtctctccgcttcccctgagctggctcagcagtctgctccatgtgttttgatgcagggtgacccattggtattcccgacactaacgcccccgtctgtggactgcttgctgcttgggcttcactgtgtctggtgttgacagtgcagacctaaaggtgtgcacacatgtgcacacacactccgctgtcttcttgtttgcactggacttaaatatctatgagggttattttcaactgctgaatttggaatgatttttatatcttttctgctttctgcccatgtacatgtgtttattttacactgttgtgattggtagttactatgtggggacacaattacttgggctgaaataatccacctgttgtggttggggtcctctggggcattccagggtgagaggttgtcactgccacctgggccatgtgggccggcaccagcattttgtggttacgaattctacagtcacaaatatctttgggcaaatccccttctatacctcaaggcagcttttggtttgcaaccccactggccagagggaagggccagtcacttggctctctcactgccctgcgccccagatggttctagggctgctgttttcccttggccctgccaacaccactgtttttacttctgctcattggctgagtgcagtggttcctggaagccagtggcacgtttccccgcgtagctcgcttatcccacagcacacacccaagggttctgttgctaacacgctgaattaattctttgctcatcttacagagtgtgttttgactgcccccatttctgaggccttgtaaggccagagctttgttgcttcatcggcaggttgggacttagatggccgtgaatgtttcctctctgctgctgcagtaagtaagtgcccgcaccatagtgtgtttggaggctgaagttgaagcgaggctgtgaggggagatggacgtgtgaggagggatgatggggcttgagcaaagtgggggagggggcaaaggcagttggcccaacacattccccacccctttgagaggtctgaggcctgcagacctggctcggagcccacctggtagtcctc

SEQ ID NO: 455588 - DNA, 4749 bp, Homo sapiens
aaaaggtgcagttgggttcttaatgtgaaatgatgagaagcacaactccagtgtgtctctttgtgtagaatgtcagcagacaccccctgctagatgtgctggatcatgggaaagcatttccatttgttactagattgttccagaatgagactttgtttaaaaaaaaaaaaaagtgacttgatttaagggaaaaaatgactggctatattcagtcagatatggcaaaaagtctcaaggtgttaatgtgaatgattaaggtcttggggggggtgtcccctatcagactacaggtgtttagaggcacagaaaaaggtgcagttgggttcttaatgtgaaatgatgagaagcacaactccagtgtgtctctttgtgtagaatgtcagcagacaccccctgctagatgtgctggatcatgggaaagcatttccatttgttactagattgttcagaagttttaatttatgatgggtgtggtggctcatgcctgtagtcccagcactgtgggaggctgaggcaggaggatcatctgaggccaagagttcaagatcagcctgggcaacatagtgataccctatctcttaaaaaagaagaagtttttaaatttgaaataataataggtactggatttatgcaaatgtcttttctgcgtcttttgagatgagtatcaggtttttttttttccttttatcatctgatgatgaacttaatgtttccatttgtattaatggaatactaagtccctctgtgatttctgaaccaagctattcctaggcctgagttttattttgttgacacagaaataaattagaaggccaagcgtggtggcatgtgcctgtagtcctagttgctgaggtaagaggattgcttgagcccaggagttcaaggctgcagcaagctttgattgcgccactgcactccagccttggcgacagactaagacgctgtctcaaaaaaaaacaaaaacgacaaaaaaaaaacaaaacagaaaaaataaactaaggcaatgacagtccctggcaaatgctgggagggaggcagcagtggtcagggaaggtaaccctgaagcaggacttgtaaagcaaataagattgggaggccaaggtgggtggatcacgaggtcaggagttcgagaccagcctggccaacatagtgaaaccccgtctttactaaaaatacaaaaaaattagccaggtgtggtggtgggtgcctgtagtcccagctacttgggaggctgaggcaggagaatctcgaacccaggaggcggaggttacagtcagctgagaccgcaccattgcactccagcctgggtgacagagcaagattccgtctcaaaaaaaaaaaaaaaaaaaaaaaaccaagaagaaaaggaatgaattagaacttcttctgcttggacttaagggcatcatcaggcaggttttgggtaggatagcaggggaggcagagacatagtcggggtcagtggtcatgagtgtggctttgagcccaaaaacttggtttctgttccctactttgccactcagtagtgcatgactttggccaaatttcttaaattcatgaagcaagtttccgggtgaatgaaatggggataaaaatagtgttcaaacctatccgttggtttgtgtgaaactgaaatgaatagtatcgtgcaggtacttgtgagcaaggggagctgctgtttcctgtccctttatgatgggaaatatctagacaagttcccaaccctctgcactgcaggctgcatggcacggagggtcttgtaacaccagctggggctggccttcttttaggagcttcagtggttctgaaaacttttatttgtttgtttgttttagtagatgtggggtctttctgtgttgcccggactggtctcaaacttctggactcaagtgatcctcccccgctcaacctcccaaagtgttgggattacaggtgtgagccactgtgcccagccttgaaaactttttcaggttcttccagggttactgggctattaaatatttctatttcattataagtcagtttttcaaagttatattatcttaattaccttttttatatgtattagtgtagagtagcattttatattttgatatcctccttatgcatagtttttcactttttattcctagtttttcgtttttaataagactttcaagaaatttattttattggccttttgaaaaaagcagctttagataaagtaagcagttctgctttcattttataatttatttctacttttgtttcattaatcttttcctccggcatgccttggattttgttgtgttactctttttctagaggctcgcattgtgtgtctggttcacttatgatcacgcttgcctacttttaagaatggaagaggggaggtggagggtggctgcacagtcgagggtgtgaggcagtcttgctctagccccaccatgccctcagcccgctgtggccacgctggttcctcaattgctggggcgtgcagtgtctgtaagggaggctactgatgccatccgaggaagatgtaaggtttcgtgtgggcagcgagagcctagcaggcatgtggggtgcccagcaaagggtaacagtggacagttgttgcctcattccacagagttttgattttttttttttttttaatggtcactccatcaacatcccccatggccagagcctgagctggtccccagagacacaggcattcagctgacagcctcgccttcacgctgctgctgttctcatgggggacaggcctcaggtggcaatgcacaaatcattagttaagggcagttgtgacagttaccaaggagtgtagtcccccgccccccgcccagtgaaaacagccctaaccaggggtggggacctttgggctctgacccgaagggtaggagaagctggaaggacagcattcctgtctgcgaaggcaggagcaaagctgccaggctatgaaggaaatggctggagcctgaagtcatgcaagctggggctggcagggacagggccaacttccaggcctgggggccaccatgaggattcaggacgtgacccccagggcacatgaaggccttccatctgtatttaagaaaagactttatcagacgagtatggtggctcacgcctgaatcttagcactttgggaggctgaggcaggtggatcacgaggtcaggagttcaataccagcctggccaatatggtaaaaccccatctctactaaaactacaaaaattagccaggcatggtggcgcacgcctgtagtcccagctactcgggaggctgaggcagaagaatcacttgaacccgggaggtggaggttacagtgagccaagatcgcgccactacactccagcctgggtgacagagtgagactccgtctcaaaaaaaccaaaagactttatcttatttcctatatgtttgtggtttcagtcctgatgtataatttgaccctagttagaatggttatctgaggaagtggcctgtacgatttctgcttttttaaatgtgtggctccctttcttcattgattaacgtatgattatttttataaatgttccatggcagtgggaagggattctctgtcacattccacatctggatcagttcctccccattttgttggtcaaatccgatctgccatatcctgtgtaatgacaagtgagttgcattctcaccgtcactcctggggtctctccgcttcccctgagctggctcagcagtctgctccatgtgttttgatgcagggtgacccattggtattcccgacactaacgcccccgtctgtggactgcttgctgcttgggcttcactgtgtctggtgttgacagtgcagacctaaaggtgtgcacacatgtgcacacacactccgctgtcttcttgtttgcactggacttaaatatctatgagggttattttcaactgctgaatttggaatgatttttatatcttttctgctttctgcccatgtacatgtgtttattttacactgttgtgattggtagttactatgtggggacacaattacttgggctgaaataatccacctgttgtggttggggtcctctggggcattccagggtgagaggttgtcactgccacctgggccatgtgggccggcaccagcattttgtggttacgaattctacagtcacaaatatctttgggcaaatccccttctatacctcaaggcagcttttggtttgcaaccccactggccagagggaagggccagtcacttggctctctcactgccctgcgccccagatggttctagggctgctgttttcccttggccctgccaacaccactgtttttacttctgctcattggctgagtgcagtggttcctggaagccagtggcacgtttccccgcgtagctcgcttatcccacagcacacacccaagggttctgttgctaacacgctgaattaattctttgctcatcttacagagtgtgttttgactgcccccatttctgaggccttgtaaggccagagctttgttgcttcatcggcaggttgggacttagatggccgtgaatgtttcctctctgctgctgcagtaagtaagtgcccgcaccatagtgtgtttggaggctgaagttgaagcgaggctgtgaggggagatggacgtgtgaggagggatgatggggcttgagcaaagtgggggagggggcaaaggcagttggcccaacacattccccacccctttgagaggtctgaggcctgcagacctggctcggagcccacctggtagtcctc

SEQ ID NO: 455589 - DNA, 4695 bp, Homo sapiens
aaaaggtgcagttgggttcttaatgtgaaatgatgagaagcacaactccagtgtgtctctttgtgtagaatgtcagcagacaccccctgctagatgtgctggatcatgggaaagcatttccatttgttactagattgttccagaatgagactttgtttaaaaaaaaaaaaaagtgacttgatttaagggaaaaaatgactggctatattcagtcagatatggcaaaaagtctcaaggtgttaatgtgaatgattaaggtcttggggggggtgtcccctatcagactacaggtgtttagaggcacagagtctctttgtgtagaatgtcagcagacaccccctgctagatgtgctggatcatgggaaagcatttccatttgttactagattgttcagaagttttaatttatgatgggtgtggtggctcatgcctgtagtcccagcactgtgggaggctgaggcaggaggatcatctgaggccaagagttcaagatcagcctgggcaacatagtgataccctatctcttaaaaaagaagaagtttttaaatttgaaataataataggtactggatttatgcaaatgtcttttctgcgtcttttgagatgagtatcaggtttttttttttccttttatcatctgatgatgaacttaatgtttccatttgtattaatggaatactaagtccctctgtgatttctgaaccaagctattcctaggcctgagttttattttgttgacacagaaataaattagaaggccaagcgtggtggcatgtgcctgtagtcctagttgctgaggtaagaggattgcttgagcccaggagttcaaggctgcagcaagctttgattgcgccactgcactccagccttggcgacagactaagacgctgtctcaaaaaaaaacaaaaacgacaaaaaaaaaacaaaacagaaaaaataaactaaggcaatgacagtccctggcaaatgctgggagggaggcagcagtggtcagggaaggtaaccctgaagcaggacttgtaaagcaaataagattgggaggccaaggtgggtggatcacgaggtcaggagttcgagaccagcctggccaacatagtgaaaccccgtctttactaaaaatacaaaaaaattagccaggtgtggtggtgggtgcctgtagtcccagctacttgggaggctgaggcaggagaatctcgaacccaggaggcggaggttacagtcagctgagaccgcaccattgcactccagcctgggtgacagagcaagattccgtctcaaaaaaaaaaaaaaaaaaaaaaaaccaagaagaaaaggaatgaattagaacttcttctgcttggacttaagggcatcatcaggcaggttttgggtaggatagcaggggaggcagagacatagtcggggtcagtggtcatgagtgtggctttgagcccaaaaacttggtttctgttccctactttgccactcagtagtgcatgactttggccaaatttcttaaattcatgaagcaagtttccgggtgaatgaaatggggataaaaatagtgttcaaacctatccgttggtttgtgtgaaactgaaatgaatagtatcgtgcaggtacttgtgagcaaggggagctgctgtttcctgtccctttatgatgggaaatatctagacaagttcccaaccctctgcactgcaggctgcatggcacggagggtcttgtaacaccagctggggctggccttcttttaggagcttcagtggttctgaaaacttttatttgtttgtttgttttagtagatgtggggtctttctgtgttgcccggactggtctcaaacttctggactcaagtgatcctcccccgctcaacctcccaaagtgttgggattacaggtgtgagccactgtgcccagccttgaaaactttttcaggttcttccagggttactgggctattaaatatttctatttcattataagtcagtttttcaaagttatattatcttaattaccttttttatatgtattagtgtagagtagcattttatattttgatatcctccttatgcatagtttttcactttttattcctagtttttcgtttttaataagactttcaagaaatttattttattggccttttgaaaaaagcagctttagataaagtaagcagttctgctttcattttataatttatttctacttttgtttcattaatcttttcctccggcatgccttggattttgttgtgttactctttttctagaggctcgcattgtgtgtctggttcacttatgatcacgcttgcctacttttaagaatggaagaggggaggtggagggtggctgcacagtcgagggtgtgaggcagtcttgctctagccccaccatgccctcagcccgctgtggccacgctggttcctcaattgctggggcgtgcagtgtctgtaagggaggctactgatgccatccgaggaagatgtaaggtttcgtgtgggcagcgagagcctagcaggcatgtggggtgcccagcaaagggtaacagtggacagttgttgcctcattccacagagttttgattttttttttttttttaatggtcactccatcaacatcccccatggccagagcctgagctggtccccagagacacaggcattcagctgacagcctcgccttcacgctgctgctgttctcatgggggacaggcctcaggtggcaatgcacaaatcattagttaagggcagttgtgacagttaccaaggagtgtagtcccccgccccccgcccagtgaaaacagccctaaccaggggtggggacctttgggctctgacccgaagggtaggagaagctggaaggacagcattcctgtctgcgaaggcaggagcaaagctgccaggctatgaaggaaatggctggagcctgaagtcatgcaagctggggctggcagggacagggccaacttccaggcctgggggccaccatgaggattcaggacgtgacccccagggcacatgaaggccttccatctgtatttaagaaaagactttatcagacgagtatggtggctcacgcctgaatcttagcactttgggaggctgaggcaggtggatcacgaggtcaggagttcaataccagcctggccaatatggtaaaaccccatctctactaaaactacaaaaattagccaggcatggtggcgcacgcctgtagtcccagctactcgggaggctgaggcagaagaatcacttgaacccgggaggtggaggttacagtgagccaagatcgcgccactacactccagcctgggtgacagagtgagactccgtctcaaaaaaaccaaaagactttatcttatttcctatatgtttgtggtttcagtcctgatgtataatttgaccctagttagaatggttatctgaggaagtggcctgtacgatttctgcttttttaaatgtgtggctccctttcttcattgattaacgtatgattatttttataaatgttccatggcagtgggaagggattctctgtcacattccacatctggatcagttcctccccattttgttggtcaaatccgatctgccatatcctgtgtaatgacaagtgagttgcattctcaccgtcactcctggggtctctccgcttcccctgagctggctcagcagtctgctccatgtgttttgatgcagggtgacccattggtattcccgacactaacgcccccgtctgtggactgcttgctgcttgggcttcactgtgtctggtgttgacagtgcagacctaaaggtgtgcacacatgtgcacacacactccgctgtcttcttgtttgcactggacttaaatatctatgagggttattttcaactgctgaatttggaatgatttttatatcttttctgctttctgcccatgtacatgtgtttattttacactgttgtgattggtagttactatgtggggacacaattacttgggctgaaataatccacctgttgtggttggggtcctctggggcattccagggtgagaggttgtcactgccacctgggccatgtgggccggcaccagcattttgtggttacgaattctacagtcacaaatatctttgggcaaatccccttctatacctcaaggcagcttttggtttgcaaccccactggccagagggaagggccagtcacttggctctctcactgccctgcgccccagatggttctagggctgctgttttcccttggccctgccaacaccactgtttttacttctgctcattggctgagtgcagtggttcctggaagccagtggcacgtttccccgcgtagctcgcttatcccacagcacacacccaagggttctgttgctaacacgctgaattaattctttgctcatcttacagagtgtgttttgactgcccccatttctgaggccttgtaaggccagagctttgttgcttcatcggcaggttgggacttagatggccgtgaatgtttcctctctgctgctgcagtaagtaagtgcccgcaccatagtgtgtttggaggctgaagttgaagcgaggctgtgaggggagatggacgtgtgaggagggatgatggggcttgagcaaagtgggggagggggcaaaggcagttggcccaacacattccccacccctttgagaggtctgaggcctgcagacctggctcggagcccacctggtagtcctc

SEQ ID NO: 455590 - DNA, 4555 bp, Homo sapiens
  misc_feature (130)..(130): n is a, c, g, or t
ttgatgtctacattgaaggacaaggcagccactgggcagctccgggagggcgggaggcgtgactccttcatatcaggccatctggaggagcaccagatttccctcttgtgaaacaaccccccacagtggngatttaatggtcaccacacaagccccaaaaaaccaggccctgcagagccatgacttcacaggggagaaaaccagcccaagaggctgccctcacccaacacttagctctaagtccagactcttaaaggttctgttaaagatctgcggccaggcgcagtggctcacattcccagcactgtgggaggctgaggcaggaggatcatctgaggccaagagttcaagatcagcctgggcaacatagtgataccctatctcttaaaaaagaagaagtttttaaatttgaaataataataggtactggatttatgcaaatgtcttttctgcgtcttttgagatgagtatcaggtttttttttttccttttatcatctgatgatgaacttaatgtttccatttgtattaatggaatactaagtccctctgtgatttctgaaccaagctattcctaggcctgagttttattttgttgacacagaaataaattagaaggccaagcgtggtggcatgtgcctgtagtcctagttgctgaggtaagaggattgcttgagcccaggagttcaaggctgcagcaagctttgattgcgccactgcactccagccttggcgacagactaagacgctgtctcaaaaaaaaacaaaaacgacaaaaaaaaaacaaaacagaaaaaataaactaaggcaatgacagtccctggcaaatgctgggagggaggcagcagtggtcagggaaggtaaccctgaagcaggacttgtaaagcaaataagattgggaggccaaggtgggtggatcacgaggtcaggagttcgagaccagcctggccaacatagtgaaaccccgtctttactaaaaatacaaaaaaattagccaggtgtggtggtgggtgcctgtagtcccagctacttgggaggctgaggcaggagaatctcgaacccaggaggcggaggttacagtcagctgagaccgcaccattgcactccagcctgggtgacagagcaagattccgtctcaaaaaaaaaaaaaaaaaaaaaaaaccaagaagaaaaggaatgaattagaacttcttctgcttggacttaagggcatcatcaggcaggttttgggtaggatagcaggggaggcagagacatagtcggggtcagtggtcatgagtgtggctttgagcccaaaaacttggtttctgttccctactttgccactcagtagtgcatgactttggccaaatttcttaaattcatgaagcaagtttccgggtgaatgaaatggggataaaaatagtgttcaaacctatccgttggtttgtgtgaaactgaaatgaatagtatcgtgcaggtacttgtgagcaaggggagctgctgtttcctgtccctttatgatgggaaatatctagacaagttcccaaccctctgcactgcaggctgcatggcacggagggtcttgtaacaccagctggggctggccttcttttaggagcttcagtggttctgaaaacttttatttgtttgtttgttttagtagatgtggggtctttctgtgttgcccggactggtctcaaacttctggactcaagtgatcctcccccgctcaacctcccaaagtgttgggattacaggtgtgagccactgtgcccagccttgaaaactttttcaggttcttccagggttactgggctattaaatatttctatttcattataagtcagtttttcaaagttatattatcttaattaccttttttatatgtattagtgtagagtagcattttatattttgatatcctccttatgcatagtttttcactttttattcctagtttttcgtttttaataagactttcaagaaatttattttattggccttttgaaaaaagcagctttagataaagtaagcagttctgctttcattttataatttatttctacttttgtttcattaatcttttcctccggcatgccttggattttgttgtgttactctttttctagaggctcgcattgtgtgtctggttcacttatgatcacgcttgcctacttttaagaatggaagaggggaggtggagggtggctgcacagtcgagggtgtgaggcagtcttgctctagccccaccatgccctcagcccgctgtggccacgctggttcctcaattgctggggcgtgcagtgtctgtaagggaggctactgatgccatccgaggaagatgtaaggtttcgtgtgggcagcgagagcctagcaggcatgtggggtgcccagcaaagggtaacagtggacagttgttgcctcattccacagagttttgattttttttttttttttaatggtcactccatcaacatcccccatggccagagcctgagctggtccccagagacacaggcattcagctgacagcctcgccttcacgctgctgctgttctcatgggggacaggcctcaggtggcaatgcacaaatcattagttaagggcagttgtgacagttaccaaggagtgtagtcccccgccccccgcccagtgaaaacagccctaaccaggggtggggacctttgggctctgacccgaagggtaggagaagctggaaggacagcattcctgtctgcgaaggcaggagcaaagctgccaggctatgaaggaaatggctggagcctgaagtcatgcaagctggggctggcagggacagggccaacttccaggcctgggggccaccatgaggattcaggacgtgacccccagggcacatgaaggccttccatctgtatttaagaaaagactttatcagacgagtatggtggctcacgcctgaatcttagcactttgggaggctgaggcaggtggatcacgaggtcaggagttcaataccagcctggccaatatggtaaaaccccatctctactaaaactacaaaaattagccaggcatggtggcgcacgcctgtagtcccagctactcgggaggctgaggcagaagaatcacttgaacccgggaggtggaggttacagtgagccaagatcgcgccactacactccagcctgggtgacagagtgagactccgtctcaaaaaaaccaaaagactttatcttatttcctatatgtttgtggtttcagtcctgatgtataatttgaccctagttagaatggttatctgaggaagtggcctgtacgatttctgcttttttaaatgtgtggctccctttcttcattgattaacgtatgattatttttataaatgttccatggcagtgggaagggattctctgtcacattccacatctggatcagttcctccccattttgttggtcaaatccgatctgccatatcctgtgtaatgacaagtgagttgcattctcaccgtcactcctggggtctctccgcttcccctgagctggctcagcagtctgctccatgtgttttgatgcagggtgacccattggtattcccgacactaacgcccccgtctgtggactgcttgctgcttgggcttcactgtgtctggtgttgacagtgcagacctaaaggtgtgcacacatgtgcacacacactccgctgtcttcttgtttgcactggacttaaatatctatgagggttattttcaactgctgaatttggaatgatttttatatcttttctgctttctgcccatgtacatgtgtttattttacactgttgtgattggtagttactatgtggggacacaattacttgggctgaaataatccacctgttgtggttggggtcctctggggcattccagggtgagaggttgtcactgccacctgggccatgtgggccggcaccagcattttgtggttacgaattctacagtcacaaatatctttgggcaaatccccttctatacctcaaggcagcttttggtttgcaaccccactggccagagggaagggccagtcacttggctctctcactgccctgcgccccagatggttctagggctgctgttttcccttggccctgccaacaccactgtttttacttctgctcattggctgagtgcagtggttcctggaagccagtggcacgtttccccgcgtagctcgcttatcccacagcacacacccaagggttctgttgctaacacgctgaattaattctttgctcatcttacagagtgtgttttgactgcccccatttctgaggccttgtaaggccagagctttgttgcttcatcggcaggttgggacttagatggccgtgaatgtttcctctctgctgctgcagtaagtaagtgcccgcaccatagtgtgtttggaggctgaagttgaagcgaggctgtgaggggagatggacgtgtgaggagggatgatggggcttgagcaaagtgggggagggggcaaaggcagttggcccaacacattccccacccctttgagaggtctgaggcctgcagacctggctcggagcccacctggtagtcctc

SEQ ID NO: 455591 - DNA, 4683 bp, Homo sapiens
aaacaaaaggggctgggtgaggtggctcatacctgtaatcccagcaataaaagaaaaaaacagataaattggacttggtggaaaatttaaaactttcgtgcacaaaggacattataaataaagtaaaatgacaacctatggaatgggaaaaatattttcaaactgtgtatctgataacaggttgaaatccagaatatacaaataactcttacaatgcaacaaaaacaagcaacaatttttaaatgagcaaacagatattttttcaaaaagtgaaaagatacttaacatcattttcatgatttgcattagagaaatgcaaatcaaaaccacaatgagataccacttcacaactactagaacggctttatgataatcacaaaacaaaagtgggctttatgatgggtgtggtggctcatgcctgtagtcccagcactgtgggaggctgaggcaggaggatcatctgaggccaagagttcaagatcagcctgggcaacatagtgataccctatctcttaaaaaagaagaagtttttaaatttgaaataataataggtactggatttatgcaaatgtcttttctgcgtcttttgagatgagtatcaggtttttttttttccttttatcatctgatgatgaacttaatgtttccatttgtattaatggaatactaagtccctctgtgatttctgaaccaagctattcctaggcctgagttttattttgttgacacagaaataaattagaaggccaagcgtggtggcatgtgcctgtagtcctagttgctgaggtaagaggattgcttgagcccaggagttcaaggctgcagcaagctttgattgcgccactgcactccagccttggcgacagactaagacgctgtctcaaaaaaaaacaaaaacgacaaaaaaaaaacaaaacagaaaaaataaactaaggcaatgacagtccctggcaaatgctgggagggaggcagcagtggtcagggaaggtaaccctgaagcaggacttgtaaagcaaataagattgggaggccaaggtgggtggatcacgaggtcaggagttcgagaccagcctggccaacatagtgaaaccccgtctttactaaaaatacaaaaaaattagccaggtgtggtggtgggtgcctgtagtcccagctacttgggaggctgaggcaggagaatctcgaacccaggaggcggaggttacagtcagctgagaccgcaccattgcactccagcctgggtgacagagcaagattccgtctcaaaaaaaaaaaaaaaaaaaaaaaaccaagaagaaaaggaatgaattagaacttcttctgcttggacttaagggcatcatcaggcaggttttgggtaggatagcaggggaggcagagacatagtcggggtcagtggtcatgagtgtggctttgagcccaaaaacttggtttctgttccctactttgccactcagtagtgcatgactttggccaaatttcttaaattcatgaagcaagtttccgggtgaatgaaatggggataaaaatagtgttcaaacctatccgttggtttgtgtgaaactgaaatgaatagtatcgtgcaggtacttgtgagcaaggggagctgctgtttcctgtccctttatgatgggaaatatctagacaagttcccaaccctctgcactgcaggctgcatggcacggagggtcttgtaacaccagctggggctggccttcttttaggagcttcagtggttctgaaaacttttatttgtttgtttgttttagtagatgtggggtctttctgtgttgcccggactggtctcaaacttctggactcaagtgatcctcccccgctcaacctcccaaagtgttgggattacaggtgtgagccactgtgcccagccttgaaaactttttcaggttcttccagggttactgggctattaaatatttctatttcattataagtcagtttttcaaagttatattatcttaattaccttttttatatgtattagtgtagagtagcattttatattttgatatcctccttatgcatagtttttcactttttattcctagtttttcgtttttaataagactttcaagaaatttattttattggccttttgaaaaaagcagctttagataaagtaagcagttctgctttcattttataatttatttctacttttgtttcattaatcttttcctccggcatgccttggattttgttgtgttactctttttctagaggctcgcattgtgtgtctggttcacttatgatcacgcttgcctacttttaagaatggaagaggggaggtggagggtggctgcacagtcgagggtgtgaggcagtcttgctctagccccaccatgccctcagcccgctgtggccacgctggttcctcaattgctggggcgtgcagtgtctgtaagggaggctactgatgccatccgaggaagatgtaaggtttcgtgtgggcagcgagagcctagcaggcatgtggggtgcccagcaaagggtaacagtggacagttgttgcctcattccacagagttttgattttttttttttttttaatggtcactccatcaacatcccccatggccagagcctgagctggtccccagagacacaggcattcagctgacagcctcgccttcacgctgctgctgttctcatgggggacaggcctcaggtggcaatgcacaaatcattagttaagggcagttgtgacagttaccaaggagtgtagtcccccgccccccgcccagtgaaaacagccctaaccaggggtggggacctttgggctctgacccgaagggtaggagaagctggaaggacagcattcctgtctgcgaaggcaggagcaaagctgccaggctatgaaggaaatggctggagcctgaagtcatgcaagctggggctggcagggacagggccaacttccaggcctgggggccaccatgaggattcaggacgtgacccccagggcacatgaaggccttccatctgtatttaagaaaagactttatcagacgagtatggtggctcacgcctgaatcttagcactttgggaggctgaggcaggtggatcacgaggtcaggagttcaataccagcctggccaatatggtaaaaccccatctctactaaaactacaaaaattagccaggcatggtggcgcacgcctgtagtcccagctactcgggaggctgaggcagaagaatcacttgaacccgggaggtggaggttacagtgagccaagatcgcgccactacactccagcctgggtgacagagtgagactccgtctcaaaaaaaccaaaagactttatcttatttcctatatgtttgtggtttcagtcctgatgtataatttgaccctagttagaatggttatctgaggaagtggcctgtacgatttctgcttttttaaatgtgtggctccctttcttcattgattaacgtatgattatttttataaatgttccatggcagtgggaagggattctctgtcacattccacatctggatcagttcctccccattttgttggtcaaatccgatctgccatatcctgtgtaatgacaagtgagttgcattctcaccgtcactcctggggtctctccgcttcccctgagctggctcagcagtctgctccatgtgttttgatgcagggtgacccattggtattcccgacactaacgcccccgtctgtggactgcttgctgcttgggcttcactgtgtctggtgttgacagtgcagacctaaaggtgtgcacacatgtgcacacacactccgctgtcttcttgtttgcactggacttaaatatctatgagggttattttcaactgctgaatttggaatgatttttatatcttttctgctttctgcccatgtacatgtgtttattttacactgttgtgattggtagttactatgtggggacacaattacttgggctgaaataatccacctgttgtggttggggtcctctggggcattccagggtgagaggttgtcactgccacctgggccatgtgggccggcaccagcattttgtggttacgaattctacagtcacaaatatctttgggcaaatccccttctatacctcaaggcagcttttggtttgcaaccccactggccagagggaagggccagtcacttggctctctcactgccctgcgccccagatggttctagggctgctgttttcccttggccctgccaacaccactgtttttacttctgctcattggctgagtgcagtggttcctggaagccagtggcacgtttccccgcgtagctcgcttatcccacagcacacacccaagggttctgttgctaacacgctgaattaattctttgctcatcttacagagtgtgttttgactgcccccatttctgaggccttgtaaggccagagctttgttgcttcatcggcaggttgggacttagatggccgtgaatgtttcctctctgctgctgcagtaagtaagtgcccgcaccatagtgtgtttggaggctgaagttgaagcgaggctgtgaggggagatggacgtgtgaggagggatgatggggcttgagcaaagtgggggagggggcaaaggcagttggcccaacacattccccacccctttgagaggtctgaggcctgcagacctggctcggagcccacctggtagtcctc

SEQ ID NO: 455592 - DNA, 4291 bp, Homo sapiens
  misc_feature (24)..(24): n is a, c, g, or t
gcctactactactaaattcgcggncgcgtcgatcccagcactgtgggaggctgaggcaggaggatcatctgaggccaagagttcaagatcagcctgggcaacatagtgataccctatctcttaaaaaagaagaagtttttaaatttgaaataataataggtactggatttatgcaaatgtcttttctgcgtcttttgagatgagtatcaggtttttttttttccttttatcatctgatgatgaacttaatgtttccatttgtattaatggaatactaagtccctctgtgatttctgaaccaagctattcctaggcctgagttttattttgttgacacagaaataaattagaaggccaagcgtggtggcatgtgcctgtagtcctagttgctgaggtaagaggattgcttgagcccaggagttcaaggctgcagcaagctttgattgcgccactgcactccagccttggcgacagactaagacgctgtctcaaaaaaaaacaaaaacgacaaaaaaaaaacaaaacagaaaaaataaactaaggcaatgacagtccctggcaaatgctgggagggaggcagcagtggtcagggaaggtaaccctgaagcaggacttgtaaagcaaataagattgggaggccaaggtgggtggatcacgaggtcaggagttcgagaccagcctggccaacatagtgaaaccccgtctttactaaaaatacaaaaaaattagccaggtgtggtggtgggtgcctgtagtcccagctacttgggaggctgaggcaggagaatctcgaacccaggaggcggaggttacagtcagctgagaccgcaccattgcactccagcctgggtgacagagcaagattccgtctcaaaaaaaaaaaaaaaaaaaaaaaaccaagaagaaaaggaatgaattagaacttcttctgcttggacttaagggcatcatcaggcaggttttgggtaggatagcaggggaggcagagacatagtcggggtcagtggtcatgagtgtggctttgagcccaaaaacttggtttctgttccctactttgccactcagtagtgcatgactttggccaaatttcttaaattcatgaagcaagtttccgggtgaatgaaatggggataaaaatagtgttcaaacctatccgttggtttgtgtgaaactgaaatgaatagtatcgtgcaggtacttgtgagcaaggggagctgctgtttcctgtccctttatgatgggaaatatctagacaagttcccaaccctctgcactgcaggctgcatggcacggagggtcttgtaacaccagctggggctggccttcttttaggagcttcagtggttctgaaaacttttatttgtttgtttgttttagtagatgtggggtctttctgtgttgcccggactggtctcaaacttctggactcaagtgatcctcccccgctcaacctcccaaagtgttgggattacaggtgtgagccactgtgcccagccttgaaaactttttcaggttcttccagggttactgggctattaaatatttctatttcattataagtcagtttttcaaagttatattatcttaattaccttttttatatgtattagtgtagagtagcattttatattttgatatcctccttatgcatagtttttcactttttattcctagtttttcgtttttaataagactttcaagaaatttattttattggccttttgaaaaaagcagctttagataaagtaagcagttctgctttcattttataatttatttctacttttgtttcattaatcttttcctccggcatgccttggattttgttgtgttactctttttctagaggctcgcattgtgtgtctggttcacttatgatcacgcttgcctacttttaagaatggaagaggggaggtggagggtggctgcacagtcgagggtgtgaggcagtcttgctctagccccaccatgccctcagcccgctgtggccacgctggttcctcaattgctggggcgtgcagtgtctgtaagggaggctactgatgccatccgaggaagatgtaaggtttcgtgtgggcagcgagagcctagcaggcatgtggggtgcccagcaaagggtaacagtggacagttgttgcctcattccacagagttttgattttttttttttttttaatggtcactccatcaacatcccccatggccagagcctgagctggtccccagagacacaggcattcagctgacagcctcgccttcacgctgctgctgttctcatgggggacaggcctcaggtggcaatgcacaaatcattagttaagggcagttgtgacagttaccaaggagtgtagtcccccgccccccgcccagtgaaaacagccctaaccaggggtggggacctttgggctctgacccgaagggtaggagaagctggaaggacagcattcctgtctgcgaaggcaggagcaaagctgccaggctatgaaggaaatggctggagcctgaagtcatgcaagctggggctggcagggacagggccaacttccaggcctgggggccaccatgaggattcaggacgtgacccccagggcacatgaaggccttccatctgtatttaagaaaagactttatcagacgagtatggtggctcacgcctgaatcttagcactttgggaggctgaggcaggtggatcacgaggtcaggagttcaataccagcctggccaatatggtaaaaccccatctctactaaaactacaaaaattagccaggcatggtggcgcacgcctgtagtcccagctactcgggaggctgaggcagaagaatcacttgaacccgggaggtggaggttacagtgagccaagatcgcgccactacactccagcctgggtgacagagtgagactccgtctcaaaaaaaccaaaagactttatcttatttcctatatgtttgtggtttcagtcctgatgtataatttgaccctagttagaatggttatctgaggaagtggcctgtacgatttctgcttttttaaatgtgtggctccctttcttcattgattaacgtatgattatttttataaatgttccatggcagtgggaagggattctctgtcacattccacatctggatcagttcctccccattttgttggtcaaatccgatctgccatatcctgtgtaatgacaagtgagttgcattctcaccgtcactcctggggtctctccgcttcccctgagctggctcagcagtctgctccatgtgttttgatgcagggtgacccattggtattcccgacactaacgcccccgtctgtggactgcttgctgcttgggcttcactgtgtctggtgttgacagtgcagacctaaaggtgtgcacacatgtgcacacacactccgctgtcttcttgtttgcactggacttaaatatctatgagggttattttcaactgctgaatttggaatgatttttatatcttttctgctttctgcccatgtacatgtgtttattttacactgttgtgattggtagttactatgtggggacacaattacttgggctgaaataatccacctgttgtggttggggtcctctggggcattccagggtgagaggttgtcactgccacctgggccatgtgggccggcaccagcattttgtggttacgaattctacagtcacaaatatctttgggcaaatccccttctatacctcaaggcagcttttggtttgcaaccccactggccagagggaagggccagtcacttggctctctcactgccctgcgccccagatggttctagggctgctgttttcccttggccctgccaacaccactgtttttacttctgctcattggctgagtgcagtggttcctggaagccagtggcacgtttccccgcgtagctcgcttatcccacagcacacacccaagggttctgttgctaacacgctgaattaattctttgctcatcttacagagtgtgttttgactgcccccatttctgaggccttgtaaggccagagctttgttgcttcatcggcaggttgggacttagatggccgtgaatgtttcctctctgctgctgcagtaagtaagtgcccgcaccatagtgtgtttggaggctgaagttgaagcgaggctgtgaggggagatggacgtgtgaggagggatgatggggcttgagcaaagtgggggagggggcaaaggcagttggcccaacacattccccacccctttgagaggtctgaggcctgcagacctggctcggagcccacctggtagtcctc

SEQ ID NO: 455593 - DNA, 4152 bp, Homo sapiens
tcccacaccacccgcctcccctgccgcctcctgccaccccctaggccaaggtaataatcatcctgaatcctgggtttatctctcacttgctttcttttcatataattttgcaaaagaatctgatctaaatgtgtttttcagagtatatatttatattttagctgttcttagagaaaatttattattttgcatgtaatcttatggaacattctcatttaataccatggtaagattcagcccttgcccaggggatagttcatttagtttgtttactggatagagctcatcatgtgactatacctcagttagtttatcagttctcccatccatggtgactaggttgcctctcagcctctcaacaacactgtttctcagtgtccttgtagaagtgatatgtgggtgttttctccttacacagagttgaaaggtgacgacaacaacgttggcactaccaatcccccaccctccagaggggtaaccagtgttaccagtttgctgtgtttcctgctacacctcgccttattcacttccatttgtatctgaaaaacgtgttgcatggtttcttttctatagaagtggtaaaatgctattgtgtcctgtacattattgattactttttttcatttaacagtagggagatgcctgggagtacacagagaactgccctcattgttttcaacttctgcactgtatgtctgtgagtttagccattctgctgttaatggaaatttacagtattctaatcttttgatattacaaacagttctgtgcgatcatcgtcatacacaaccccttgtgcacaatgcatgagtgtttctcagggtaggtaccaagaagtgaaattcctgggtcatagggcgtgagtccgacatttttctccattctgccctgttgccctccagagtgggtgtccagctttgcatacctaagtatgagagtatctgttgttcatatcctctacgacgctccatatatgaaacttaagtttctgctagttgccatctttgatctatcatgtatgcagtgacctactaagactgtaattggtacagtagattcttgtcatctgtgtgtgaatttagcattcatgggcttaatgctgacaaggcccccagggtccaagacatataatcatgtataattttgtcaaggtataattttttaaattgcttttgtcatgtgtctgctggtgatgcccaacccagtgctctgcacccaggtcacactgtggctttgtcctctgcttatgcctgcattgcagcaactgtcctgaagagaccaaaattatgcagatttaggtaagtccatggctaatgttattatattatgtgctattgtaatggatggggctgtggagtgtatgaatttataaatcactggtcttgtaattaaaattcaaacactatagaaaaaggccatgtagaagataaaagttcctctataatcccggacccctaagataactactaatgacaacttcatttatattccttcagacattttctggctgtggatgtactaaaatgtatcctattattctctgccctaaaatggaatcatacaaggtgtactgttatttttatggctctataacatgtcatattgtacgtgttggtatggtcattttaaccatttttctagtgatggctttgaggttatttgcagtttcctagccatctcaaagtgtgctgcggggatctcttttgcatccctctgggtgcagagctgaggcacccagaggcagtgtccagaggaggcagcatctgtaggtgtcttcacctgctctggctcttggcacatctggttggtgacactgttttgtgagatgggttgaaagcacgtgctgccaaaatagaataatgttggtcctctcctcatgtgccgtggaactggggtaaaactgcgtagtggctgcagctgcctgtccataccggaatcgagtataacacggtgcctggcttagcacaaaacagtagtgggtcctgcaggccccagagtctaattcctggtattctttcccctacacagattaaataaaccaaaaacaaactattctaggaaagcgtctgtgacatttgtaaaaagtggtatttaatgatcttttattcacttgtctgtttagtttgttgaaatcttaagtggcatcctggtctgggaaggagtgctgtctgcgcctgccctccgctgggcacagcgtggctgcttcaggggctaagcacacactttctgtcttctaaagggccgccacatgccaggagctcaggtgtgagcccggctctggctcttacctcatagggtcactcataggggcacagggagcagaacattgtacacagcgaggcaccacccggcttggcatctgcctcggtggacttactacctctagaaggaaatacctgagttcctctggcctcagctcctagagtgactggtgtgctgtccctgttactcttctgtcaaggtgacaactgtgtgacccatcatctgtgtgtcaaagcaaggccctgcctgggcctctgctcctgtccgggctgcacaaaggcaaatgctttgctagtttccttccagttaatttcacctatgaatagatgtgtgaaaactgttcaaagccatacctgcacatgtttgaacttcaaaccctgtgggtgattcagtggcatctttctctaacccccagcctcccttcccacagaggccaccgtcatggccagttgctgcagtttctttccagagaacctgtgtatgtgtaaagctgtacaggcgtgggtacaccacacagcctgtcttgcactgtggactgttgagttactagtacatctaggtaagcaccgcatatctgtattcatgtctgccttggtcttttcaacatctttgtggtagccgtgtttgaattacccattccctttttggggaaccattaagttgtttcagcaatttttactgtagataaggctataccgcatatctgtgtacatgggtttttatgtacatgggcaagtatatctgtgagagaaaagtttcctcaggaggaattctgggcacagcatgtgtaaatttctaaatatgatggacacccccagcttccacctcaaggaggttggtcccattgacatttccccacaccttcacccaggctgtgcccttaaacttggttatttgtcaatgtgagaagtggaaaatagtatttaattgtagtttggatttgtatttctattgggttgtatacttactgattaataataagagctctttacatattaaggaaattaacccttttcaaatacattcctatttctcactaatctttaagttttattgtaatattttgctctttagtttatatatatatgtatatatatatatatgtatatatatatatatacatatatatatacatatatatatactaattttcttttatggttcctggattttgtgagtagtttgaaaaggctaatccagctgaagattttgttgttgttgttaaaccccatgttttctcctaactctttttatttttattttggaggactctatctagacttaattttagcataacaagtgacagggttagttagcctgttgtccttacaccattttctggctaatacagctattaactattgatctgtctattcacgtgccagttcctaatggttttacatagtgtaatctgcacttcaaaatagcgaagggaagccctacctcattattctacttttccagaattctcctggctattccaggctgcatgtttaccttaaccttccctgtgatgtcttcatgccgttgtcttcttatgcaagaataaggtacgtctttccatccactcacgtctatttaatttgactttgcattacacagaaagctggtcttggtctgtctacctcggcatctagttgtcctcactacatgccatatggcatgtagtgaggacacagtgggagagacaagccaaggagagaggcctcagaataaaccaggcctacttaacatcttggatcttgtacctccagcatccagaactgtgagacaatacattttggctaagtcactcagactgatatttggttacgatagctctagcaaactagtacattttaaaactttcaaattaccgaatatctttctgttcacatgggatgaacctag

SEQ ID NO: 455594 - DNA, 3837 bp, Homo sapiens
gattaccggattctgagctccgtacccctgatactcaaaaaaaaacaaaaacgacaaaaaaaaaacaaaacagaaaaaataaactaaggcaatgacagtccctggcaaatgctgggagggaggcagcagtggtcagggaaggtaaccctgaagcaggacttgtaaagcaaataagattgggaggccaaggtgggtggatcacgaggtcaggagttcgagaccagcctggccaacatagtgaaaccccgtctttactaaaaatacaaaaaaattagccaggtgtggtggtgggtgcctgtagtcccagctacttgggaggctgaggcaggagaatctcgaacccaggaggcggaggttacagtcagctgagaccgcaccattgcactccagcctgggtgacagagcaagattccgtctcaaaaaaaaaaaaaaaaaaaaaaaaccaagaagaaaaggaatgaattagaacttcttctgcttggacttaagggcatcatcaggcaggttttgggtaggatagcaggggaggcagagacatagtcggggtcagtggtcatgagtgtggctttgagcccaaaaacttggtttctgttccctactttgccactcagtagtgcatgactttggccaaatttcttaaattcatgaagcaagtttccgggtgaatgaaatggggataaaaatagtgttcaaacctatccgttggtttgtgtgaaactgaaatgaatagtatcgtgcaggtacttgtgagcaaggggagctgctgtttcctgtccctttatgatgggaaatatctagacaagttcccaaccctctgcactgcaggctgcatggcacggagggtcttgtaacaccagctggggctggccttcttttaggagcttcagtggttctgaaaacttttatttgtttgtttgttttagtagatgtggggtctttctgtgttgcccggactggtctcaaacttctggactcaagtgatcctcccccgctcaacctcccaaagtgttgggattacaggtgtgagccactgtgcccagccttgaaaactttttcaggttcttccagggttactgggctattaaatatttctatttcattataagtcagtttttcaaagttatattatcttaattaccttttttatatgtattagtgtagagtagcattttatattttgatatcctccttatgcatagtttttcactttttattcctagtttttcgtttttaataagactttcaagaaatttattttattggccttttgaaaaaagcagctttagataaagtaagcagttctgctttcattttataatttatttctacttttgtttcattaatcttttcctccggcatgccttggattttgttgtgttactctttttctagaggctcgcattgtgtgtctggttcacttatgatcacgcttgcctacttttaagaatggaagaggggaggtggagggtggctgcacagtcgagggtgtgaggcagtcttgctctagccccaccatgccctcagcccgctgtggccacgctggttcctcaattgctggggcgtgcagtgtctgtaagggaggctactgatgccatccgaggaagatgtaaggtttcgtgtgggcagcgagagcctagcaggcatgtggggtgcccagcaaagggtaacagtggacagttgttgcctcattccacagagttttgattttttttttttttttaatggtcactccatcaacatcccccatggccagagcctgagctggtccccagagacacaggcattcagctgacagcctcgccttcacgctgctgctgttctcatgggggacaggcctcaggtggcaatgcacaaatcattagttaagggcagttgtgacagttaccaaggagtgtagtcccccgccccccgcccagtgaaaacagccctaaccaggggtggggacctttgggctctgacccgaagggtaggagaagctggaaggacagcattcctgtctgcgaaggcaggagcaaagctgccaggctatgaaggaaatggctggagcctgaagtcatgcaagctggggctggcagggacagggccaacttccaggcctgggggccaccatgaggattcaggacgtgacccccagggcacatgaaggccttccatctgtatttaagaaaagactttatcagacgagtatggtggctcacgcctgaatcttagcactttgggaggctgaggcaggtggatcacgaggtcaggagttcaataccagcctggccaatatggtaaaaccccatctctactaaaactacaaaaattagccaggcatggtggcgcacgcctgtagtcccagctactcgggaggctgaggcagaagaatcacttgaacccgggaggtggaggttacagtgagccaagatcgcgccactacactccagcctgggtgacagagtgagactccgtctcaaaaaaaccaaaagactttatcttatttcctatatgtttgtggtttcagtcctgatgtataatttgaccctagttagaatggttatctgaggaagtggcctgtacgatttctgcttttttaaatgtgtggctccctttcttcattgattaacgtatgattatttttataaatgttccatggcagtgggaagggattctctgtcacattccacatctggatcagttcctccccattttgttggtcaaatccgatctgccatatcctgtgtaatgacaagtgagttgcattctcaccgtcactcctggggtctctccgcttcccctgagctggctcagcagtctgctccatgtgttttgatgcagggtgacccattggtattcccgacactaacgcccccgtctgtggactgcttgctgcttgggcttcactgtgtctggtgttgacagtgcagacctaaaggtgtgcacacatgtgcacacacactccgctgtcttcttgtttgcactggacttaaatatctatgagggttattttcaactgctgaatttggaatgatttttatatcttttctgctttctgcccatgtacatgtgtttattttacactgttgtgattggtagttactatgtggggacacaattacttgggctgaaataatccacctgttgtggttggggtcctctggggcattccagggtgagaggttgtcactgccacctgggccatgtgggccggcaccagcattttgtggttacgaattctacagtcacaaatatctttgggcaaatccccttctatacctcaaggcagcttttggtttgcaaccccactggccagagggaagggccagtcacttggctctctcactgccctgcgccccagatggttctagggctgctgttttcccttggccctgccaacaccactgtttttacttctgctcattggctgagtgcagtggttcctggaagccagtggcacgtttccccgcgtagctcgcttatcccacagcacacacccaagggttctgttgctaacacgctgaattaattctttgctcatcttacagagtgtgttttgactgcccccatttctgaggccttgtaaggccagagctttgttgcttcatcggcaggttgggacttagatggccgtgaatgtttcctctctgctgctgcagtaagtaagtgcccgcaccatagtgtgtttggaggctgaagttgaagcgaggctgtgaggggagatggacgtgtgaggagggatgatggggcttgagcaaagtgggggagggggcaaaggcagttggcccaacacattccccacccctttgagaggtctgaggcctgcagacctggctcggagcccacctggtagtcctc

SEQ ID NO: 455595 - DNA, 3441 bp, Homo sapiens
tcagacagccgggcccccctccctttccaaaaaaaaaaaaaaaaaaccaagaagaaaaggaatgaattagaacttcttctgcttggacttaagggcatcatcaggcaggttttgggtaggatagcaggggaggcagagacatagtcggggtcagtggtcatgagtgtggctttgagcccaaaaacttggtttctgttccctactttgccactcagtagtgcatgactttggccaaatttcttaaattcatgaagcaagtttccgggtgaatgaaatggggataaaaatagtgttcaaacctatccgttggtttgtgtgaaactgaaatgaatagtatcgtgcaggtacttgtgagcaaggggagctgctgtttcctgtccctttatgatgggaaatatctagacaagttcccaaccctctgcactgcaggctgcatggcacggagggtcttgtaacaccagctggggctggccttcttttaggagcttcagtggttctgaaaacttttatttgtttgtttgttttagtagatgtggggtctttctgtgttgcccggactggtctcaaacttctggactcaagtgatcctcccccgctcaacctcccaaagtgttgggattacaggtgtgagccactgtgcccagccttgaaaactttttcaggttcttccagggttactgggctattaaatatttctatttcattataagtcagtttttcaaagttatattatcttaattaccttttttatatgtattagtgtagagtagcattttatattttgatatcctccttatgcatagtttttcactttttattcctagtttttcgtttttaataagactttcaagaaatttattttattggccttttgaaaaaagcagctttagataaagtaagcagttctgctttcattttataatttatttctacttttgtttcattaatcttttcctccggcatgccttggattttgttgtgttactctttttctagaggctcgcattgtgtgtctggttcacttatgatcacgcttgcctacttttaagaatggaagaggggaggtggagggtggctgcacagtcgagggtgtgaggcagtcttgctctagccccaccatgccctcagcccgctgtggccacgctggttcctcaattgctggggcgtgcagtgtctgtaagggaggctactgatgccatccgaggaagatgtaaggtttcgtgtgggcagcgagagcctagcaggcatgtggggtgcccagcaaagggtaacagtggacagttgttgcctcattccacagagttttgattttttttttttttttaatggtcactccatcaacatcccccatggccagagcctgagctggtccccagagacacaggcattcagctgacagcctcgccttcacgctgctgctgttctcatgggggacaggcctcaggtggcaatgcacaaatcattagttaagggcagttgtgacagttaccaaggagtgtagtcccccgccccccgcccagtgaaaacagccctaaccaggggtggggacctttgggctctgacccgaagggtaggagaagctggaaggacagcattcctgtctgcgaaggcaggagcaaagctgccaggctatgaaggaaatggctggagcctgaagtcatgcaagctggggctggcagggacagggccaacttccaggcctgggggccaccatgaggattcaggacgtgacccccagggcacatgaaggccttccatctgtatttaagaaaagactttatcagacgagtatggtggctcacgcctgaatcttagcactttgggaggctgaggcaggtggatcacgaggtcaggagttcaataccagcctggccaatatggtaaaaccccatctctactaaaactacaaaaattagccaggcatggtggcgcacgcctgtagtcccagctactcgggaggctgaggcagaagaatcacttgaacccgggaggtggaggttacagtgagccaagatcgcgccactacactccagcctgggtgacagagtgagactccgtctcaaaaaaaccaaaagactttatcttatttcctatatgtttgtggtttcagtcctgatgtataatttgaccctagttagaatggttatctgaggaagtggcctgtacgatttctgcttttttaaatgtgtggctccctttcttcattgattaacgtatgattatttttataaatgttccatggcagtgggaagggattctctgtcacattccacatctggatcagttcctccccattttgttggtcaaatccgatctgccatatcctgtgtaatgacaagtgagttgcattctcaccgtcactcctggggtctctccgcttcccctgagctggctcagcagtctgctccatgtgttttgatgcagggtgacccattggtattcccgacactaacgcccccgtctgtggactgcttgctgcttgggcttcactgtgtctggtgttgacagtgcagacctaaaggtgtgcacacatgtgcacacacactccgctgtcttcttgtttgcactggacttaaatatctatgagggttattttcaactgctgaatttggaatgatttttatatcttttctgctttctgcccatgtacatgtgtttattttacactgttgtgattggtagttactatgtggggacacaattacttgggctgaaataatccacctgttgtggttggggtcctctggggcattccagggtgagaggttgtcactgccacctgggccatgtgggccggcaccagcattttgtggttacgaattctacagtcacaaatatctttgggcaaatccccttctatacctcaaggcagcttttggtttgcaaccccactggccagagggaagggccagtcacttggctctctcactgccctgcgccccagatggttctagggctgctgttttcccttggccctgccaacaccactgtttttacttctgctcattggctgagtgcagtggttcctggaagccagtggcacgtttccccgcgtagctcgcttatcccacagcacacacccaagggttctgttgctaacacgctgaattaattctttgctcatcttacagagtgtgttttgactgcccccatttctgaggccttgtaaggccagagctttgttgcttcatcggcaggttgggacttagatggccgtgaatgtttcctctctgctgctgcagtaagtaagtgcccgcaccatagtgtgtttggaggctgaagttgaagcgaggctgtgaggggagatggacgtgtgaggagggatgatggggcttgagcaaagtgggggagggggcaaaggcagttggcccaacacattccccacccctttgagaggtctgaggcctgcagacctggctcggagcccacctggtagtcctc

SEQ ID NO: 455596 - DNA, 2941 bp, Homo sapiens
tgtataccatagcactgagtggctgctccccattggaatctagtgaggatcatttcctctccaaagtcacagaagagctgcccaaacaggccccgctcaacctcccaaagtgttgggattacaggtgtgagccactgtgcccagccttgaaaactttttcaggttcttccagggttactgggctattaaatatttctatttcattataagtcagtttttcaaagttatattatcttaattaccttttttatatgtattagtgtagagtagcattttatattttgatatcctccttatgcatagtttttcactttttattcctagtttttcgtttttaataagactttcaagaaatttattttattggccttttgaaaaaagcagctttagataaagtaagcagttctgctttcattttataatttatttctacttttgtttcattaatcttttcctccggcatgccttggattttgttgtgttactctttttctagaggctcgcattgtgtgtctggttcacttatgatcacgcttgcctacttttaagaatggaagaggggaggtggagggtggctgcacagtcgagggtgtgaggcagtcttgctctagccccaccatgccctcagcccgctgtggccacgctggttcctcaattgctggggcgtgcagtgtctgtaagggaggctactgatgccatccgaggaagatgtaaggtttcgtgtgggcagcgagagcctagcaggcatgtggggtgcccagcaaagggtaacagtggacagttgttgcctcattccacagagttttgattttttttttttttttaatggtcactccatcaacatcccccatggccagagcctgagctggtccccagagacacaggcattcagctgacagcctcgccttcacgctgctgctgttctcatgggggacaggcctcaggtggcaatgcacaaatcattagttaagggcagttgtgacagttaccaaggagtgtagtcccccgccccccgcccagtgaaaacagccctaaccaggggtggggacctttgggctctgacccgaagggtaggagaagctggaaggacagcattcctgtctgcgaaggcaggagcaaagctgccaggctatgaaggaaatggctggagcctgaagtcatgcaagctggggctggcagggacagggccaacttccaggcctgggggccaccatgaggattcaggacgtgacccccagggcacatgaaggccttccatctgtatttaagaaaagactttatcagacgagtatggtggctcacgcctgaatcttagcactttgggaggctgaggcaggtggatcacgaggtcaggagttcaataccagcctggccaatatggtaaaaccccatctctactaaaactacaaaaattagccaggcatggtggcgcacgcctgtagtcccagctactcgggaggctgaggcagaagaatcacttgaacccgggaggtggaggttacagtgagccaagatcgcgccactacactccagcctgggtgacagagtgagactccgtctcaaaaaaaccaaaagactttatcttatttcctatatgtttgtggtttcagtcctgatgtataatttgaccctagttagaatggttatctgaggaagtggcctgtacgatttctgcttttttaaatgtgtggctccctttcttcattgattaacgtatgattatttttataaatgttccatggcagtgggaagggattctctgtcacattccacatctggatcagttcctccccattttgttggtcaaatccgatctgccatatcctgtgtaatgacaagtgagttgcattctcaccgtcactcctggggtctctccgcttcccctgagctggctcagcagtctgctccatgtgttttgatgcagggtgacccattggtattcccgacactaacgcccccgtctgtggactgcttgctgcttgggcttcactgtgtctggtgttgacagtgcagacctaaaggtgtgcacacatgtgcacacacactccgctgtcttcttgtttgcactggacttaaatatctatgagggttattttcaactgctgaatttggaatgatttttatatcttttctgctttctgcccatgtacatgtgtttattttacactgttgtgattggtagttactatgtggggacacaattacttgggctgaaataatccacctgttgtggttggggtcctctggggcattccagggtgagaggttgtcactgccacctgggccatgtgggccggcaccagcattttgtggttacgaattctacagtcacaaatatctttgggcaaatccccttctatacctcaaggcagcttttggtttgcaaccccactggccagagggaagggccagtcacttggctctctcactgccctgcgccccagatggttctagggctgctgttttcccttggccctgccaacaccactgtttttacttctgctcattggctgagtgcagtggttcctggaagccagtggcacgtttccccgcgtagctcgcttatcccacagcacacacccaagggttctgttgctaacacgctgaattaattctttgctcatcttacagagtgtgttttgactgcccccatttctgaggccttgtaaggccagagctttgttgcttcatcggcaggttgggacttagatggccgtgaatgtttcctctctgctgctgcagtaagtaagtgcccgcaccatagtgtgtttggaggctgaagttgaagcgaggctgtgaggggagatggacgtgtgaggagggatgatggggcttgagcaaagtgggggagggggcaaaggcagttggcccaacacattccccacccctttgagaggtctgaggcctgcagacctggctcggagcccacctggtagtcctc

SEQ ID NO: 455597 - DNA, 1233 bp, Homo sapiens
gttagaggatccccgtttgggcttcgtgccatggcagtgggaagggattctctgtcacattccacatctggatcagttcctccccattttgttggtcaaatccgatctgccatatcctgtgtaatgacaagtgagttgcattctcaccgtcactcctggggtctctccgcttcccctgagctggctcagcagtctgctccatgtgttttgatgcagggtgacccattggtattcccgacactaacgcccccgtctgtggactgcttgctgcttgggcttcactgtgtctggtgttgacagtgcagacctaaaggtgtgcacacatgtgcacacacactccgctgtcttcttgtttgcactggacttaaatatctatgagggttattttcaactgctgaatttggaatgatttttatatcttttctgctttctgcccatgtacatgtgtttattttacactgttgtgattggtagttactatgtggggacacaattacttgggctgaaataatccacctgttgtggttggggtcctctggggcattccagggtgagaggttgtcactgccacctgggccatgtgggccggcaccagcattttgtggttacgaattctacagtcacaaatatctttgggcaaatccccttctatacctcaaggcagcttttggtttgcaaccccactggccagagggaagggccagtcacttggctctctcactgccctgcgccccagatggttctagggctgctgttttcccttggccctgccaacaccactgtttttacttctgctcattggctgagtgcagtggttcctggaagccagtggcacgtttccccgcgtagctcgcttatcccacagcacacacccaagggttctgttgctaacacgctgaattaattctttgctcatcttacagagtgtgttttgactgcccccatttctgaggccttgtaaggccagagctttgttgcttcatcggcaggttgggacttagatggccgtgaatgtttcctctctgctgctgcagtaagtaagtgcccgcaccatagtgtgtttggaggctgaagttgaagcgaggctgtgaggggagatggacgtgtgaggagggatgatggggcttgagcaaagtgggggagggggcaaaggcagttggcccaacacattccccacccctttgagaggtctgaggcctgcagacctggctcggagcccacctggtagtcctc

SEQ ID NO: 455598 - DNA, 1230 bp, Homo sapiens
gaggaccccgcgctaagggctacccacatggcagtgggaagggattctctgtcacattccacatctggatcagttcctccccattttgttggtcaaatccgatctgccatatcctgtgtaatgacaagtgagttgcattctcaccgtcactcctggggtctctccgcttcccctgagctggctcagcagtctgctccatgtgttttgatgcagggtgacccattggtattcccgacactaacgcccccgtctgtggactgcttgctgcttgggcttcactgtgtctggtgttgacagtgcagacctaaaggtgtgcacacatgtgcacacacactccgctgtcttcttgtttgcactggacttaaatatctatgagggttattttcaactgctgaatttggaatgatttttatatcttttctgctttctgcccatgtacatgtgtttattttacactgttgtgattggtagttactatgtggggacacaattacttgggctgaaataatccacctgttgtggttggggtcctctggggcattccagggtgagaggttgtcactgccacctgggccatgtgggccggcaccagcattttgtggttacgaattctacagtcacaaatatctttgggcaaatccccttctatacctcaaggcagcttttggtttgcaaccccactggccagagggaagggccagtcacttggctctctcactgccctgcgccccagatggttctagggctgctgttttcccttggccctgccaacaccactgtttttacttctgctcattggctgagtgcagtggttcctggaagccagtggcacgtttccccgcgtagctcgcttatcccacagcacacacccaagggttctgttgctaacacgctgaattaattctttgctcatcttacagagtgtgttttgactgcccccatttctgaggccttgtaaggccagagctttgttgcttcatcggcaggttgggacttagatggccgtgaatgtttcctctctgctgctgcagtaagtaagtgcccgcaccatagtgtgtttggaggctgaagttgaagcgaggctgtgaggggagatggacgtgtgaggagggatgatggggcttgagcaaagtgggggagggggcaaaggcagttggcccaacacattccccacccctttgagaggtctgaggcctgcagacctggctcggagcccacctggtagtcctc

SEQ ID NO: 455599 - DNA, 2489 bp, Homo sapiens
tcccacaccacccgcctcccctgccgcctcctgccaccccctaggccaaggtaataatcatcctgaatcctgggtttatctctcacttgctttcttttcatataattttgcaaaagaatctgatctaaatgtgtttttcagagtatatatttatattttagctgttcttagagaaaatttattattttgcatgtaatcttatggaacattctcatttaataccatggtaagattcagcccttgcccaggggatagttcatttagtttgtttactggatagagctcatcatgtgactatacctcagttagtttatcagttctcccatccatggtgactaggttgcctctcagcctctcaacaacactgtttctcagtgtccttgtagaagtgatatgtgggtgttttctccttacacagagttgaaaggtgacgacaacaacgttggcactaccaatcccccaccctccagaggggtaaccagtgttaccagtttgctgtgtttcctgctacacctcgccttattcacttccatttgtatctgaaaaacgtgttgcatggtttcttttctatagaagtggtaaaatgctattgtgtcctgtacattattgattactttttttcatttaacagtagggagatgcctgggagtacacagagaactgccctcattgttttcaacttctgcactgtatgtctgtgagtttagccattctgctgttaatggaaatttacagtattctaatcttttgatattacaaacagttctgtgcgatcatcgtcatacacaaccccttgtgcacaatgcatgagtgtttctcagggtaggtaccaagaagtgaaattcctgggtcatagggcgtgagtccgacatttttctccattctgccctgttgccctccagagtgggtgtccagctttgcatacctaagtatgagagtatctgttgttcatatcctctacgacgctccatatatgaaacttaagtttctgctagttgccatctttgatctatcatgtatgcagtgacctactaagactgtaattggtacagtagattcttgtcatctgtgtgtgaatttagcattcatgggcttaatgctgacaaggcccccagggtccaagacatataatcatgtataattttgtcaaggtataattttttaaattgcttttgtcatgtgtctgctggtgatgcccaacccagtgctctgcacccaggtcacactgtggctttgtcctctgcttatgcctgcattgcagcaactgtcctgaagagaccaaaattatgcagatttaggtaagtccatggctaatgttattatattatgtgctattgtaatggatggggctgtggagtgtatgaatttataaatcactggtcttgtaattaaaattcaaacactatagaaaaaggccatgtagaagataaaagttcctctataatcccggacccctaagataactactaatgacaacttcatttatattccttcagacattttctggctgtggatgtactaaaatgtatcctattattctctgccctaaaatggaatcatacaaggtgtactgttatttttatggctctataacatgtcatattgtacgtgttggtatggtcattttaaccatttttctagtgatggctttgaggttatttgcagtttcctagccatctcaaagtgtgctgcggggatctcttttgcatccctctgggtgcagagctgaggcacccagaggcagtgtccagaggaggcagcatctgtaggtgtcttcacctgctctggctcttggcacatctggttggtgacactgttttgtgagatgggttgaaagcacgtgctgccaaaatagaataatgttggtcctctcctcatgtgccgtggaactggggtaaaactgcgtagtggctgcagctgcctgtccataccggaatcgagtataacacggtgcctggcttagcacaaaacagtagtgggtcctgcaggccccagagtctaattcctggtattctttcccctacacagattaaataaaccaaaaacaaactattctaggaaagcgtctgtgacatttgtaaaaagtggtatttaatgatcttttattcacttgtctgtttagtttgttgaaatcttaagtggcatcctggtctgggaaggagtgctgtctgcgcctgccctccgctgggcacagcgtggctgcttcaggggctaagcacacactttctgtcttctaaagggccgccacatgccaggagctcaggtgtgagcccggctctggctcttacctcatagggtcactcataggggcacagggagcagaacattgtacacagatgatgggtcacacagttgtcaccttgacagaagagtaacagggacagcacaccagtcactctaggagctgaggccagaggaactcaggtatttccttctagaggtagtaagtccaccgaggcagatgccaagccgagtgggtaccgagctga

SEQ ID NO: 455600 - DNA, 1111 bp, Homo sapiens
ttaaacgatcgttgaagatttatttaatttagatatgttcgttggtactgcatttcgtatcagtggagctttgaacattcgtgtcctgatgcagggtgacccattggtattcccgacactaacgcccccgtctgtggactgcttgctgcttgggcttcactgtgtctggtgttgacagtgcagacctaaaggtgtgcacacatgtgcacacacactccgctgtcttcttgtttgcactggacttaaatatctatgagggttattttcaactgctgaatttggaatgatttttatatcttttctgctttctgcccatgtacatgtgtttattttacactgttgtgattggtagttactatgtggggacacaattacttgggctgaaataatccacctgttgtggttggggtcctctggggcattccagggtgagaggttgtcactgccacctgggccatgtgggccggcaccagcattttgtggttacgaattctacagtcacaaatatctttgggcaaatccccttctatacctcaaggcagcttttggtttgcaaccccactggccagagggaagggccagtcacttggctctctcactgccctgcgccccagatggttctagggctgctgttttcccttggccctgccaacaccactgtttttacttctgctcattggctgagtgcagtggttcctggaagccagtggcacgtttccccgcgtagctcgcttatcccacagcacacacccaagggttctgttgctaacacgctgaattaattctttgctcatcttacagagtgtgttttgactgcccccatttctgaggccttgtaaggccagagctttgttgcttcatcggcaggttgggacttagatggccgtgaatgtttcctctctgctgctgcagtaagtaagtgcccgcaccatagtgtgtttggaggctgaagttgaagcgaggctgtgaggggagatggacgtgtgaggagggatgatggggcttgagcaaagtgggggagggggcaaaggcagttggcccaacacattccccacccctttgagaggtctgaggcctgcagacctggctcggagcccacctggtagtcctc

SEQ ID NO: 455601 - DNA, 926 bp, Homo sapiens
tgatctgaggatccccgggtgatgatgtgaacaactcgtgtcttgtttgcactggacttaaatatctatgagggttattttcaactgctgaatttggaatgatttttatatcttttctgctttctgcccatgtacatgtgtttattttacactgttgtgattggtagttactatgtggggacacaattacttgggctgaaataatccacctgttgtggttggggtcctctggggcattccagggtgagaggttgtcactgccacctgggccatgtgggccggcaccagcattttgtggttacgaattctacagtcacaaatatctttgggcaaatccccttctatacctcaaggcagcttttggtttgcaaccccactggccagagggaagggccagtcacttggctctctcactgccctgcgccccagatggttctagggctgctgttttcccttggccctgccaacaccactgtttttacttctgctcattggctgagtgcagtggttcctggaagccagtggcacgtttccccgcgtagctcgcttatcccacagcacacacccaagggttctgttgctaacacgctgaattaattctttgctcatcttacagagtgtgttttgactgcccccatttctgaggccttgtaaggccagagctttgttgcttcatcggcaggttgggacttagatggccgtgaatgtttcctctctgctgctgcagtaagtaagtgcccgcaccatagtgtgtttggaggctgaagttgaagcgaggctgtgaggggagatggacgtgtgaggagggatgatggggcttgagcaaagtgggggagggggcaaaggcagttggcccaacacattccccacccctttgagaggtctgaggcctgcagacctggctcggagcccacctggtagtcctc

SEQ ID NO: 455602 - DNA, 7829 bp, Homo sapiens
tcccacaccacccgcctcccctgccgcctcctgccaccccctaggccaaggtaataatcatcctgaatcctgggtttatctctcacttgctttcttttcatataattttgcaaaagaatctgatctaaatgtgtttttcagagtatatatttatattttagctgttcttagagaaaatttattattttgcatgtaatcttatggaacattctcatttaataccatggtaagattcagcccttgcccaggggatagttcatttagtttgtttactggatagagctcatcatgtgactatacctcagttagtttatcagttctcccatccatggtgactaggttgcctctcagcctctcaacaacactgtttctcagtgtccttgtagaagtgatatgtgggtgttttctccttacacagagttgaaaggtgacgacaacaacgttggcactaccaatcccccaccctccagaggggtaaccagtgttaccagtttgctgtgtttcctgctacacctcgccttattcacttccatttgtatctgaaaaacgtgttgcatggtttcttttctatagaagtggtaaaatgctattgtgtcctgtacattattgattactttttttcatttaacagtagggagatgcctgggagtacacagagaactgccctcattgttttcaacttctgcactgtatgtctgtgagtttagccattctgctgttaatggaaatttacagtattctaatcttttgatattacaaacagttctgtgcgatcatcgtcatacacaaccccttgtgcacaatgcatgagtgtttctcagggtaggtaccaagaagtgaaattcctgggtcatagggcgtgagtccgacatttttctccattctgccctgttgccctccagagtgggtgtccagctttgcatacctaagtatgagagtatctgttgttcatatcctctacgacgctccatatatgaaacttaagtttctgctagttgccatctttgatctatcatgtatgcagtgacctactaagactgtaattggtacagtagattcttgtcatctgtgtgtgaatttagcattcatgggcttaatgctgacaaggcccccagggtccaagacatataatcatgtataattttgtcaaggtataattttttaaattgcttttgtcatgtgtctgctggtgatgcccaacccagtgctctgcacccaggtcacactgtggctttgtcctctgcttatgcctgcattgcagcaactgtcctgaagagaccaaaattatgcagatttaggtaagtccatggctaatgttattatattatgtgctattgtaatggatggggctgtggagtgtatgaatttataaatcactggtcttgtaattaaaattcaaacactatagaaaaaggccatgtagaagataaaagttcctctataatcccggacccctaagataactactaatgacaacttcatttatattccttcagacattttctggctgtggatgtactaaaatgtatcctattattctctgccctaaaatggaatcatacaaggtgtactgttatttttatggctctataacatgtcatattgtacgtgttggtatggtcattttaaccatttttctagtgatggctttgaggttatttgcagtttcctagccatctcaaagtgtgctgcggggatctcttttgcatccctctgggtgcagagctgaggcacccagaggcagtgtccagaggaggcagcatctgtaggtgtcttcacctgctctggctcttggcacatctggttggtgacactgttttgtgagatgggttgaaagcacgtgctgccaaaatagaataatgttggtcctctcctcatgtgccgtggaactggggtaaaactgcgtagtggctgcagctgcctgtccataccggaatcgagtataacacggtgcctggcttagcacaaaacagtagtgggtcctgcaggccccagagtctaattcctggtattctttcccctacacagattaaataaaccaaaaacaaactattctaggaaagcgtctgtgacatttgtaaaaagtggtatttaatgatcttttattcacttgtctgtttagtttgttgaaatcttaagtggcatcctggtctgggaaggagtgctgtctgcgcctgccctccgctgggcacagcgtggctgcttcaggggctaagcacacactttctgtcttctaaagggccgccacatgccaggagctcaggtgtgagcccggctctggctcttacctcatagggtcactcataggggcacagggagcagaacattgtacacagcgaggcaccacccggcttggcatctgcctcggtggacttactacctctagaaggaaatacctgagttcctctggcctcagctcctagagtgactggtgtgctgtccctgttactcttctgtcaaggtgacaactgtgtgacccatcatctgtgtgtcaaagcaaggccctgcctgggcctctgctcctgtccgggctgcacaaaggcaaatgctttgctagtttccttccagttaatttcacctatgaatagatgtgtgaaaactgttcaaagccatacctgcacatgtttgaacttcaaaccctgtgggtgattcagtggcatctttctctaacccccagcctcccttcccacagaggccaccgtcatggccagttgctgcagtttctttccagagaacctgtgtatgtgtaaagctgtacaggcgtgggtacaccacacagcctgtcttgcactgtggactgttgagttactagtacatctaggtaagcaccgcatatctgtattcatgtctgccttggtcttttcaacatctttgtggtagccgtgtttgaattacccattccctttttggggaaccattaagttgtttcagcaatttttactgtagataaggctataccgcatatctgtgtacatgggtttttatgtacatgggcaagtatatctgtgagagaaaagtttcctcaggaggaattctgggcacagcatgtgtaaatttctaaatatgatggacacccccagcttccacctcaaggaggttggtcccattgacatttccccacaccttcacccaggctgtgcccttaaacttggttatttgtcaatgtgagaagtggaaaatagtatttaattgtagtttggatttgtatttctattgggttgtatacttactgattaataataagagctctttacatattaaggaaattaacccttttcaaatacattcctatttctcactaatctttaagttttattgtaatattttgctctttagtttatatatatatgtatatatatatatatgtatatatatatatatacatatatatatacatatatatatactaattttcttttatggttcctggattttgtgagtagtttgaaaaggctaatccagctgaagattttgttgttgttgttaaaccccatgttttctcctaactctttttatttttattttggaggactctatctagacttaattttagcataacaagtgacagggttagttagcctgttgtccttacaccattttctggctaatacagctattaactattgatctgtctattcacgtgccagttcctaatggttttacatagtgtaatctgcacttcaaaatagcgaagggaagccctacctcattattctacttttccagaattctcctggctattccaggctgcatgtttaccttaaccttccctgtgatgtcttcatgccgttgtcttcttatgcaagaataaggtacgtctttccatccactcacgtctatttaatttgactttgcattacacagaaagctggtcttggtctgtctacctcggcatctagttgtcctcactgccccctagccgaccccaccccatctgactgactaccccatcacagagtacttttatttacgttttgctctgcctaatggttacttgatactgtcacgccgacagtgtccagttcagtggtctttgcagttgaaatgctcccgtacacactgtcttgttaaaaatgccagtaagttcatacaaacccagcttgcacccaaggtcacattcagagagcgtagggctgggatgggttgttttccaagcttctgccactgtgtggctagctcttcccactgggaagttctgtgtacccggaatgtcggagtggagtcctgttctagtgtccagcacctgaccctgtgcccaacccctcaacagcctattcctgctgtccacagcctgctggaactttttacaaaatatgttgccatgctggaccctgggcactggacataagccccctggcagcctttttcatgtcacccaaaggggtaattgtcctactggtggtctgtaagatgagttagggtgacttgctaatagacattgtaaatcttaatatttatgtatgtattttattattaccggttttccatttatgatggtaatattgtttcttctaagaatatttatttttccttctaaatattgagataaaattcatgcttttgaaatgttctattcagtggcttttagtatatttgctatgttgtgcaaccatcgacactatccatttctagaactttttcgtcatcccaaacagacgctctgtattcataaaaaaataacttcctacctgtctctccccctagtctttggtaacctttgttatactggtaaactttgttgtgctctctgtctgtgtgaatttgcctattctaggggcctcatataagtgtaatcatacagtatttgtctttttgggtctgtctgatttcacttagcgggttttcagggttcattcatgttgcagcatataacagtactgcgttcctttttctggctgaataatattccactgtatggatagaccccattttgtttattcacacatcatttggacatttggattatttctggtttttggctattatgaacaatggtgctatgaacagttgcgtacaagtttttgtgtgaacatatgttttcaattctctcattatatacctaggagtagaattactgggtcatatggtaactgtatatttttgaggaactgccaaactattttcccacgtccatgcaccatttcacattcccaccagtaagtaagagggttccaatttctgcgcattcttgccaacactagttattatctgactttctggttataatcattctaatgagtgtgaagtagcctctggtgtcatttggatttgcatttctctgatgagtgatgctatcaagcacctttgctggtgctgttggccatatgtgtatgttccctggagaagtgtctgtgctgagccttggcccactttttaattaggcgtttgtctttttattactgagttgtaagagttctttatatattctggattctagacccttatcagatacatggtttgcaaatattttctcccattctgtgggttgtgttttcactttatcgataatgtccttagacatataataaatttgtattttaaaagtgacttgatttggctgtgcaaggtggctcacgcttgtaatcccagcactttgggagactgaggtgggtggatcatatgaggaggctaggagttcgaggtcagcctggccagcatagcgaaaacttgtctctactaaaaatacaaaaattagtcaggcatggtggtgcacgtctgtaataccagcttctcaggaggctgaggcacgaggatcacttgaacccaggaggaggaggttgcagtgagctgagatcatgccagggcaacagaatgagactttgtttaaaaaaaaaaaaaagtgacttgatttaagggaaaaaatgactggctatattcagtcagatatggcaaaaagtctcaaggtgttaatgtgaatgattaaggtcttggggggggtgtcccctatcagactacaggtgtttagaggcacagaaaaaggtgcagttgggttcttaatgtgaaatgatgagaagcacaactccagtgtgtctctttgtgtagaatgtcagcagacaccccctgctagatgtgctggatcatgggaaagcatttccatttgttactagattgttcagaagttttaatttatgatgggtgtggtggctcatgcctgtagtcccagcactgtgggaggctgaggcaggaggatcatctgaggccaagagttcaagatcagcctgggcaacatagtgataccctatctcttaaaaaagaagaagtttttaaatttgaaataataataggtactggatttatgcaaatgtcttttctgcgtcttttgagatgagtatcaggtttttttttttccttttatcatctgatgatgaacttaatgtttccatttgtattaatggaatactaagtccctctgtgatttctgaaccaagctattcctaggcctgagttttattttgttgacacagaaataaattagaaggccaagcgtggtggcatgtgcctgtagtcctagttgctgaggtaagaggattgcttgagcccaggagttcaaggctgcagcaagctttgattgcgccactgcactccagccttggcgacagactaagacgctgtctcaaaaaaaaacaaaaacgacaaaaaaaaaacaaaacagaaaaaataaactaaggcaatgacagtccctggcaaatgctgggagggaggcagcagtggtcagggaaggtaaccctgaagcaggacttgtaaagcaaataagattgggaggccaaggtgggtggatcacgaggtcaggagttcgagaccagcctggccaacatagtgaaaccccgtctttactaaaaatacaaaaaaattagccaggtgtggtggtgggtgcctgtagtcccagctacttgggaggctgaggcaggagaatctcgaacccaggaggcggaggttacagtcagctgagaccgcaccattgcactccagcctgggtgacagagcaagattccgtctcaaaaaaaaaaaaaaaaaaaaaaaaccaagaagaaaaggaatgaattagaacttcttctgcttggacttaagggcatcatcaggcaggttttgggtaggatagcaggggaggcagagacatagtcggggtcagtggtcatgagtgtggctttgagcccaaaaacttggtttctgttccctactttgccactcagtagtgcatgactttggccaaatttcttaaattcatgaagcaagtttccgggtgaatgaaatggggataaaaatagtgttcaaacctatccgttggtttgtgtgaaactgaaatgaatagtatcgtgcaggtacttgtgagcaaggggagctgctgtttcctgtccctttatgatgggaaatatctagacaagttcccaaccctctgcactgcaggctgcatggcacggagggtcttgtaacaccagctggggctggccttcttttaggagcttcagtggttctgaaaacttttatttgtttgtttgttttagtagatgtggggtctttctgtgttgcccggactggtctcaaacttctggactcaagtgatcctcccccgctcaacctcccaaagtgttgggattacaggtgtgagccactgtgcccagccttgaaaactttttcaggttcttccagggttactgggctattaaatatttctatttcattataagtcagtttttcaaagttatattatcttaattaccttttttatatgtattagtgtagagtttcagatagaaaatgaaaaacaagctaagacaagtattgcccaagtaaagcccatagaaaaatataaagccaaaaatggggatcct

SEQ ID NO: 455603 - DNA, 6300 bp, Homo sapiens
tcccacaccacccgcctcccctgccgcctcctgccaccccctaggccaaggtaataatcatcctgaatcctgggtttatctctcacttgctttcttttcatataattttgcaaaagaatctgatctaaatgtgtttttcagagtatatatttatattttagctgttcttagagaaaatttattattttgcatgtaatcttatggaacattctcatttaataccatggtaagattcagcccttgcccaggggatagttcatttagtttgtttactggatagagctcatcatgtgactatacctcagttagtttatcagttctcccatccatggtgactaggttgcctctcagcctctcaacaacactgtttctcagtgtccttgtagaagtgatatgtgggtgttttctccttacacagagttgaaaggtgacgacaacaacgttggcactaccaatcccccaccctccagaggggtaaccagtgttaccagtttgctgtgtttcctgctacacctcgccttattcacttccatttgtatctgaaaaacgtgttgcatggtttcttttctatagaagtggtaaaatgctattgtgtcctgtacattattgattactttttttcatttaacagtagggagatgcctgggagtacacagagaactgccctcattgttttcaacttctgcactgtatgtctgtgagtttagccattctgctgttaatggaaatttacagtattctaatcttttgatattacaaacagttctgtgcgatcatcgtcatacacaaccccttgtgcacaatgcatgagtgtttctcagggtaggtaccaagaagtgaaattcctgggtcatagggcgtgagtccgacatttttctccattctgccctgttgccctccagagtgggtgtccagctttgcatacctaagtatgagagtatctgttgttcatatcctctacgacgctccatatatgaaacttaagtttctgctagttgccatctttgatctatcatgtatgcagtgacctactaagactgtaattggtacagtagattcttgtcatctgtgtgtgaatttagcattcatgggcttaatgctgacaaggcccccagggtccaagacatataatcatgtataattttgtcaaggtataattttttaaattgcttttgtcatgtgtctgctggtgatgcccaacccagtgctctgcacccaggtcacactgtggctttgtcctctgcttatgcctgcattgcagcaactgtcctgaagagaccaaaattatgcagatttaggtaagtccatggctaatgttattatattatgtgctattgtaatggatggggctgtggagtgtatgaatttataaatcactggtcttgtaattaaaattcaaacactatagaaaaaggccatgtagaagataaaagttcctctataatcccggacccctaagataactactaatgacaacttcatttatattccttcagacattttctggctgtggatgtactaaaatgtatcctattattctctgccctaaaatggaatcatacaaggtgtactgttatttttatggctctataacatgtcatattgtacgtgttggtatggtcattttaaccatttttctagtgatggctttgaggttatttgcagtttcctagccatctcaaagtgtgctgcggggatctcttttgcatccctctgggtgcagagctgaggcacccagaggcagtgtccagaggaggcagcatctgtaggtgtcttcacctgctctggctcttggcacatctggttggtgacactgttttgtgagatgggttgaaagcacgtgctgccaaaatagaataatgttggtcctctcctcatgtgccgtggaactggggtaaaactgcgtagtggctgcagctgcctgtccataccggaatcgagtataacacggtgcctggcttagcacaaaacagtagtgggtcctgcaggccccagagtctaattcctggtattctttcccctacacagattaaataaaccaaaaacaaactattctaggaaagcgtctgtgacatttgtaaaaagtggtatttaatgatcttttattcacttgtctgtttagtttgttgaaatcttaagtggcatcctggtctgggaaggagtgctgtctgcgcctgccctccgctgggcacagcgtggctgcttcaggggctaagcacacactttctgtcttctaaagggccgccacatgccaggagctcaggtgtgagcccggctctggctcttacctcatagggtcactcataggggcacagggagcagaacattgtacacagcgaggcaccacccggcttggcatctgcctcggtggacttactacctctagaaggaaatacctgagttcctctggcctcagctcctagagtgactggtgtgctgtccctgttactcttctgtcaaggtgacaactgtgtgacccatcatctgtgtgtcaaagcaaggccctgcctgggcctctgctcctgtccgggctgcacaaaggcaaatgctttgctagtttccttccagttaatttcacctatgaatagatgtgtgaaaactgttcaaagccatacctgcacatgtttgaacttcaaaccctgtgggtgattcagtggcatctttctctaacccccagcctcccttcccacagaggccaccgtcatggccagttgctgcagtttctttccagagaacctgtgtatgtgtaaagctgtacaggcgtgggtacaccacacagcctgtcttgcactgtggactgttgagttactagtacatctaggtaagcaccgcatatctgtattcatgtctgccttggtcttttcaacatctttgtggtagccgtgtttgaattacccattccctttttggggaaccattaagttgtttcagcaatttttactgtagataaggctataccgcatatctgtgtacatgggtttttatgtacatgggcaagtatatctgtgagagaaaagtttcctcaggaggaattctgggcacagcatgtgtaaatttctaaatatgatggacacccccagcttccacctcaaggaggttggtcccattgacatttccccacaccttcacccaggctgtgcccttaaacttggttatttgtcaatgtgagaagtggaaaatagtatttaattgtagtttggatttgtatttctattgggttgtatacttactgattaataataagagctctttacatattaaggaaattaacccttttcaaatacattcctatttctcactaatctttaagttttattgtaatattttgctctttagtttatatatatatgtatatatatatatatgtatatatatatatatacatatatatatacatatatatatactaattttcttttatggttcctggattttgtgagtagtttgaaaaggctaatccagctgaagattttgttgttgttgttaaaccccatgttttctcctaactctttttatttttattttggaggactctatctagacttaattttagcataacaagtgacagggttagttagcctgttgtccttacaccattttctggctaatacagctattaactattgatctgtctattcacgtgccagttcctaatggttttacatagtgtaatctgcacttcaaaatagcgaagggaagccctacctcattattctacttttccagaattctcctggctattccaggctgcatgtttaccttaaccttccctgtgatgtcttcatgccgttgtcttcttatgcaagaataaggtacgtctttccatccactcacgtctatttaatttgactttgcattacacagaaagctggtcttggtctgtctacctcggcatctagttgtcctcactgccccctagccgaccccaccccatctgactgactaccccatcacagagtacttttatttacgttttgctctgcctaatggttacttgatactgtcacgccgacagtgtccagttcagtggtctttgcagttgaaatgctcccgtacacactgtcttgttaaaaatgccagtaagttcatacaaacccagcttgcacccaaggtcacattcagagagcgtagggctgggatgggttgttttccaagcttctgccactgtgtggctagctcttcccactgggaagttctgtgtacccggaatgtcggagtggagtcctgttctagtgtccagcacctgaccctgtgcccaacccctcaacagcctattcctgctgtccacagcctgctggaactttttacaaaatatgttgccatgctggaccctgggcactggacataagccccctggcagcctttttcatgtcacccaaaggggtaattgtcctactggtggtctgtaagatgagttagggtgacttgctaatagacattgtaaatcttaatatttatgtatgtattttattattaccggttttccatttatgatggtaatattgtttcttctaagaatatttatttttccttctaaatattgagataaaattcatgcttttgaaatgttctattcagtggcttttagtatatttgctatgttgtgcaaccatcgacactatccatttctagaactttttcgtcatcccaaacagacgctctgtattcataaaaaaataacttcctacctgtctctccccctagtctttggtaacctttgttatactggtaaactttgttgtgctctctgtctgtgtgaatttgcctattctaggggcctcatataagtgtaatcatacagtatttgtctttttgggtctgtctgatttcacttagcgggttttcagggttcattcatgttgcagcatataacagtactgcgttcctttttctggctgaataatattccactgtatggatagaccccattttgtttattcacacatcatttggacatttggattatttctggtttttggctattatgaacaatggtgctatgaacagttgcgtacaagtttttgtgtgaacatatgttttcaattctctcattatatacctaggagtagaattactgggtcatatggtaactgtatatttttgaggaactgccaaactattttcccacgtccatgcaccatttcacattcccaccagtaagtaagagggttccaatttctgcgcattcttgccaacactagttattatctgactttctggttataatcattctaatgagtgtgaagtagcctctggtgtcatttggatttgcatttctctgatgagtgatgctatcaagcacctttgctggtgctgttggccatatgtgtatgttccctggagaagtgtctgtgctgagccttggcccactttttaattaggcgtttgtctttttattactgagttgtaagagttctttatatattctggattctagacccttatcagatacatggtttgcaaatattttctcccattctgtgggttgtgttttcactttatcgataatgtccttagacatataataaatttgtattttaaaagtgacttgatttggctgtgcaaggtggctcacgcttgtaatcccagcactttgggagactgaggtgggtggatcatatgaggaggctaggagttcgaggtcagcctggccagcatagcgaaaacttgtctctactaaaaatacaaaaattagtcaggcatggtggtgcacgtctgtaataccagcttctcaggaggctgaggcacgaggatcacttgaacccaggaggaggaggttgcagtgagctgagatcatgccagggcaacagaatgagactttgtttaaaaaaaaaaaaaagtgacttgatttaagggaaaaaatgactggctatattcagtcagatatggcaaaaagtctcaaggtgttaatgtgaatgattaaggtcttggggggggtgtcccctatcagactacaggtgtttagaggcacagaaaaaggtgcagttgggttcttaatgtgaaatgatgagaagcacaactccagtgtgtctctttgtgtagaatgtcagcagacaccccctgctagatgtgctggatcatgggaaagcatttccatttgttactagattgttcagaagttttaatgagactttgtttaaaaaaaaaaaagtgacttgatttaagggaaaaaatgactggctatattcagtcagatatggcataaagtctcaaggtgttaatgtgaatgattaaggtcttggggggggtgtcccctatcagactcaggtggtgtgggggatcctctatagtggtacatgc

SEQ ID NO: 455604 - DNA, 6018 bp, Homo sapiens
tcccacaccacccgcctcccctgccgcctcctgccaccccctaggccaaggtaataatcatcctgaatcctgggtttatctctcacttgctttcttttcatataattttgcaaaagaatctgatctaaatgtgtttttcagagtatatatttatattttagctgttcttagagaaaatttattattttgcatgtaatcttatggaacattctcatttaataccatggtaagattcagcccttgcccaggggatagttcatttagtttgtttactggatagagctcatcatgtgactatacctcagttagtttatcagttctcccatccatggtgactaggttgcctctcagcctctcaacaacactgtttctcagtgtccttgtagaagtgatatgtgggtgttttctccttacacagagttgaaaggtgacgacaacaacgttggcactaccaatcccccaccctccagaggggtaaccagtgttaccagtttgctgtgtttcctgctacacctcgccttattcacttccatttgtatctgaaaaacgtgttgcatggtttcttttctatagaagtggtaaaatgctattgtgtcctgtacattattgattactttttttcatttaacagtagggagatgcctgggagtacacagagaactgccctcattgttttcaacttctgcactgtatgtctgtgagtttagccattctgctgttaatggaaatttacagtattctaatcttttgatattacaaacagttctgtgcgatcatcgtcatacacaaccccttgtgcacaatgcatgagtgtttctcagggtaggtaccaagaagtgaaattcctgggtcatagggcgtgagtccgacatttttctccattctgccctgttgccctccagagtgggtgtccagctttgcatacctaagtatgagagtatctgttgttcatatcctctacgacgctccatatatgaaacttaagtttctgctagttgccatctttgatctatcatgtatgcagtgacctactaagactgtaattggtacagtagattcttgtcatctgtgtgtgaatttagcattcatgggcttaatgctgacaaggcccccagggtccaagacatataatcatgtataattttgtcaaggtataattttttaaattgcttttgtcatgtgtctgctggtgatgcccaacccagtgctctgcacccaggtcacactgtggctttgtcctctgcttatgcctgcattgcagcaactgtcctgaagagaccaaaattatgcagatttaggtaagtccatggctaatgttattatattatgtgctattgtaatggatggggctgtggagtgtatgaatttataaatcactggtcttgtaattaaaattcaaacactatagaaaaaggccatgtagaagataaaagttcctctataatcccggacccctaagataactactaatgacaacttcatttatattccttcagacattttctggctgtggatgtactaaaatgtatcctattattctctgccctaaaatggaatcatacaaggtgtactgttatttttatggctctataacatgtcatattgtacgtgttggtatggtcattttaaccatttttctagtgatggctttgaggttatttgcagtttcctagccatctcaaagtgtgctgcggggatctcttttgcatccctctgggtgcagagctgaggcacccagaggcagtgtccagaggaggcagcatctgtaggtgtcttcacctgctctggctcttggcacatctggttggtgacactgttttgtgagatgggttgaaagcacgtgctgccaaaatagaataatgttggtcctctcctcatgtgccgtggaactggggtaaaactgcgtagtggctgcagctgcctgtccataccggaatcgagtataacacggtgcctggcttagcacaaaacagtagtgggtcctgcaggccccagagtctaattcctggtattctttcccctacacagattaaataaaccaaaaacaaactattctaggaaagcgtctgtgacatttgtaaaaagtggtatttaatgatcttttattcacttgtctgtttagtttgttgaaatcttaagtggcatcctggtctgggaaggagtgctgtctgcgcctgccctccgctgggcacagcgtggctgcttcaggggctaagcacacactttctgtcttctaaagggccgccacatgccaggagctcaggtgtgagcccggctctggctcttacctcatagggtcactcataggggcacagggagcagaacattgtacacagcgaggcaccacccggcttggcatctgcctcggtggacttactacctctagaaggaaatacctgagttcctctggcctcagctcctagagtgactggtgtgctgtccctgttactcttctgtcaaggtgacaactgtgtgacccatcatctgtgtgtcaaagcaaggccctgcctgggcctctgctcctgtccgggctgcacaaaggcaaatgctttgctagtttccttccagttaatttcacctatgaatagatgtgtgaaaactgttcaaagccatacctgcacatgtttgaacttcaaaccctgtgggtgattcagtggcatctttctctaacccccagcctcccttcccacagaggccaccgtcatggccagttgctgcagtttctttccagagaacctgtgtatgtgtaaagctgtacaggcgtgggtacaccacacagcctgtcttgcactgtggactgttgagttactagtacatctaggtaagcaccgcatatctgtattcatgtctgccttggtcttttcaacatctttgtggtagccgtgtttgaattacccattccctttttggggaaccattaagttgtttcagcaatttttactgtagataaggctataccgcatatctgtgtacatgggtttttatgtacatgggcaagtatatctgtgagagaaaagtttcctcaggaggaattctgggcacagcatgtgtaaatttctaaatatgatggacacccccagcttccacctcaaggaggttggtcccattgacatttccccacaccttcacccaggctgtgcccttaaacttggttatttgtcaatgtgagaagtggaaaatagtatttaattgtagtttggatttgtatttctattgggttgtatacttactgattaataataagagctctttacatattaaggaaattaacccttttcaaatacattcctatttctcactaatctttaagttttattgtaatattttgctctttagtttatatatatatgtatatatatatatatgtatatatatatatatacatatatatatacatatatatatactaattttcttttatggttcctggattttgtgagtagtttgaaaaggctaatccagctgaagattttgttgttgttgttaaaccccatgttttctcctaactctttttatttttattttggaggactctatctagacttaattttagcataacaagtgacagggttagttagcctgttgtccttacaccattttctggctaatacagctattaactattgatctgtctattcacgtgccagttcctaatggttttacatagtgtaatctgcacttcaaaatagcgaagggaagccctacctcattattctacttttccagaattctcctggctattccaggctgcatgtttaccttaaccttccctgtgatgtcttcatgccgttgtcttcttatgcaagaataaggtacgtctttccatccactcacgtctatttaatttgactttgcattacacagaaagctggtcttggtctgtctacctcggcatctagttgtcctcactgccccctagccgaccccaccccatctgactgactaccccatcacagagtacttttatttacgttttgctctgcctaatggttacttgatactgtcacgccgacagtgtccagttcagtggtctttgcagttgaaatgctcccgtacacactgtcttgttaaaaatgccagtaagttcatacaaacccagcttgcacccaaggtcacattcagagagcgtagggctgggatgggttgttttccaagcttctgccactgtgtggctagctcttcccactgggaagttctgtgtacccggaatgtcggagtggagtcctgttctagtgtccagcacctgaccctgtgcccaacccctcaacagcctattcctgctgtccacagcctgctggaactttttacaaaatatgttgccatgctggaccctgggcactggacataagccccctggcagcctttttcatgtcacccaaaggggtaattgtcctactggtggtctgtaagatgagttagggtgacttgctaatagacattgtaaatcttaatatttatgtatgtattttattattaccggttttccatttatgatggtaatattgtttcttctaagaatatttatttttccttctaaatattgagataaaattcatgcttttgaaatgttctattcagtggcttttagtatatttgctatgttgtgcaaccatcgacactatccatttctagaactttttcgtcatcccaaacagacgctctgtattcataaaaaaataacttcctacctgtctctccccctagtctttggtaacctttgttatactggtaaactttgttgtgctctctgtctgtgtgaatttgcctattctaggggcctcatataagtgtaatcatacagtatttgtctttttgggtctgtctgatttcacttagcgggttttcagggttcattcatgttgcagcatataacagtactgcgttcctttttctggctgaataatattccactgtatggatagaccccattttgtttattcacacatcatttggacatttggattatttctggtttttggctattatgaacaatggtgctatgaacagttgcgtacaagtttttgtgtgaacatatgttttcaattctctcattatatacctaggagtagaattactgggtcatatggtaactgtatatttttgaggaactgccaaactattttcccacgtccatgcaccatttcacattcccaccagtaagtaagagggttccaatttctgcgcattcttgccaacactagttattatctgactttctggttataatcattctaatgagtgtgaagtagcctctggtgtcatttggatttgcatttctctgatgagtgatgctatcaagcacctttgctggtgctgttggccatatgtgtatgttccctggagaagtgtctgtgctgagccttggcccactttttaattaggcgtttgtctttttattactgagttgtaagagttctttatatattctggattctagacccttatcagatacatggtttgcaaatattttctcccattctgtgggttgtgttttcactttatcgataatgtccttagacatataataaatttgtattttaaaagtgacttgatttggctgtgcaaggtggctcacgcttgtaatcccagcactttgggagactgaggtgggtggatcatatgaggaggctaggagttcgaggtcagcctggccagcatagcgaaaacttgtctctactaaaaatacaaaaattagtcaggcatggtggtgcacgtctgtaataccagcttctcaggaggctgaggcacgaggatcacttgaacccaggaggaggaggttgcagtgagctgagatcatgccagggcaacaccattgcactccagcctgggcaacagagcaagactcccatcttcaaaaataaaattaaatatataaaaagcatgggtttccggttaagaactacggtcaggtaggttcctatacaggtcttatgttctatatcttaagtggttggtgctaaggaagcttggtctttgtcttctttccacttgtttctttaatcatattagggattgtcc

SEQ ID NO: 455605 - DNA, 1932 bp, Homo sapiens
tacagaggatcccgtaagcaccctaaccaggggtggggacctttgggctctgacccgaagggtaggagaagctggaaggacagcattcctgtctgcgaaggcaggagcaaagctgccaggctatgaaggaaatggctggagcctgaagtcatgcaagctggggctggcagggacagggccaacttccaggcctgggggccaccatgaggattcaggacgtgacccccagggcacatgaaggccttccatctgtatttaagaaaagactttatcagacgagtatggtggctcacgcctgaatcttagcactttgggaggctgaggcaggtggatcacgaggtcaggagttcaataccagcctggccaatatggtaaaaccccatctctactaaaactacaaaaattagccaggcatggtggcgcacgcctgtagtcccagctactcgggaggctgaggcagaagaatcacttgaacccgggaggtggaggttacagtgagccaagatcgcgccactacactccagcctgggtgacagagtgagactccgtctcaaaaaaaccaaaagactttatcttatttcctatatgtttgtggtttcagtcctgatgtataatttgaccctagttagaatggttatctgaggaagtggcctgtacgatttctgcttttttaaatgtgtggctccctttcttcattgattaacgtatgattatttttataaatgttccatggcagtgggaagggattctctgtcacattccacatctggatcagttcctccccattttgttggtcaaatccgatctgccatatcctgtgtaatgacaagtgagttgcattctcaccgtcactcctggggtctctccgcttcccctgagctggctcagcagtctgctccatgtgttttgatgcagggtgacccattggtattcccgacactaacgcccccgtctgtggactgcttgctgcttgggcttcactgtgtctggtgttgacagtgcagacctaaaggtgtgcacacatgtgcacacacactccgctgtcttcttgtttgcactggacttaaatatctatgagggttattttcaactgctgaatttggaatgatttttatatcttttctgctttctgcccatgtacatgtgtttattttacactgttgtgattggtagttactatgtggggacacaattacttgggctgaaataatccacctgttgtggttggggtcctctggggcattccagggtgagaggttgtcactgccacctgggccatgtgggccggcaccagcattttgtggttacgaattctacagtcacaaatatctttgggcaaatccccttctatacctcaaggcagcttttggtttgcaaccccactggccagagggaagggccagtcacttggctctctcactgccctgcgccccagatggttctagggctgctgttttcccttggccctgccaacaccactgtttttacttctgctcattggctgagtgcagtggttcctggaagccagtggcacgtttccccgcgtagctcgcttatcccacagcacacacccaagggttctgttgctaacacgctgaattaattctttgctcatcttacagagtgtgttttgactgcccccatttctgaggccttgtaaggccagagctttgttgcttcatcggcaggttgggacttagatggccgtgaatgtttcctctctgctgctgcagtaagtaagtgcccgcaccatagtgtgtttggaggctgaagttgaagcgaggctgtgaggggagatggacgtgtgaggagggatgatggggcttgagcaaagtgggggagggggcaaaggcagttggcccaacacattccccacccctttgagaggtctgaggcctgcagacctggctcggagcccacctggtagtcctc

SEQ ID NO: 455606 - DNA, 2887 bp, Homo sapiens
gcctgagtcggttaggtagctctaaaaactcgtaactccacaacagctcaatggattttcgagaggtggggtaaagcctgaaggctcagccggtttatccaacgagcaatctgggatttgcagtttccagcgcccgaagtgcgcccgctagcagagagctcttggactctaatcccgccccctccccgagcctcgcgcatcctgatggcgtcacgcggccccgcgaggtctgtgggatacatagtagtcctcaaggcgggtctcactcttggccgctgcaacttgaggactacacttccaaggaggcagcgcggcggcgcgccgagaaccacccgaggccgtgattggctggtgagccggccgcacgcggaggatcctaaggagcagctctgttgcgacataggccgagcagcgaggcccagctccctgaaacaacagtaacctacccctgtgggtcatcatcatgccctccgacctggccaagaagaaggcagccaaaaagaaggaggctgccaaagctcgacagcggcccagaaaaggacatgaagaaaatggagatgttgtcacagaaccacaggtggcagagaagaatgaggccaatggcagagagaccacagaagtagatttgctgaccaaggagctagaggactttgagatgaagaaagctgctgctcgagctgtcactggcgtcctggcctctcaccccaacagtactgatgttcacatcatcaacctctcactcacctttcatggtcaagagctgctcagtgacaccaaactggaattaaactcaggccgtcgttatggcctcattggtttaaatggaattggaaagtccatgctgctctctgctattgggaagcgtgaagtgcccatccctgagcacatcgacatctaccatctgactcgagagatgccccctagtgacaagacacccttgcattgtgtgatggaagtcgacacagagcgggccatgctggagaaagaggcagagcggctggctcatgaggatgcggagtgtgagaagctcatggagctctacgagcgcctggaggagctggatgccgacaaggcagagatgagggcctcgcggatcttgcatggactgggtttcacacctgccatgcagcgcaagaagctaaaagacttcagtgggggctggaggatgagggttgcccttgccagagccctctttattcggcccttcatgctgctcctggatgagcctaccaaccacctggacctagatgcttgcgtgtggttggaagaagaactaaaaacttttaagcgcatcttggtcctcgtctcccattcccaggattttctgaatggtgtctgtaccaatatcattcacatgcacaacaagaaactgaagtattatacgggtaattatgatcagtatgtgaagacgcggctagagctggaggagaaccagatgaagaggtttcactgggagcaagatcagattgcacacatgaagaactacattgcgaggtttggtcatggcagtgccaagctggcccggcaggcccagagcaaggagaagacgctacagaaaatgatggcatcaggactgacagagagggtcgtgagcgataagacactgtcattttatttcccaccatgtggcaagatccctccacctgtcattatggtgcaaaatgtgagcttcaagtatacaaaagatgggccttgcatctacaataatctagaatttggaattgaccttgacacacgagtggctctggtagggcccaatggagcagggaagtcaactcttctgaagctgctaactggagagctactacccacagatggcatgatccgaaaacactctcatgtcaagatagggcgttaccatcagcatttacaagagcagctggacttagatctctcacctttggagtacatgatgaagtgctacccagagatcaaggagaaggaagaaatgaggaagatcattgggcgatacggtctcactgggaaacaacaggtgagcccaatccggaacttgtcagacgggcagaagtgccgagtgtgtctggcctggctggcctggcagaacccccacatgctcttcctggatgaacccaccaatcacctggatatcgagaccatcgacgccctggcagatgccatcaatgagtttgagggtggtatgatgctggtcagccatgacttcagactcattcagcaggttgcacaggaaatttgggtctgtgagaagcagacaatcaccaagtggcctggagacatcctggcttacaaggagcacctcaagtccaagctggtggatgaggagccccagctcaccaagaggacccacaacgtgtgagccctctacctgggttcgggtcaggagctccatctgggaactaacagctgctaacctgaccagccgctcaggacaggaccctggggctacactcctgcattgctgcaatactgctcccccagcctctcccctgcccctcaacctgccttagctgcactctcttacctacagctggacagtacctgtctgtttcctgtcctccttccagttacatctgtccatgtctggactcggctggccgttccctccagccccttgctggttatcttactctgagtgtgatgcagtcagaggcacctgcgggttagcccaggggcccaagccctggatttggcctgcggaggagcttaggatcctcgttttctgggttttggtgatgttggaggagtaccccccagcccaccgccccgattcctttttgcttctggtttggagctccggaccaggaccttcgtcctggtcagtttttaaataattatttagcagtgtaacttttaaacctgcgtgacatctacaaagcgcccaataaagaaagaggaagccacggtccct

SEQ ID NO: 455607 - DNA, 2571 bp, Homo sapiens
ggacgggaggaggaagcccggaaagtgaggcggctagctgagtgcggagcgccaagttgtagggaaaccggagacggagacctccgctgaggggcagaacctggtccccagccggaggccctgaaagaaggagcgtttccaaagtgaggcagtccgtgggggactggtgcctgtgggaagagatgttaagattagaagagccgctgagaatcggcattggtttgggataccctgaccaagttggaacagacgaggcgggggcaggccagggcatcagaggcttgatgttgatacgaagattcctgagagggatggagcagggcccaggcattcttactagtaagtttagggtttgggggtatctgtttgccttccttcaggctccctgaagctccctgaaacaacagtaacctacccctgtgggtcatcatcatgccctccgacctggccaagaagaaggcagccaaaaagaaggaggctgccaaagctcgacagcggcccagaaaaggacatgaagaaaatggagatgttgtcacagaaccacaggtggcagagaagaatgaggccaatggcagagagaccacagaagtagatttgctgaccaaggagctagaggactttgagatgaagaaagctgctgctcgagctgtcactggcgtcctggcctctcaccccaacagtactgatgttcacatcatcaacctctcactcacctttcatggtcaagagctgctcagtgacaccaaactggaattaaactcaggccgtcgttatggcctcattggtttaaatggaattggaaagtccatgctgctctctgctattgggaagcgtgaagtgcccatccctgagcacatcgacatctaccatctgactcgagagatgccccctagtgacaagacacccttgcattgtgtgatggaagtcgacacagagcgggccatgctggagaaagaggcagagcggctggctcatgaggatgcggagtgtgagaagctcatggagctctacgagcgcctggaggagctggatgccgacaaggcagagatgagggcctcgcggatcttgcatggactgggtttcacacctgccatgcagcgcaagaagctaaaagacttcagtgggggctggaggatgagggttgcccttgccagagccctctttattcggcccttcatgctgctcctggatgagcctaccaaccacctggacctagatgcttgcgtgtggttggaagaagaactaaaaacttttaagcgcatcttggtcctcgtctcccattcccaggattttctgaatggtgtctgtaccaatatcattcacatgcacaacaagaaactgaagtattatacgggtaattatgatcagtatgtgaagacgcggctagagctggaggagaaccagatgaagaggtttcactgggagcaagatcagattgcacacatgaagaactacattgcgaggtttggtcatggcagtgccaagctggcccggcaggcccagagcaaggagaagacgctacagaaaatgatggcatcaggactgacagagagggtcgtgagcgataagacactgtcattttatttcccaccatgtggcaagatccctccacctgtcattatggtgcaaaatgtgagcttcaagtatacaaaagatgggccttgcatctacaataatctagaatttggaattgaccttgacacacgagtggctctggtagggcccaatggagcagggaagtcaactcttctgaagctgctaactggagagctactacccacagatggcatgatccgaaaacactctcatgtcaagatagggcgttaccatcagcatttacaagagcagctggacttagatctctcacctttggagtacatgatgaagtgctacccagagatcaaggagaaggaagaaatgaggaagatcattgggcgatacggtctcactgggaaacaacaggtgagcccaatccggaacttgtcagacgggcagaagtgccgagtgtgtctggcctggctggcctggcagaacccccacatgctcttcctggatgaacccaccaatcacctggatatcgagaccatcgacgccctggcagatgccatcaatgagtttgagggtggtatgatgctggtcagccatgacttcagactcattcagcaggttgcacaggaaatttgggtctgtgagaagcagacaatcaccaagtggcctggagacatcctggcttacaaggagcacctcaagtccaagctggtggatgaggagccccagctcaccaagaggacccacaacgtgtgcaccctgacattggcatctctgccaaggccatgagcatcatgaactcgtttgtaaacgacgtgtttgagcagctggcgtgtgaggctgcccggctggcccagtactcgggccggaccaccctgacatcccgagaagtccagacggctgtgcgtctgctgctgcctggggagctggccaagcacgctgtgtctgagggcaccaaggctgtcaccaagtacaccagctccaagtgacccagggcctgacaaaaataaagggtgaactgtt

SEQ ID NO: 455608 - DNA, 2856 bp, Homo sapiens
ggacgggaggaggaagcccggaaagtgaggcggctagctgagtgcggagcgccaagttgtagggaaaccggagacggagacctccgctgaggggcagaacctggtccccagccggaggccctgaaagaaggagcgtttccaaagtgaggcagtccgtgggggactggtgcctgtgggaagagatgttaagattagaagagccgctgagaatcggcattggtttgggataccctgaccaagttggaacagacgaggcgggggcaggccagggcatcagaggcttgatgttgatacgaagattcctgagagggatggagcagggcccaggcattcttactagtaagtttagggtttgggggtatctgtttgccttccttcaggctccctgaagctccctgaaacaacagtaacctacccctgtgggtcatcatcatgccctccgacctggccaagaagaaggcagccaaaaagaaggaggctgccaaagctcgacagcggcccagaaaaggacatgaagaaaatggagatgttgtcacagaaccacaggtggcagagaagaatgaggccaatggcagagagaccacagaagtagatttgctgaccaaggagctagaggactttgagatgaagaaagctgctgctcgagctgtcactggcgtcctggcctctcaccccaacagtactgatgttcacatcatcaacctctcactcacctttcatggtcaagagctgctcagtgacaccaaactggaattaaactcaggccgtcgttatggcctcattggtttaaatggaattggaaagtccatgctgctctctgctattgggaagcgtgaagtgcccatccctgagcacatcgacatctaccatctgactcgagagatgccccctagtgacaagacacccttgcattgtgtgatggaagtcgacacagagcgggccatgctggagaaagaggcagagcggctggctcatgaggatgcggagtgtgagaagctcatggagctctacgagcgcctggaggagctggatgccgacaaggcagagatgagggcctcgcggatcttgcatggactgggtttcacacctgccatgcagcgcaagaagctaaaagacttcagtgggggctggaggatgagggttgcccttgccagagccctctttattcggcccttcatgctgctcctggatgagcctaccaaccacctggacctagatgcttgcgtgtggttggaagaagaactaaaaacttttaagcgcatcttggtcctcgtctcccattcccaggattttctgaatggtgtctgtaccaatatcattcacatgcacaacaagaaactgaagtattatacgggtaattatgatcagtatgtgaagacgcggctagagctggaggagaaccagatgaagaggtttcactgggagcaagatcagattgcacacatgaagaactacattgcgaggtttggtcatggcagtgccaagctggcccggcaggcccagagcaaggagaagacgctacagaaaatgatggcatcaggactgacagagagggtcgtgagcgataagacactgtcattttatttcccaccatgtggcaagatccctccacctgtcattatggtgcaaaatgtgagcttcaagtatacaaaagatgggccttgcatctacaataatctagaatttggaattgaccttgacacacgagtggctctggtagggcccaatggagcagggaagtcaactcttctgaagctgctaactggagagctactacccacagatggcatgatccgaaaacactctcatgtcaagatagggcgttaccatcagcatttacaagagcagctggacttagatctctcacctttggagtacatgatgaagtgctacccagagatcaaggagaaggaagaaatgaggaagatcattgggcgatacggtctcactgggaaacaacaggtgagcccaatccggaacttgtcagacgggcagaagtgccgagtgtgtctggcctggctggcctggcagaacccccacatgctcttcctggatgaacccaccaatcacctggatatcgagaccatcgacgccctggcagatgccatcaatgagtttgagggtggtatgatgctggtcagccatgacttcagactcattcagcaggttgcacaggaaatttgggtctgtgagaagcagacaatcaccaagtggcctggagacatcctggcttacaaggagcacctcaagtccaagctggtggatgaggagccccagctcaccaagaggacccacaacgtgtgagccctctacctgggttcgggtcaggagctccatctgggaactaacagctgctaacctgaccagccgctcaggacaggaccctggggctacactcctgcattgctgcaatactgctcccccagcctctcccctgcccctcaacctgccttagctgcactctcttacctacagctggacagtacctgtctgtttcctgtcctccttccagttacatctgtccatgtctggactcggctggccgttccctccagccccttgctggttatcttactctgagtgtgatgcagtcagaggcacctgcgggttagcccaggggcccaagccctggatttggcctgcggaggagcttaggatcctcgttttctgggttttggtgatgttggaggagtaccccccagcccaccgccccgattcctttttgcttctggtttggagctccggaccaggaccttcgtcctggtcagtttttaaataattatttagcagtgtaacttttaaacctgcgtgacatctacaaagcgcccaataaagaaagaggaagccacggtccct

SEQ ID NO: 455609 - DNA, 2527 bp, Homo sapiens
cgcgaccatccgggcggcgaaaatagggcgagccagggcagagccagggccctgacgcagggctccctgaaacaacagtaacctacccctgtgggtcatcatcatgccctccgacctggccaagaagaaggcagccaaaaagaaggaggctgccaaagctcgacagcggcccagaaaaggacatgaagaaaatggagatgttgtcacagaaccacaggtggcagagaagaatgaggccaatggcagagagaccacagaagtagatttgctgaccaaggagctagaggactttgagatgaagaaagctgctgctcgagctgtcactggcgtcctggcctctcaccccaacagtactgatgttcacatcatcaacctctcactcacctttcatggtcaagagctgctcagtgacaccaaactggaattaaactcaggccgtcgttatggcctcattggtttaaatggaattggaaagtccatgctgctctctgctattgggaagcgtgaagtgcccatccctgagcacatcgacatctaccatctgactcgagagatgccccctagtgacaagacacccttgcattgtgtgatggaagtcgacacagagcgggccatgctggagaaagaggcagagcggctggctcatgaggatgcggagtgtgagaagctcatggagctctacgagcgcctggaggagctggatgccgacaaggcagagatgagggcctcgcggatcttgcatggactgggtttcacacctgccatgcagcgcaagaagctaaaagacttcagtgggggctggaggatgagggttgcccttgccagagccctctttattcggcccttcatgctgctcctggatgagcctaccaaccacctggacctagatgcttgcgtgtggttggaagaagaactaaaaacttttaagcgcatcttggtcctcgtctcccattcccaggattttctgaatggtgtctgtaccaatatcattcacatgcacaacaagaaactgaagtattatacgggtaattatgatcagtatgtgaagacgcggctagagctggaggagaaccagatgaagaggtttcactgggagcaagatcagattgcacacatgaagaactacattgcgaggtttggtcatggcagtgccaagctggcccggcaggcccagagcaaggagaagacgctacagaaaatgatggcatcaggactgacagagagggtcgtgagcgataagacactgtcattttatttcccaccatgtggcaagatccctccacctgtcattatggtgcaaaatgtgagcttcaagtatacaaaagatgggccttgcatctacaataatctagaatttggaattgaccttgacacacgagtggctctggtagggcccaatggagcagggaagtcaactcttctgaagctgctaactggagagctactacccacagatggcatgatccgaaaacactctcatgtcaagatagggcgttaccatcagcatttacaagagcagctggacttagatctctcacctttggagtacatgatgaagtgctacccagagatcaaggagaaggaagaaatgaggaagatcattgggcgatacggtctcactgggaaacaacaggtgagcccaatccggaacttgtcagacgggcagaagtgccgagtgtgtctggcctggctggcctggcagaacccccacatgctcttcctggatgaacccaccaatcacctggatatcgagaccatcgacgccctggcagatgccatcaatgagtttgagggtggtatgatgctggtcagccatgacttcagactcattcagcaggttgcacaggaaatttgggtctgtgagaagcagacaatcaccaagtggcctggagacatcctggcttacaaggagcacctcaagtccaagctggtggatgaggagccccagctcaccaagaggacccacaacgtgtgagccctctacctgggttcgggtcaggagctccatctgggaactaacagctgctaacctgaccagccgctcaggacaggaccctggggctacactcctgcattgctgcaatactgctcccccagcctctcccctgcccctcaacctgccttagctgcactctcttacctacagctggacagtacctgtctgtttcctgtcctccttccagttacatctgtccatgtctggactcggctggccgttccctccagccccttgctggttatcttactctgagtgtgatgcagtcagaggcacctgcgggttagcccaggggcccaagccctggatttggcctgcggaggagcttaggatcctcgttttctgggttttggtgatgttggaggagtaccccccagcccaccgccccgattcctttttgcttctggtttggagctccggaccaggaccttcgtcctggtcagtttttaaataattatttagcagtgtaacttttaaacctgcgtgacatctacaaagcgcccaataaagaaagaggaagccacggtccct

SEQ ID NO: 455610 - DNA, 4886 bp, Homo sapiens
gcctgagtcggttaggtagctctaaaaactcgtaactccacaacagctcaatggattttcgagaggtggggtaaagcctgaaggctcagccggtttatccaacgagcaatctgggatttgcagtttccagcgcccgaagtgcgcccgctagcagagagctcttggactctaatcccgccccctccccgagcctcgcgcatcctgatggcgtcacgcggccccgcgaggtctgtgggatacatagtagtcctcaaggcgggtctcactcttggccgctgcaacttgaggactacacttccaaggaggcagcgcggcggcgcgccgagaaccacccgaggccgtgattggctggtgagccggccgcacgcggaggatcctaaggagcagctctgttgcgacataggccgagcagcgaggcccagctccctgaaacaacagtaacctacccctgtgggtcatcatcatgccctccgacctggccaagaagaaggcagccaaaaagaaggaggctgccaaagctcgacagcggcccagaaaaggacatgaagaaaatggagatgttgtcacagaaccacaggtggcagagaagaatgaggccaatggcagagagaccacagaagtagatttgctgaccaaggagctagaggactttgagatgaagaaagctgctgctcgagctgtcactggcgtcctggcctctcaccccaacagtactgatgttcacatcatcaacctctcactcacctttcatggtcaagagctgctcagtgacaccaaactggaattaaactcaggccgtcgttatggcctcattggtttaaatggaattggaaagtccatgctgctctctgctattgggaagcgtgaagtgcccatccctgagcacatcgacatctaccatctgactcgagagatgccccctagtgacaagacacccttgcattgtgtgatggaagtcgacacagagcgggccatgctggagaaagaggcagagcggctggctcatgaggatgcggagtgtgagaagctcatggagctctacgagcgcctggaggagctggatgccgacaaggcagagatgagggcctcgcggatcttgcatggactgggtttcacacctgccatgcagcgcaagaagctaaaagacttcagtgggggctggaggatgagggttgcccttgccagagccctctttattcggcccttcatgctgctcctggatgagcctaccaaccacctggacctagatgcttgcgtgtggttggaagaagaactaaaaacttttaagcgcatcttggtcctcgtctcccattcccaggattttctgaatggtgtctgtaccaatatcattcacatgcacaacaagaaactgaagtattatacgggtaattatgatcagtatgtgaagacgcggctagagctggaggagaaccagatgaagaggtttcactgggagcaagatcagattgcacacatgaagaactacattgcgaggtttggtcatggcagtgccaagctggcccggcaggcccagagcaaggagaagacgctacagaaaatgatggcatcaggactgacagagagggtcgtgagcgataagacactgtcattttatttcccaccatgtggcaagatccctccacctgtcattatggtgcaaaatgtgagcttcaagtatacaaaagatgggccttgcatctacaataatctagaatttggaattgaccttgacacacgagtggctctggtagggcccaatggagcagggaagtcaactcttctgaagctgctaactggagagctactacccacagatggcatgatccgaaaacactctcatgtcaagatagggcgttaccatcagcatttacaagagcagctggacttagatctctcacctttggagtacatgatgaagtgctacccagagatcaaggagaaggaagaaatgaggaagatcattgggcgatacggtctcactgggaaacaacaggtgagcccaatccggaacttgtcagacgggcagaagtgccgagtgtgtctggcctggctggcctggcagaacccccacatgctcttcctggatgaacccaccaatcacctggatatcgagaccatcgacgccctggcagatgccatcaatgagtttgagggtggtatgatgctggtcagccatgacttcagactcattcagcaggttgcacaggaaatttgggtctgtgagaagcagacaatcaccaagtggcctggagacatcctggcttacaaggagcacctcaagtccaagctggatgccgacaaggcagagatgagggcctcgcggatcttgcatggactgggtttcacacctgccatgcagcgcaagaagctaaaagacttcaggacaggaccctggggctacactcctgcattgctgcaatactgctcccccagcctctcccctgcccctcaacctgccttagctgcactctcttacctacagctggacagtacctgtctgtttcctgtcctccttccagttacatctgtccatgtctggactcggctggccgttccctccagccccttgctggttatcttactctgagtgtgatgcagtcagaggcacctgcgggttagcccaggggcccaagccctggatttggcctgcggaggagcttaggatcctcgttttctgggttttggtgatgttggaggagtaccccccagcccaccgccccgattcctttttgcttctggtttggagctccggaccaggaccttcgtcctggtcagtttttaaataattatttagcagtgtaacttttaaacctgcgtgacatctacaaagcgcccaataaagaaagaggaagccacggtccctaccttccttctcgggtctctggggccttctcctccctgcagtgccaacatgcactgcccacagcaggagctggatccagcgtcagtgtgtcgatgggaactgaagactagtccataggagctggaagaactttgtccctttacttctgatttgaaattgtaccttttctcaggcctgtgattcacagactttaacatgaatcagaatcacctggagggctcatgcaatcagattgccagatctcgcctcagcgtttctggttcaataggttttgggggagaccaagaacgttaacatttctagcaagtttccaggtgatgctgttgttgctggtctagagactattttgagaaccactgtccaggagcgtggttttctgattgtgatctgaggttctgccccaactgcacagcagttgggctgcttgttaaaaatgcaggccaggtgcggtggctcacacctgtaatcccagcgctttgggaggctgaggcaggtggatcacttgagctcaggagttcaagaccagcttgggaaacatggcaaaacccgtctttatgtgcctggaatcccacctgctcaggtggctagggtggatggatcgcttgagcccaggaggtggaggttgcagtgagctgagattgcaccactgcattccagcctggatgacagagcaaaaccctgtctcaaaaaaatgcagactggccaggcacagtggctcacacctgtaatccgactgtaagctcatcaccttgggaggccactgtaggaggatcaattgagcctagaagttcaagaccagcctgggcaaagtagggagaccccttctctacaaatagtaataaaatgaaccgggcatagtagcatgtgcctgcggtcccagctgctctgataagaggaggctcacttgagcccaggaggttgaggctgcagtgagcagagcgtgccgctacactccagcctgatgacagaccgagacactgtctcaaaaaaataaaaaaattcagattgctgagcatcagacctattgattaatcgcatttggtagaatgagagaggtgcagagatggccaggagtttgcattttcacaccaacgtctgtgaacctctcttcctattgggatacaggaaattttgtatttttacctgtccacagccatagttatcatcactgttgaattcacttccagcccagggctctgcataccttatctgggtcttttgaacttcaatagcatttcaccagtggccatccttcctggtgtggattcatcactctgcctctgaaatcagccatccctatgggaagacacagccatgatttttcagtactcataatacagccaggactggcgggagcaactgtcccagatggtgcttaaaccccttaggagctcatgatcttcttggaaagccagtaagacagaaccatacaggacacaaattagatgctaaattgtgatttagataggagacagaagtattcaaaaagggagggaaatttcttgtgagtagctgcccagaaaggtggaattggtgtgctctcacttgaaaaatgagtaggatcttctcagatggccacaaagtccaggagctgccctgggcaacagggacaggagcctcccgtgagacactgcagctgagacagatgggagtcctctgaccccagagggtactggcttgactgctttatgccttaagtggggcctggagcaaaatggcccaggttagtctgtcctgagagtccagagccttggttcaggggagaatggcatctggagagtgggctgctgggataatggggacagtgagggacagagcccttgatacttaaggaagtgctggatattgctaagaattcaggtagtctcgggatctccagagtctccatgctaggacaggagatcttcagaacctggaggaatggaaatagtctagtcagcttatttgtcaagaaaaatgtcaaccttggtaatttaaataatgctttaaaagtccacaaaatacatatttctaaaattaaaaa

SEQ ID NO: 455611 - DNA, 2839 bp, Homo sapiens
gcctgagtcggttaggtagctctaaaaactcgtaactccacaacagctcaatggattttcgagaggtggggtaaagcctgaaggctcagccggtttatccaacgagcaatctgggatttgcagtttccagcgcccgaagtgcgcccgctagcagagagctcttggactctaatcccgccccctccccgagcctcgcgcatcctgatggcgtcacgcggccccgcgaggtctgtgggatacatagtagtcctcaaggcgggtctcactcttggccgctgcaacttgaggactacacttccaaggaggcagcgcggcggcgcgccgagaaccacccgaggccgtgattggctggtgagccggccgcacgcggaggatcctaaggagcagctctgttgcgacataggccgagcagcgaggcccagctccctgaaacaacagtaacctacccctgtgggtcatcatcatgccctccgacctggccaagaagaaggcagccaaaaagaaggaggctgccaaagctcgacagcggcccagaaaaggacatgaagaaaatggagatgttgtcacagaaccacaggtggcagagaagaatgaggccaatggcagagagaccacagaagtagatttgctgaccaaggagctagaggactttgagatgaagaaagctgctgctcgagctgtcactggcgtcctggcctctcaccccaacagtactgatgttcacatcatcaacctctcactcacctttcatggtcaagagctgctcagtgacaccaaactggaattaaactcaggccgtcgttatggcctcattggtttaaatggaattggaaagtccatgctgctctctgctattgggaagcgtgaagtgcccatccctgagcacatcgacatctaccatctgactcgagagatgccccctagtgacaagacacccttgcattgtgtgatggaagtcgacacagagcgggccatgctggagaaagaggcagagcggctggctcatgaggatgcggagtgtgagaagctcatggagctctacgagcgcctggaggagctggatgccgacaaggcagagatgagggcctcgcggatcttgcatggactgggtttcacacctgccatgcagcgcaagaagctaaaagacttcagtgggggctggaggatgagggttgcccttgccagagccctctttattcggcccttcatgctgctcctggatgagcctaccaaccacctggacctagatgcttgcgtgtggttggaagaagaactaaaaacttttaagcgcatcttggtcctcgtctcccattcccaggattttctgaatggtgtctgtaccaatatcattcacatgcacaacaagaaactgaagtattatacgggtaattatgatcagtatgtgaagacgcggctagagctggaggagaaccagatgaagaggtttcactgggagcaagatcagattgcacacatgaagaactacattgcgaggtttggtcatggcagtgccaagctggcccggcaggcccagagcaaggagaagacgctacagaaaatgatggcatcaggactgacagagagggtcgtgagcgataagacactgtcattttatttcccaccatgtggcaagatccctccacctgtcattatggtgcaaaatgtgagcttcaagtatacaaaagatgggccttgcatctacaataatctagaatttggaattgaccttgacacacgagtggctctggtagggcccaatggagcagggaagtcaactcttctgaagctgctaactggagagctactacccacagatggcatgatccgaaaacactctcatgtcaagatagggcgttaccatcagcatttacaagagcagctggacttagatctctcacctttggagtacatgatgaagtgctacccagagatcaaggagaaggaagaaatgaggaagatcattgggcgatacggtctcactgggaaacaacaggtgagcccaatccggaacttgtcagacgggcagaagtgccgagtgtgtctggcctggctggcctggcagaacccccacatgctcttcctggatgaacccaccaatcacctggatatcgagaccatcgacgccctggcagatgccatcaatgagtttgagggtggtatgatgctggtcagccatgacttcagactcattcagcaggttgcacaggaaatttgggtctgtgagaagcagacaatcaccaagtggcctggagacatcctggcttacaaggagcacctcaagtccaagctggtggatgaggagccccagctcaccaagaggacccacaacgtgtgagccctctacctgggttcgggtcaggagcttcattagcaatggttctaagaataacgttcaaaaacttaacatgggctacaatgcctgaaattgctgatctttagttactcctccagcttcattttgctctatatgctctccctcacactctttcaagccacaggggtctaccttcaggagagaaagcatataatttcatcccttctagtatatggggtgcacatgttatctccgtgtatcaaaacactctttgcctctccattgcgactagtttattcttggggattgcagcttaaatgtcaccataagagccttccgtgggcctccatactacgttagaatattatacactcttcataactagtgttttatcttccccttatagcagtgggggtcacttcttatccctaacatagcatacagtagtattcaatacatttgttgaaagaccatatgaatagagtagtgcgggtgagggtcccctattcagaattaagtgccaga

SEQ ID NO: 455612 - DNA, 1816 bp, Homo sapiens
cgtgggtgtatttgtgtacatacacacttctggttactatcactgttactaccgtctccatcccattctgttgaaaattagaacagaagattgaggaaactcaggctgtctcgccacactgaaaggcgtccaaatacccttacagttagattgtcgagtcgtggcttaggtgcttgctaacagccaggaattggacaacacatctaaaagttttaagcgcatcttggtcctcgtctcccattcccaggattttctgaatggtgtctgtaccaatatcattcacatgcacaacaagaaactgaagtattatacgggtaattatgatcagtatgtgaagacgcggctagagctggaggagaaccagatgaagaggtttcactgggagcaagatcagattgcacacatgaagaactacattgcgaggtttggtcatggcagtgccaagctggcccggcaggcccagagcaaggagaagacgctacagaaaatgatggcatcaggactgacagagagggtcgtgagcgataagacactgtcattttatttcccaccatgtggcaagatccctccacctgtcattatggtgcaaaatgtgagcttcaagtatacaaaagatgggccttgcatctacaataatctagaatttggaattgaccttgacacacgagtggctctggtagggcccaatggagcagggaagtcaactcttctgaagctgctaactggagagctactacccacagatggcatgatccgaaaacactctcatgtcaagatagggcgttaccatcagcatttacaagagcagctggacttagatctctcacctttggagtacatgatgaagtgctacccagagatcaaggagaaggaagaaatgaggaagatcattgggcgatacggtctcactgggaaacaacaggtgagcccaatccggaacttgtcagacgggcagaagtgccgagtgtgtctggcctggctggcctggcagaacccccacatgctcttcctggatgaacccaccaatcacctggatatcgagaccatcgacgccctggcagatgccatcaatgagtttgagggtggtatgatgctggtcagccatgacttcagactcattcagcaggttgcacaggaaatttgggtctgtgagaagcagacaatcaccaagtggcctggagacatcctggcttacaaggagcacctcaagtccaagctggtggatgaggagccccagctcaccaagaggacccacaacgtgtgagccctctacctgggttcgggtcaggagctccatctgggaactaacagctgctaacctgaccagccgctcaggacaggaccctggggctacactcctgcattgctgcaatactgctcccccagcctctcccctgcccctcaacctgccttagctgcactctcttacctacagctggacagtacctgtctgtttcctgtcctccttccagttacatctgtccatgtctggactcggctggccgttccctccagccccttgctggttatcttactctgagtgtgatgcagtcagaggcacctgcgggttagcccaggggcccaagccctggatttggcctgcggaggagcttaggatcctcgttttctgggttttggtgatgttggaggagtaccccccagcccaccgccccgattcctttttgcttctggtttggagctccggaccaggaccttcgtcctggtcagtttttaaataattatttagcagtgtaacttttaaacctgcgtgacatctacaaagcgcccaataaagaaagaggaagccacggtccct

SEQ ID NO: 455613 - DNA, 3620 bp, Homo sapiens
gcctgagtcggttaggtagctctaaaaactcgtaactccacaacagctcaatggattttcgagaggtggggtaaagcctgaaggctcagccggtttatccaacgagcaatctgggatttgcagtttccagcgcccgaagtgcgcccgctagcagagagctcttggactctaatcccgccccctccccgagcctcgcgcatcctgatggcgtcacgcggccccgcgaggtctgtgggatacatagtagtcctcaaggcgggtctcactcttggccgctgcaacttgaggactacacttccaaggaggcagcgcggcggcgcgccgagaaccacccgaggccgtgattggctggtgagccggccgcacgcggaggatcctaaggagcagctctgttgcgacataggccgagcagcgaggcccagctccctgaaacaacagtaacctacccctgtgggtcatcatcatgccctccgacctggccaagaagaaggcagccaaaaagaaggaggctgccaaagctcgacagcggcccagaaaaggacatgaagaaaatggagatgttgtcacagaaccacaggtggcagagaagaatgaggccaatggcagagagaccacagaagtagatttgctgaccaaggagctagaggactttgagatgaagaaagctgctgctcgagctgtcactggcgtcctggcctctcacgtgagcccaatccggaacttgtcagacgggcagaagtgccgagtgtgtctggcctggctggcctggcagaacccccacatgctcttcctggatgaacccaccaatcacctggatatcgagaccatcgacgccctggcagatgccatcaatgagtttgagggtggtatgatgctggtcagccatgacttcagactcattcagcaggttgcacaggaaatttgggtctgtgagaagcagacaatcaccaagtggcctggagacatcctggcttacaaggagcacctcaagtccaagctggtggatgaggagccccagctcaccaagaggacccacaacgtgtgagccctctacctgggttcgggtcaggagctccatctgggaactaacagctgctaacctgaccagccgctcaggacaggaccctggggctacactcctgcattgctgcaatactgctcccccagcctctcccctgcccctcaacctgccttagctgcactctcttacctacagctggacagtacctgtctgtttcctgtcctccttccagttacatctgtccatgtctggactcggctggccgttccctccagccccttgctggttatcttactctgagtgtgatgcagtcagaggcacctgcgggttagcccaggggcccaagccctggatttggcctgcggaggagcttaggatcctcgttttctgggttttggtgatgttggaggagtaccccccagcccaccgccccgattcctttttgcttctggtttggagctccggaccaggaccttcgtcctggtcagtttttaaataattatttagcagtgtaacttttaaacctgcgtgacatctacaaagcgcccaataaagaaagaggaagccacggtccctaccttccttctcgggtctctggggccttctcctccctgcagtgccaacatgcactgcccacagcaggagctggatccagcgtcagtgtgtcgatgggaactgaagactagtccataggagctggaagaactttgtccctttacttctgatttgaaattgtaccttttctcaggcctgtgattcacagactttaacatgaatcagaatcacctggagggctcatgcaatcagattgccagatctcgcctcagcgtttctggttcaataggttttgggggagaccaagaacgttaacatttctagcaagtttccaggtgatgctgttgttgctggtctagagactattttgagaaccactgtccaggagcgtggttttctgattgtgatctgaggttctgccccaactgcacagcagttgggctgcttgttaaaaatgcaggccaggtgcggtggctcacacctgtaatcccagcgctttgggaggctgaggcaggtggatcacttgagctcaggagttcaagaccagcttgggaaacatggcaaaacccgtctttatgtgcctggaatcccacctgctcaggtggctagggtggatggatcgcttgagcccaggaggtggaggttgcagtgagctgagattgcaccactgcattccagcctggatgacagagcaaaaccctgtctcaaaaaaatgcagactggccaggcacagtggctcacacctgtaatccgactgtaagctcatcaccttgggaggccactgtaggaggatcaattgagcctagaagttcaagaccagcctgggcaaagtagggagaccccttctctacaaatagtaataaaatgaaccgggcatagtagcatgtgcctgcggtcccagctgctctgataagaggaggctcacttgagcccaggaggttgaggctgcagtgagcagagcgtgccgctacactccagcctgatgacagaccgagacactgtctcaaaaaaataaaaaaattcagattgctgagcatcagacctattgattaatcgcatttggtagaatgagagaggtgcagagatggccaggagtttgcattttcacaccaacgtctgtgaacctctcttcctattgggatacaggaaattttgtatttttacctgtccacagccatagttatcatcactgttgaattcacttccagcccagggctctgcataccttatctgggtcttttgaacttcaatagcatttcaccagtggccatccttcctggtgtggattcatcactctgcctctgaaatcagccatccctatgggaagacacagccatgatttttcagtactcataatacagccaggactggcgggagcaactgtcccagatggtgcttaaaccccttaggagctcatgatcttcttggaaagccagtaagacagaaccatacaggacacaaattagatgctaaattgtgatttagataggagacagaagtattcaaaaagggagggaaatttcttgtgagtagctgcccagaaaggtggaattggtgtgctctcacttgaaaaatgagtaggatcttctcagatggccacaaagtccaggagctgccctgggcaacagggacaggagcctcccgtgagacactgcagctgagacagatgggagtcctctgaccccagagggtactggcttgactgctttatgccttaagtggggcctggagcaaaatggcccaggttagtctgtcctgagagtccagagccttggttcaggggagaatggcatctggagagtgggctgctgggataatggggacagtgagggacagagcccttgatacttaaggaagtgctggatattgctaagaattcaggtagtctcgggatctccagagtctccatgctaggacaggagatcttcagaacctggaggaatggaaatagtctagtcagcttatttgtcaagaaaaatgtcaaccttggtaatttaaataatgctttaaaagtccacaaaatacatatttctaaaattaaaaa

SEQ ID NO: 455614 - DNA, 461 bp, Homo sapiens
ttgatgttgatacgaagattcctgagagggatggagcagggcccaggcattcttactagtaagtttagggtttgggggtatctgtttgccttccttcaggctccctgaagctccctgaaacaacagtaacctacccctgtgggtcatcatcatgccctccgacctggccaagaagaaggcagccaaaaagaaggaggctgccaaagctcgacagcggcccagaaaaggacatgaagaaaatggagatgttgtcacagaaccacaggtggcagagaagaatgaggccaatggcagagagaccacaggtgaattgagggaggggtgagttggggatggttgctaagacttaatgcatgccccagccagagttggaatcttgatgctgggggtagtggagaatgtatctggtgtcatgcaacttttcatgatgaatcaaatcagtagagttggaattcgtgcca

SEQ ID NO: 455615 - DNA, 4910 bp, Homo sapiens
gcctgagtcggttaggtagctctaaaaactcgtaactccacaacagctcaatggattttcgagaggtggggtaaagcctgaaggctcagccggtttatccaacgagcaatctgggatttgcagtttccagcgcccgaagtgcgcccgctagcagagagctcttggactctaatcccgccccctccccgagcctcgcgcatcctgatggcgtcacgcggccccgcgaggtctgtgggatacatagtagtcctcaaggcgggtctcactcttggccgctgcaacttgaggactacacttccaaggaggcagcgcggcggcgcgccgagaaccacccgaggccgtgattggctggtgagccggccgcacgcggaggatcctaaggagcagctctgttgcgacataggccgagcagcgaggcccagctccctgaaacaacagtaacctacccctgtgggtcatcatcatgccctccgacctggccaagaagaaggcagccaaaaagaaggaggctgccaaagctcgacagcggcccagaaaaggacatgaagaaaatggagatgttgtcacagaaccacaggtggcagagaagaatgaggccaatggcagagagaccacagaagtagatttgctgaccaaggagctagaggactttgagatgaagaaagctgctgctcgagctgtcactggcgtcctggcctctcaccccaacagtactgatgttcacatcatcaacctctcactcacctttcatggtcaagagctgctcagtgacaccaaactggaattaaactcaggccgtcgttatggcctcattggtttaaatggaattggaaagtccatgctgctctctgctattgggaagcgtgaagtgcccatccctgagcacatcgacatctaccatctgactcgagagatgccccctagtgacaagacacccttgcattgtgtgatggaagtcgacacagagcgggccatgctggagaaagaggcagagcggctggctcatgaggatgcggagtgtgagaagctcatggagctctacgagcgcctggaggagctggatgccgacaaggcagagatgagggcctcgcggatcttgcatggactgggtttcacacctgccatgcagcgcaagaagctaaaagacttcagtgggggctggaggatgagggttgcccttgccagagccctctttattcggcccttcatgctgctcctggatgagcctaccaaccacctggacctagatgcttgcgtgtggttggaagaagaactaaaaacttttaagcgcatcttggtcctcgtctcccattcccaggattttctgaatggtgtctgtaccaatatcattcacatgcacaacaagaaactgaagtattatacgggtaattatgatcagtatgtgaagacgcggctagagctggaggagaaccagatgaagaggtttcactgggagcaagatcagattgcacacatgaagaactacattgcgaggtttggtcatggcagtgccaagctggcccggcaggcccagagcaaggagaagacgctacagaaaatgatggcatcaggactgacagagagggtcgtgagcgataagacactgtcattttatttcccaccatgtggcaagatccctccacctgtcattatggtgcaaaatgtgagcttcaagtatacaaaagatgggccttgcatctacaataatctagaatttggaattgaccttgacacacgagtggctctggtagggcccaatggagcagggaagtcaactcttctgaagctgctaactggagagctactacccacagatggcatgatccgaaaacactctcatgtcaagatagggcgttaccatcagcatttacaagagcagctggacttagatctctcacctttggagtacatgatgaagtgctacccagagatcaaggagaaggaagaaatgaggaagatcattgggcgatacggtctcactgggaaacaacaggtgagcccaatccggaacttgtcagacgggcagaagtgccgagtgtgtctggcctggctggcctggcagaacccccacatgctcttcctggatgaacccaccaatcacctggatatcgagaccatcgacgccctggcagatgccatcaatgagtttgagggtggtatgatgctggtcagccatgacttcagactcattcagcaggttgcacaggaaatttgggtctgtgagaagcagacaatcaccaagtggcctggagacatcctggcttacaaggagcacctcaagtccaagctggtggatgaggagccccagctcaccaagaggacccacaacgtgtgagccctctacctgggttcgggtcaggagctccatctgggaactaacagctgctaacctgaccagccgctcaggacaggaccctggggctacactcctgcattgctgcaatactgctcccccagcctctcccctgcccctcaacctgccttagctgcactctcttacctacagctggacagtacctgtctgtttcctgtcctccttccagttacatctgtccatgtctggactcggctggccgttccctccagccccttgctggttatcttactctgagtgtgatgcagtcagaggcacctgcgggttagcccaggggcccaagccctggatttggcctgcggaggagcttaggatcctcgttttctgggttttggtgatgttggaggagtaccccccagcccaccgccccgattcctttttgcttctggtttggagctccggaccaggaccttcgtcctggtcagtttttaaataattatttagcagtgtaacttttaaacctgcgtgacatctacaaagcgcccaataaagaaagaggaagccacggtccctaccttccttctcgggtctctggggccttctcctccctgcagtgccaacatgcactgcccacagcaggagctggatccagcgtcagtgtgtcgatgggaactgaagactagtccataggagctggaagaactttgtccctttacttctgatttgaaattgtaccttttctcaggcctgtgattcacagactttaacatgaatcagaatcacctggagggctcatgcaatcagattgccagatctcgcctcagcgtttctggttcaataggttttgggggagaccaagaacgttaacatttctagcaagtttccaggtgatgctgttgttgctggtctagagactattttgagaaccactgtccaggagcgtggttttctgattgtgatctgaggttctgccccaactgcacagcagttgggctgcttgttaaaaatgcaggccaggtgcggtggctcacacctgtaatcccagcgctttgggaggctgaggcaggtggatcacttgagctcaggagttcaagaccagcttgggaaacatggcaaaacccgtctttatgtgcctggaatcccacctgctcaggtggctagggtggatggatcgcttgagcccaggaggtggaggttgcagtgagctgagattgcaccactgcattccagcctggatgacagagcaaaaccctgtctcaaaaaaatgcagactggccaggcacagtggctcacacctgtaatccgactgtaagctcatcaccttgggaggccactgtaggaggatcaattgagcctagaagttcaagaccagcctgggcaaagtagggagaccccttctctacaaatagtaataaaatgaaccgggcatagtagcatgtgcctgcggtcccagctgctctgataagaggaggctcacttgagcccaggaggttgaggctgcagtgagcagagcgtgccgctacactccagcctgatgacagaccgagacactgtctcaaaaaaataaaaaaattcagattgctgagcatcagacctattgattaatcgcatttggtagaatgagagaggtgcagagatggccaggagtttgcattttcacaccaacgtctgtgaacctctcttcctattgggatacaggaaattttgtatttttacctgtccacagccatagttatcatcactgttgaattcacttccagcccagggctctgcataccttatctgggtcttttgaacttcaatagcatttcaccagtggccatccttcctggtgtggattcatcactctgcctctgaaatcagccatccctatgggaagacacagccatgatttttcagtactcataatacagccaggactggcgggagcaactgtcccagatggtgcttaaaccccttaggagctcatgatcttcttggaaagccagtaagacagaaccatacaggacacaaattagatgctaaattgtgatttagataggagacagaagtattcaaaaagggagggaaatttcttgtgagtagctgcccagaaaggtggaattggtgtgctctcacttgaaaaatgagtaggatcttctcagatggccacaaagtccaggagctgccctgggcaacagggacaggagcctcccgtgagacactgcagctgagacagatgggagtcctctgaccccagagggtactggcttgactgctttatgccttaagtggggcctggagcaaaatggcccaggttagtctgtcctgagagtccagagccttggttcaggggagaatggcatctggagagtgggctgctgggataatggggacagtgagggacagagcccttgatacttaaggaagtgctggatattgctaagaattcaggtagtctcgggatctccagagtctccatgctaggacaggagatcttcagaacctggaggaatggaaatagtctagtcagcttatttgtcaagaaaaatgtcaaccttggtaatttaaataatgctttaaaagtccacaaaatacatatttctaaaattaaaaa

SEQ ID NO: 455616 - DNA, 3469 bp, Homo sapiens
gcctgagtcggttaggtagctctaaaaactcgtaactccacaacagctcaatggattttcgagaggtggggtaaagcctgaaggctcagccggtttatccaacgagcaatctgggatttgcagtttccagcgcccgaagtgcgcccgctagcagagagctcttggactctaatcccgccccctccccgagcctcgcgcatcctgatggcgtcacgcggccccgcgaggtctgtgggatacatagtagtcctcaaggcgggtctcactcttggccgctgcaacttgaggactacacttccaaggaggcagcgcggcggcgcgccgagaaccacccgaggccgtgattggctggtgagccggccgcacgcggaggatcctaaggagcagctctgttgcgacataggccgagcagcgaggcccagctccctgaaacaacagtaacctacccctgtgggtcatcatcatgccctccgacctggccaagaagaaggcagccaaaaagaaggaggctgccaaagctcgacagcggcccagaaaaggacatgaagaaaatggagatgttgtcacagaaccacaggtggcagagaagaatgaggccaatggcagagagaccacagaagtagatttgctgaccaaggagctagaggactttgagatgaagaaagctgctgctcgagctgtcactggcgtcctggcctctcaccccaacagtactgatgttcacatcatcaacctctcactcacctttcatggtcaagagctgctcagtgacaccaaactggaattaaactcaggccgtcgttatggcctcattggtttaaatggaattggaaagtccatgctgctctctgctattgggaagcgtgaagtgcccatccctgagcacatcgacatctaccatctgactcgagagatgccccctagtgacaagacacccttgcattgtgtgatggaagtcgacacagagcgggccatgctggagaaagaggcagagcggctggctcatgaggatgcggagtgtgagaagctcatggagctctacgagcgcctggaggagctggatgccgacaaggcagagatgagggcctcgcggatcttgcatggactgggtttcacacctgccatgcagcgcaagaagctaaaagacttcagtgggggctggaggatgagggttgcccttgccagagccctctttattcggcccttcatgctgctcctggatgagcctaccaaccacctggacctagatgcttgcgtgtggttggaagaagaactaaaaacttttaagcgcatcttggtcctcgtctcccattcccaggattttctgaatggtgtctgtaccaatatcattcacatgcacaacaagaaactgaagtattatacgggtaattatgatcagtatgtgaagacgcggctagagctggaggagaaccagatgaagaggtttcactgggagcaagatcagattgcacacatgaagaactacattgcgaggtttggtcatggcagtgccaagctggcccggcaggcccagagcaaggagaagacgctacagaaaatgatggcatcaggactgacagagagggtcgtgagcgataagacactgtcattttatttcccaccatgtggcaagatccctccacctgtcattatggtgcaaaatgtgagcttcaagtatacaaaagatgggccttgcatctacaataatctagaatttggaattgaccttgacacacgagtggctctggtagggcccaatggagcagggaagtcaactcttctgaagctgctaactggagagctactacccacagatggcatgatccgaaaacactctcatgtcaagatagggcgttaccatcagcatttacaagagcagctggacttagatctctcacctttggagtacatgatgaagtgctacccagagatcaaggagaaggaagaaatgaggaagatcattgggcgatacggtctcactgggaaacaacaggtgagcccaatccggaacttgtcagacgggcagaagtgccgagtgtgtctggcctggctggcctggcagaacccccacatgctcttcctggatgaacccaccaatcacctggatatcgagaccatcgacgccctggcagatgccatcaatgagtttgagggtggtatgatgctggtcagccatgacttcagactcattcagcaggttgcacaggaaatttgggtctgtgagaagcagacaatcaccaagtggcctggagacatcctggcttacaaggagcacctcaagtccaagctggtggatgaggagccccagctcaccaagaggacccacaacgtgtgagccctctacctgggttcgggtcaggagctccatctgggaactaacagctgctaacctgaccagccgctcaggacaggaccctggggctacactcctgcattgctgcaatactgctcccccagcctctcccctgcccctcaacctgccttagctgcactctcttacctacagctggacagtacctgtctgtttcctgtcctccttccagttacatctgtccatgtctggactcggctggccgttccctccagccccttgctggttatcttactctgagtgtgatgcagtcagaggcacctgcgggttagcccaggggcccaagccctggatttggcctgcggaggagcttaggatcctcgttttctgggttttggtgatgttggaggagtaccccccagcccaccgccccgattcctttttgcttctggtttggagctccggaccaggaccttcgtcctggtcagtttttaaataattatttagcagtgtaacttttaaacctgcgtgacatctacaaagcgcccaataaagaaagaggaagccacggtccctaccttccttctcgggtctctggggccttctcctccctgcagtgccaacatgcactgcccacagcaggagctggatccagcgtcagtgtgtcgatgggaactgaagactagtccataggagctggaagaactttgtccctttacttctgatttgaaattgtaccttttctcaggcctgtgattcacagactttaacatgaatcagaatcacctggagggctcatgcaatcagatggcttgactgctttatgccttaagtggggcctggagcaaaatggcccaggttagtctgtcctgagagtccagagccttggttcaggggagaatggcatctggagagtgggctgctgggataatggggacagtgagggacagagcccttgatacttaaggaagtgctggatattgctaagaattcaggtagtctcgggatctccagagtctccatgctaggacaggagatcttcagaacctggaggaatggaaatagtctagtcagcttatttgtcaagaaaaatgtcaaccttggtaatttaaataatgctttaaaagtccacaaaatacatatttctaaaattaaaaa

SEQ ID NO: 455617 - DNA, 3173 bp, Homo sapiens
gcctgagtcggttaggtagctctaaaaactcgtaactccacaacagctcaatggattttcgagaggtggggtaaagcctgaaggctcagccggtttatccaacgagcaatctgggatttgcagtttccagcgcccgaagtgcgcccgctagcagagagctcttggactctaatcccgccccctccccgagcctcgcgcatcctgatggcgtcacgcggccccgcgaggtctgtgggatacatagtagtcctcaaggcgggtctcactcttggccgctgcaacttgaggactacacttccaaggaggcagcgcggcggcgcgccgagaaccacccgaggccgtgattggctggtgagccggccgcacgcggaggatcctaaggagcagctctgttgcgacataggccgagcagcgaggcccagctccctgaaacaacagtaacctacccctgtgggtcatcatcatgccctccgacctggccaagaagaaggcagccaaaaagaaggaggctgccaaagctcgacagcggcccagaaaaggacatgaagaaaatggagatgttgtcacagaaccacaggtggcagagaagaatgaggccaatggcagagagaccacagaagtagatttgctgaccaaggagctagaggactttgagatgaagaaagctgctgctcgagctgtcactggcgtcctggcctctcaccccaacagtactgatgttcacatcatcaacctctcactcacctttcatggtcaagagctgctcagtgacaccaaactggaattaaactcaggccgtcgttatggcctcattggtttaaatggaattggaaagtccatgctgctctctgctattgggaagcgtgaagtgcccatccctgagcacatcgacatctaccatctgactcgagagatgccccctagtgacaagacacccttgcattgtgtgatggaagtcgacacagagcgggccatgctggagaaagaggcagagcggctggctcatgaggatgcggagtgtgagaagctcatggagctctacgagcgcctggaggagctggatgccgacaaggcagagatgagggcctcgcggatcttgcatggactgggtttcacacctgccatgcagcgcaagaagctaaaagacttcagtgggggctggaggatgagggttgcccttgccagagccctctttattcggcccttcatgctgctcctggatgagcctaccaaccacctggacctagatgcttgcgtgtggttggaagaagaactaaaaacttttaagcgcatcttggtcctcgtctcccattcccaggattttctgaatggtgtctgtaccaatatcattcacatgcacaacaagaaactgaagtattatacgggtaattatgatcagtatgtgaagacgcggctagagctggaggagaaccagatgaagaggtttcactgggagcaagatcagattgcacacatgaagaactacattgcgaggtttggtcatggcagtgccaagctggcccggcaggcccagagcaaggagaagacgctacagaaaatgatggcatcaggactgacagagagggtcgtgagcgataagacactgtcattttatttcccaccatgtggcaagatccctccacctgtcattatggtgcaaaatgtgagcttcaagtatacaaaagatgggccttgcatctacaataatctagaatttggaattgaccttgacacacgagtggctctggtagggcccaatggagcagggaagtcaactcttctgaagctgctaactggagagctactacccacagatggcatgatccgaaaacactctcatgtcaagatagggcgttaccatcagcatttacaagagcagctggacttagatctctcacctttggagtacatgatgaagtgctacccagagatcaaggagaaggaagaaatgaggaagatcattgggcgatacggtctcactgggaaacaacaggtgagcccaatccggaacttgtcagacgggcagaagtgccgagtgtgtctggcctggctggcctggcagaacccccacatgctcttcctggatgaacccaccaatcacctggatatcgagaccatcgacgccctggcagatgccatcaatgagtttgagggtggtatgatgctggtcagccatgacttcagactcattcagcaggttgcacaggaaatttgggtctgtgagaagcagacaatcaccaagtggcctggagacatcctggcttacaaggagcacctcaagtccaagctggtggatgaggagccccagctcaccaagaggacccacaacgtgtgagccctctacctgggttcgggtcaggagctccatctgggaactaacagctgctaacctgaccagccgctcaggacaggaccctggggctacactcctgcattgctgcaatactgctcccccagcctctcccctgcccctcaacctgccttagctgcactctcttacctacagctggacagtacctgtctgtttcctgtcctccttccagttacatctgtccatgtctggactcggctggccgttccctccagccccttgctggttatcttactctgagtgtgatgcagtcagaggcacctgcgggttagcccaggggcccaagccctggatttggcctgcggaggagcttaggatcctcgttttctgggttttggtgatgttggaggagtaccccccagcccaccgccccgattcctttttgcttctggtttggagctccggaccaggaccttcgtcctggtcagtttttaaataattatttagcagtgtaacttttaaacctgcgtgacatctacgataaacaccggtgtttatcgatgccacataccccatggtatgtaggcttctccctggggtatgtggtaatccacatctgtcatatcttagtgcccaacctgttgttcctagcacccagtttgggtactggtaaagcttggtgactttaggcctaagagagacctaaaatgggtggcctactgacagttccaggtgacagccatggtctgaggatgtgggtgatatgataggaaacaatgtgggcttcacatacaaatgggcataggttcaaatcccagatctacttattctttgacgttgaaaacattacttaattctgagt

SEQ ID NO: 455618 - DNA, 2181 bp, Homo sapiens
ttccaagcgtccccgactccagctataactgagaccctccacttggggctctctacaactgcgacacttcgcgaacacgctccaatgcctagactcctcctgcgctactacgcgcgaaagccgtgaaagatgccccaatccccttgaagccaacaatccgaactatcgtaaccaatcctgaaactcccgaaagcagcaaattgccccccccatataagtgacaagacacccttgcattgtgtgatggaagtcgacacagagcgggccatgctggagaaagaggcagagcggctggctcatgaggatgcggagtgtgagaagctcatggagctctacgagcgcctggaggagctggatgccgacaaggcagagatgagggcctcgcggatcttgcatggactgggtttcacacctgccatgcagcgcaagaagctaaaagacttcagtgggggctggaggatgagggttgcccttgccagagccctctttattcggcccttcatgctgctcctggatgagcctaccaaccacctggacctagatgcttgcgtgtggttggaagaagaactaaaaacttttaagcgcatcttggtcctcgtctcccattcccaggattttctgaatggtgtctgtaccaatatcattcacatgcacaacaagaaactgaagtattatacgggtaattatgatcagtatgtgaagacgcggctagagctggaggagaaccagatgaagaggtttcactgggagcaagatcagattgcacacatgaagaactacattgcgaggtttggtcatggcagtgccaagctggcccggcaggcccagagcaaggagaagacgctacagaaaatgatggcatcaggactgacagagagggtcgtgagcgataagacactgtcattttatttcccaccatgtggcaagatccctccacctgtcattatggtgcaaaatgtgagcttcaagtatacaaaagatgggccttgcatctacaataatctagaatttggaattgaccttgacacacgagtggctctggtagggcccaatggagcagggaagtcaactcttctgaagctgctaactggagagctactacccacagatggcatgatccgaaaacactctcatgtcaagatagggcgttaccatcagcatttacaagagcagctggacttagatctctcacctttggagtacatgatgaagtgctacccagagatcaaggagaaggaagaaatgaggaagatcattgggcgatacggtctcactgggaaacaacaggtgagcccaatccggaacttgtcagacgggcagaagtgccgagtgtgtctggcctggctggcctggcagaacccccacatgctcttcctggatgaacccaccaatcacctggatatcgagaccatcgacgccctggcagatgccatcaatgagtttgagggtggtatgatgctggtcagccatgacttcagactcattcagcaggttgcacaggaaatttgggtctgtgagaagcagacaatcaccaagtggcctggagacatcctggcttacaaggagcacctcaagtccaagctggtggatgaggagccccagctcaccaagaggacccacaacgtgtgagccctctacctgggttcgggtcaggagctccatctgggaactaacagctgctaacctgaccagccgctcaggacaggaccctggggctacactcctgcattgctgcaatactgctcccccagcctctcccctgcccctcaacctgccttagctgcactctcttacctacagctggacagtacctgtctgtttcctgtcctccttccagttacatctgtccatgtctggactcggctggccgttccctccagccccttgctggttatcttactctgagtgtgatgcagtcagaggcacctgcgggttagcccaggggcccaagccctggatttggcctgcggaggagcttaggatcctcgttttctgggttttggtgatgttggaggagtaccccccagcccaccgccccgattcctttttgcttctggtttggagctccggaccaggaccttcgtcctggtcagtttttaaataattatttagcagtgtaacttttaaacctgcgtgacatctacaaagcgcccaataaagaaagaggaagccacggtccct

SEQ ID NO: 455619 - DNA, 1504 bp, Homo sapiens
gcctgagtcggttaggtagctctaaaaactcgtaactccacaacagctcaatggattttcgagaggtggggtaaagcctgaaggctcagccggtttatccaacgagcaatctgggatttgcagtttccagcgcccgaagtgcgcccgctagcagagagctcttggactctaatcccgccccctccccgagcctcgcgcatcctgatggcgtcacgcggccccgcgaggtctgtgggatacatagtagtcctcaaggcgggtctcactcttggccgctgcaacttgaggactacacttccaaggaggcagcgcggcggcgcgccgagaaccacccgaggccgtgattggctggtgagccggccgcacgcggaggatcctaaggagcagctctgttgcgacataggccgagcagcgaggcccagctccctgaaacaacagtaacctacccctgtgggtcatcatcatgccctccgacctggccaagaagaaggcagccaaaaagaaggaggctgccaaagctcgacagcggcccagaaaaggacatgaagaaaatggagatgttgtcacagaaccacaggtggcagagaagaatgaggccaatggcagagagaccacagaagtagatttgctgaccaaggagctagaggactttgagatgaagaaagctgctgctcgagctgtcactggcgtcctggcctctcaccccaacagtactgatgttcacatcatcaacctctcactcacctttcatggtcaagagctgctcagtgacaccaaactggaattaaactcaggccgtcgttatggcctcattggtttaaatggaattggaaagtccatgctgctctctgctattgggaagcgtgaagtgcccatccctgagcacatcgacatctaccatctgactcgagagatgccccctagtgacaagacacccttgcattgtgtgatggaagtcgacacagagcgggccatgctggagaaagaggcagagcggctggctcatgaggatgcggagtgtgagaagctcatggagctctacgagcgcctggaggagctggatgccgacaaggcagagatgagggcctcgcggatcttgcatggactgggtttcacacctgccatgcagcgcaagaagctaaaagacttcagtgggggctggaggatgagggttgcccttgccagagccctctttattcggcccttcatgctgctcctggatgagcctaccaaccacctggacctagatgcttgcgtgtggttggaagaagaactaaaaacgtaagagggtggaatgggggatgtgagcgggcaggtcccaaagggggaatctagaaaatggatgcccagaaactgcactgatgttagagcggtgagaaaggaactgaaggaaggacagagttcactttcttggacaagcagtgagcacctttagggctgttgaaggctggccttttattttgattgtttttctttagtttgaaatttatgagctttttttttt

SEQ ID NO: 455620 - DNA, 3460 bp, Homo sapiens
tgctgaggagcggagcctccgcctggggggccccccatccctggctgtcccccagctgcgcgtccccgccccacccccgcggctgagccaccaccggtgcagtggtctccgcttggcggagcgagccttgagcttcgttccacagcttctttgcatcttggatttcggggcggccccctcccccacctctctctgcctttttgtaccccgctttttttctgcgttctgctcggtttttgtagccgtctgtttttgcaccccatttcgttttgtttctagacggtttgggggggggtgaagctgcattcataccccttcctcttgttattctcccctgctctgacagcaccccttttcatcgcagttggggggcctaggatcggtgcatcttccgccgcgctgccagcaccccgcagcgcgtggtcgtgcaccccggaatctgcagcagctgcatatctgaggggggtctcctttgcccgcgccgccttcgctccccgtgcttttgggtgtgtggagggcttcagcgcgcggcgcccccgcttctccgcaaccccccgccccgcgcccggactcgccccgcgccaccaagatggtcatccagaaagagaagaagagctgcgggcaggtggttgaggagtggaaggagttcgtgtggaacccgaggacgcaccagtttatgggccgcaccgggaccagctgggcctttatcctcctcttctacctcgttttttatgggttcctcaccgccatgttcaccctcaccatgtgggtgatgctgcagactgtctccgaccatacccccaagtaccaggaccgactggccacaccgggcttgatgattcgccccaagactgagaaccttgatgtcattgtcaatgtcagtgacactgaaagctgggaccagcatgttcagaagctcaacaagttcttggagcgtgagtgtgggcctggttatgtgtcagttcaagacttcgggcaggggactggggaccttggaagtggaacatctggcccctgagtctctccctcccacctctttagcttacaacgactctatccaagcccaaaagaatgatgtctgccgccctgggcgctattacgaacagccagataatggagtcctcaactaccccaaacgtgcctgccaattcaaccggacccagctgggcaactgctccggcattggggactccacccactatggttacagcactgggcagccctgtgtcttcatcaagatgaaccgggtcatcaacttctatgcaggagcaaaccagagcatgaatgttacctgtgctgggaagcgagatgaagatgctgagaatctcggcaacttcgtcatgttccccgccaacggcaacatcgacctcatgtacttcccctactatggcaaaaagttccacgtgaactacacacagcccctggtggctgtgaagttcctgaatgtgacccccaacgtggaggtgaatgtagaatgtcgcatcaacgccgccaacatcgccacagacgatgagcgagacaagttcgccggccgcgtggccttcaaactccgcatcaacaaaacctgaggccccttcctcccaccccatctctctcctgtggatgctcctggaatgtccctgaccctgcctgatccctccctcacccaccccaaaggtatttttgataacagagctatgacttgtctgagcctcacatccttttccttgacttctcaacccagcctgaagtccattgcggttccgtcactcgcctttcccaccaacttctcccaacctcagatcagtcagacagggagctgggctaagatggccacagaggagttaggagcctttctagttctggtttagctgtgagagctatccactctcctgcctgcatatcccctgagagttataggaagtgcccactgacccacccacccacctacaccccccgccacacacacacacaaacgtgcacacgcgtctcatttgacccctttgcttccagagatgaatgtggcactccctccttccattcctaagctctagccaccgtcccttgatctctcatactttctccctgtctacacagtcgccatcttggtgactttgaatttatctggctcctgggcaggtcttctcctcctctccatccctattccctcctctgaaatgcacccctttgtaattgaggacaaggtggttctgtggccttttccctctttgctggcacgttctgcttctcaccctctggtgactctgtgagctgggaaatgagggactggaagtgaggcctgtgttgacccttcctgaaaatcctctagcagcccccgacttcagcagtttctttctttgtttttttgagatggagtttcgctcttgttgcccaggctggagtgcaatggtgcaatctcagctcactgcaacttccgcatcccaggttcaagcgattctcccgcctcaggttcccgagtagctgggactacaggcatgtgccaccatgcccggctaatttctttctttctttttttttttttttgcattttttagtagagatgggggtttctccttgttggtcaggctggtctcgaactcccgacctcaggtgatccacctgcctcggcctcccaaagtgttgggattacaggcgtgagccaccgcgcccggccttcagtttcttcctaggccgttctgtcacccaaatagctgctacccagaggggcggggttgacctaggctgaatatccactttgtttttatggatggctcccttcccccattcgccttcccagaatatccttcaagttccacttcccagggagctctgggggaggggcggccattctggctccgtccccagtggccaccttggaaacatcggctggctttgggactattccacctccttcccctgagcccagatctgcccccaccatcctttctctggcttcttttagcaagttatcaactaatcactaactccttccttttcctctgcatgccagcctgaaaattccaaatctagcctctgaatgtcttggctccatctcttcagacccctttgcctttaaaaaaaaaacaaaaacaaaaacaaaaaaacccataatgcccacagaatgtcaaatgaggggcctcctgcctcctgctctgaatattctgtagctgtagaggcattttaaccctttgtcctccagcatcccttcacttcctcatcctctctaacctcctttttctttttttaatgctgcagcctccacactccacccacaggtggacccttccctttttctctagctggatctgtgtttcttcccttcgggcccccatgttttcctgcacccgccctaccatggtctctctctgcagttatttaatgcctgtgtcagatctactgtaaaaagaggattaagtaaaataaaatgagagcaattatatatataaatatatatcatacacagagccctgtgtgtgggttg

SEQ ID NO: 455621 - DNA, 2891 bp, Homo sapiens
tgctgaggagcggagcctccgcctggggggccccccatccctggctgtcccccagctgcgcgtccccgccccacccccgcggctgagccaccaccggtgcagtggtctccgcttggcggagcgagccttgagcttcgttccacagcttctttgcatcttggatttcggggcggccccctcccccacctctctctgcctttttgtaccccgctttttttctgcgttctgctcggtttttgtagccgtctgtttttgcaccccatttcgttttgtttctagacggtttgggggggggtgaagctgcattcataccccttcctcttgttattctcccctgctctgacagcaccccttttcatcgcagttggggggcctaggatcggtgcatcttccgccgcgctgccagcaccccgcagcgcgtggtcgtgcaccccggaatctgcagcagctgcatatctgaggggggtctcctttgcccgcgccgccttcgctccccgtgcttttgggtgtgtggagggcttcagcgcgcggcgcccccgcttctccgcaaccccccgccccgcgcccggactcgccccgcgccaccaagatggtcatccagaaagagaagaagagctgcgggcaggtggttgaggagtggaaggagttcgtgtggaacccgaggacgcaccagtttatgggccgcaccgggaccagctgggcctttatcctcctcttctacctcgttttttatgggttcctcaccgccatgttcaccctcaccatgtgggtgatgctgcagactgtctccgaccatacccccaagtaccaggaccgactggccacaccgggcttgatgattcgccccaagactgagaaccttgatgtcattgtcaatgtcagtgacactgaaagctgggaccagcatgttcagaagctcaacaagttcttggagccttacaacgactctatccaagcccaaaagaatgatgtctgccgccctgggcgctattacgaacagccagataatggagtcctcaactaccccaaacgtgcctgccaattcaaccggacccagctgggcaactgctccggcattggggactccacccactatggttacagcactgggcagccctgtgtcttcatcaagatgaaccgggtcatcaacttctatgcaggagcaaaccagagcatgaatgttacctgtgctgggaagcgagatgaagatgctgagaatctcggcaacttcgtcatgttccccgccaacggcaacatcgacctcatgtacttcccctactatggcaaaaagttccacgtgaactacacacagcccctggtggctgtgaagttcctgaatgtgacccccaacgtggaggtgaatgtagaatgtcgcatcaacgccgccaacatcgccacagacgatgagcgagacaagttcgccggccgcgtggccttcaaactccgcatcaacaaaacctgaggccccttcctcccaccccatctctctcctgtggatgctcctggaatgtccctgaccctgcctgatccctccctcacccaccccaaaggtatttttgataacagagctatgacttgtctgagcctcacatccttttccttgacttctcaacccagcctgaagtccattgcggttccgtcactcgcctttcccaccaacttctcccaacctcagatcagtcagacagggagctgggctaagatggccacagaggagttaggagcctttctagttctggtttagctgtgagagctatccactctcctgcctgcatatcccctgagagttataggaagtgcccactgacccacccacccacctacaccccccgccacacacacacacaaacgtgcacacgcgtctcatttgacccctttgcttccagagatgaatgtggcactccctccttccattcctaagctctagccaccgtcccttgatctctcatactttctccctgtctacacagtcgccatcttggtgactttgaatttatctggctcctgggcaggtcttctcctcctctccatccctattccctcctctgaaatgcacccctttgtaattgaggacaaggtggttctgtggccttttccctctttgctggcacgttctgcttctcaccctctggtgactctgtgagctgggaaatgagggactggaagtgaggcctgtgttgacccttcctgaaaatcctctagcagcccccgacttcagcagtttctttctttgtttttttgagatggagtttcgctcttgttgcccaggctggagtgcaatggtgcaatctcagctcactgcaacttccgcatcccaggttcaagcgattctcccgcctcaggttcccgagtagctgggactacaggcatgtgccaccatgcccggctaatttctttctttctttttttttttttttgcattttttagtagagatgggggtttctccttgttggtcaggctggtctcgaactcccgacctcaggtgatccacctgcctcggcctcccaaagtgttgggattacaggcgtgagccaccgcgcccggccttcagtttcttcctaggccgttctgtcacccaaatagctgctacccagaggggcggggttgacctaggctgaatatccactttgtttttatggatggctcccttcccccattcgccttcccagaatatccttcaagttccacttcccagggagctctgggggaggggcggccattctggctccgtccccagtggccaccttggaaacatcggctggctttgggactattccacctccttcccctgagcccagatctgcccccaccatcctttctctggctccgtccccagtggccaccttggaaggagttagtgatcagcctgatcacgtatgctaaaagaagc

SEQ ID NO: 455622 - DNA, 3354 bp, Homo sapiens
tgctgaggagcggagcctccgcctggggggccccccatccctggctgtcccccagctgcgcgtccccgccccacccccgcggctgagccaccaccggtgcagtggtctccgcttggcggagcgagccttgagcttcgttccacagcttctttgcatcttggatttcggggcggccccctcccccacctctctctgcctttttgtaccccgctttttttctgcgttctgctcggtttttgtagccgtctgtttttgcaccccatttcgttttgtttctagacggtttgggggggggtgaagctgcattcataccccttcctcttgttattctcccctgctctgacagcaccccttttcatcgcagttggggggcctaggatcggtgcatcttccgccgcgctgccagcaccccgcagcgcgtggtcgtgcaccccggaatctgcagcagctgcatatctgaggggggtctcctttgcccgcgccgccttcgctccccgtgcttttgggtgtgtggagggcttcagcgcgcggcgcccccgcttctccgcaaccccccgccccgcgcccggactcgccccgcgccaccaagatggtcatccagaaagagaagaagagctgcgggcaggtggttgaggagtggaaggagttcgtgtggaacccgaggacgcaccagtttatgggccgcaccgggaccagctgggcctttatcctcctcttctacctcgttttttatgggttcctcaccgccatgttcaccctcaccatgtgggtgatgctgcagactgtctccgaccatacccccaagtaccaggaccgactggccacaccgggcttgatgattcgccccaagactgagaaccttgatgtcattgtcaatgtcagtgacactgaaagctgggaccagcatgttcagaagctcaacaagttcttggagccttacaacgactctatccaagcccaaaagaatgatgtctgccgccctgggcgctattacgaacagccagataatggagtcctcaactaccccaaacgtgcctgccaattcaaccggacccagctgggcaactgctccggcattggggactccacccactatggttacagcactgggcagccctgtgtcttcatcaagatgaaccgggtcatcaacttctatgcaggagcaaaccagagcatgaatgttacctgtgctgggaagcgagatgaagatgctgagaatctcggcaacttcgtcatgttccccgccaacggcaacatcgacctcatgtacttcccctactatggcaaaaagttccacgtgaactacacacagcccctggtggctgtgaagttcctgaatgtgacccccaacgtggaggtgaatgtagaatgtcgcatcaacgccgccaacatcgccacagacgatgagcgagacaagttcgccggccgcgtggccttcaaactccgcatcaacaaaacctgaggccccttcctcccaccccatctctctcctgtggatgctcctggaatgtccctgaccctgcctgatccctccctcacccaccccaaaggtatttttgataacagagctatgacttgtctgagcctcacatccttttccttgacttctcaacccagcctgaagtccattgcggttccgtcactcgcctttcccaccaacttctcccaacctcagatcagtcagacagggagctgggctaagatggccacagaggagttaggagcctttctagttctggtttagctgtgagagctatccactctcctgcctgcatatcccctgagagttataggaagtgcccactgacccacccacccacctacaccccccgccacacacacacacaaacgtgcacacgcgtctcatttgacccctttgcttccagagatgaatgtggcactccctccttccattcctaagctctagccaccgtcccttgatctctcatactttctccctgtctacacagtcgccatcttggtgactttgaatttatctggctcctgggcaggtcttctcctcctctccatccctattccctcctctgaaatgcacccctttgtaattgaggacaaggtggttctgtggccttttccctctttgctggcacgttctgcttctcaccctctggtgactctgtgagctgggaaatgagggactggaagtgaggcctgtgttgacccttcctgaaaatcctctagcagcccccgacttcagcagtttctttctttgtttttttgagatggagtttcgctcttgttgcccaggctggagtgcaatggtgcaatctcagctcactgcaacttccgcatcccaggttcaagcgattctcccgcctcaggttcccgagtagctgggactacaggcatgtgccaccatgcccggctaatttctttctttctttttttttttttttgcattttttagtagagatgggggtttctccttgttggtcaggctggtctcgaactcccgacctcaggtgatccacctgcctcggcctcccaaagtgttgggattacaggcgtgagccaccgcgcccggccttcagtttcttcctaggccgttctgtcacccaaatagctgctacccagaggggcggggttgacctaggctgaatatccactttgtttttatggatggctcccttcccccattcgccttcccagaatatccttcaagttccacttcccagggagctctgggggaggggcggccattctggctccgtccccagtggccaccttggaaacatcggctggctttgggactattccacctccttcccctgagcccagatctgcccccaccatcctttctctggcttcttttagcaagttatcaactaatcactaactccttccttttcctctgcatgccagcctgaaaattccaaatctagcctctgaatgtcttggctccatctcttcagacccctttgcctttaaaaaaaaaacaaaaacaaaaacaaaaaaacccataatgcccacagaatgtcaaatgaggggcctcctgcctcctgctctgaatattctgtagctgtagaggcattttaaccctttgtcctccagcatcccttcacttcctcatcctctctaacctcctttttctttttttaatgctgcagcctccacactccacccacaggtggacccttccctttttctctagctggatctgtgtttcttcccttcgggcccccatgttttcctgcacccgccctaccatggtctctctctgcagttatttaatgcctgtgtcagatctactgtaaaaagaggattaagtaaaataaaatgagagcaattatatatataaatatatatcatacacagagccctgtgtgtgggttg

SEQ ID NO: 455623 - DNA, 3955 bp, Homo sapiens
agcggggacccaggcgggcgggcagagcaggcggcaccgcacctcggccagaggcggctgcagcagctgctgcccttgtccctgccgccgcctctccagtcccttctgtgattaccactccagctgctgggaacgggcgagaaagaggaggaggcgagaaactcccaccgacccacagagggagcatgacttcggcaacttcacctatcattctgaaatgggaccccaaaagtttggaaatccggacgctaacagtggaaaggctgttggagccacttgttacacaggtgactacacttgtcaacacaagcaacaaaggcccatctggtaaaaagaaagggaggtcaaagaaagcccatgtactagctgcctctgtagagcaagccactcagaatttcctggaaaagggtgaacagatcgctaaggagagtcaagatctcaaagaagagttggtggctgctgtagaggatgtgcgcaaacaaggtgagacgatgcggatcgcctcctccgagtttgcagatgacccttgctcgtcggtaaagcgcggcaccatggtacgggcggcaagggctttgctctccgcggtgacacgcttactcatcctggcggacatggcagatgtcatgagacttttatcccatctgaaaattgtggaagaggccctggaagctgtcaaaaatgctacaaatgagcaagaccttgcaaaccgttttaaagagtttgggaaaaagatggtgaaacttaactatgtagcagcaagaagacaacaggagctgaaggatcctcactgtcgggatgagatggcagccgcccgaggggctctgaagaagaatgccacaatgctgtacacggcctctcaagcatttctccgccacccagatgtcgccgctacgagagccaaccgagattatgtgttcaaacaagtccaggaggccatcgccggcatctccaatgctgctcaagctacctcgcccactgacgaagccaagggccacacgggcatcggcgagctggctgcggctcttaatgagtttgacaataagattatcctggaccccatgacgttcagcgaggccaggttccggccgtccctggaggagaggctggagagcatcatcagcggcgcagcgctgatggccgactcctcctgcacgcgagacgaccggcgcgagaggatcgtggcggagtgcaacgccgtgcggcaggcgctccaggacctgctcagcgagtacatgaataatactggaaggaaagaaaaaggagatcctctcaacattgcgattgataagatgactaagaaaacaagagatctaaggagacagcttcggaaagcagtgatggatcacatatctgactctttcctggaaaccaatgttcctttgctagttctcattgaggctgcaaagagcggaaatgaaaaggaagtgaaagaatatgcccaagttttccgtgagcatgccaacaaactggtagaggttgccaatttggcctgttccatctccaacaatgaagaaggggtgaaattagttcggatggcagccacccagattgacagcctgtgtccccaggtcatcaatgccgctctgacactggctgcccggccacagagcaaagttgctcaggataacatggacgtcttcaaagaccagtgggagaagcaggtccgagtgttgacagaggccgtggatgacatcacctcagtggatgacttcctctctgtctcagaaaatcacatcttggaggatgtgaacaagtgtgtgatagccctccaagagggcgatgtggacactctggaccggactgcaggggccatcaggggccgggcagctcgagtcatacacatcatcaatgctgagatggagaactatgaagctggggtttatactgagaaggtgttggaagctacaaaattgctttctgaaacagtgatgccacgcttcgctgaacaagtagaggttgccattgaagccctgagtgccaacgttcctcaaccgtttgaggagaatgagttcatcgatgcctctcgcctggtgtatgatggcgttcgggacatcagaaaggctgtgctgatgatcaggaccccagaagaactagaggatgattctgactttgagcaggaagattatgatgtgcgtagcaggacaagtgttcagactgaggatgaccagctcattgcagggcagagcgcacgggccatcatggcgcaactaccgcaggaggagaaggcaaaaatagctgagcaggtggagatattccatcaagagaaaagcaagctggatgcagaagtggccaaatgggacgacagcggcaatgatatcattgtactggccaagcagatgtgtatgatcatgatggaaatgacagacttcacaagaggcaaaggcccattgaaaaatacatctgatgtcattaatgctgccaagaaaattgccgaagcaggttctcgaatggacaaattagctcgtgctgtggctgatcagtgtcctgattcagcatgtaagcaggatttattagcctaccttcaacgaattgccttgtattgccatcagcttaatatctgcagcaaggtgaaggcagaagtgcagaatctgggaggagagctcattgtgtcagggacaggagttcagagcactttcactaccttttatgaggtagattgtgatgtcatagatgggggcagggctagtcaactttctacccacctcccaacctgtgctgagggagctccgatcgggagtggaagcagtgattcctccatgctggacagtgccacatcgcttatccaggcagctaaaaacctgatgaatgctgttgtcctcacggtgaaagcatcctatgtggcctcaaccaaataccagaaggtctatgggacagcagctgtcaactcacctgttgtgtcttggaagatgaaggctccagagaagaagccccttgtgaagagagaaaagcctgaagaattccagacacgagttcgacgaggttctcagaagaaacacatttcgcctgtacaggctttaagtgaattcaaagcaatggattccttctaggacgataggttttaacaagaaagctttttctttcttttctttctttctttttctttttaattccatttttgtatgcatacctgccagctcgtatgcctctggcatggggaaattaagggaacagtgtctgtttgcatgtaagatgagatgagatcaatactactgatccatctgtagcctgggaaggagacaggacattcctgtactaaggtggcacagagctgtcctttgcaacattctcataaaattgggcacagagttcgcattggcgcaatatttatgggagtgggagggatggggaaaataaacttaactctacaaaagcaaactctaatgcatgcaagaatcattaggttggcaggtatatgcataagtgaaaaatctggaagtgtaatggtagaacataaaacttgtattgcttctgtttcagtgcaaaaatgtactagccaatacgcttaagtgtgtggcccatgaattgaacaatttaaccttgaagtctatatccgtgatattatgtcgatttttaactgaggggaaattaactagtccagcctaaaatgcttcttttaatctgcattctgtttcctcttctagttgtgccattactagtgatcatgtttttttcccccctttaatgaaaacaataaacatctatttgagacaattaaaatccttctgggggcactggaagcacaatacggtgaccaatcttgctttcatttttttttctttttaatttgaaccatgattttgctagaaatagaaggcccagtggtggaatattagagggaaggaaactgacaacgtgtgaaagttagaggcaaatacataggtgtagcttggagtgctggtatctaatataccattgtattcactaactaactcaaaataaacacatttaatcttga

SEQ ID NO: 455624 - DNA, 3811 bp, Homo sapiens
agcggggacccaggcgggcgggcagagcaggcggcaccgcacctcggccagaggcggctgcagcagctgctgcccttgtccctgccgccgcctctccagtcccttctgtgattaccactccagctgctgggaacgggcgagaaagaggaggaggcgagaaactcccaccgacccacagagggagcatgacttcggcaacttcacctatcattctgaaatgggaccccaaaagtttggaaatccggacgctaacagtggaaaggctgttggagccacttgttacacaggtgactacacttgtcaacacaagcaacaaaggcccatctggtaaaaagaaagggaggtcaaagaaagcccatgtactagctgcctctgtagagcaagccactcagaatttcctggaaaagggtgaacagatcgctaaggagagtcaagatctcaaagaagagttggtggctgctgtagaggatgtgcgcaaacaaggtgagacgatgcggatcgcctcctccgagtttgcagatgacccttgctcgtcggtaaagcgcggcaccatggtacgggcggcaagggctttgctctccgcggtgacacgcttactcatcctggcggacatggcagatgtcatgagacttttatcccatctgaaaattgtggaagaggccctggaagctgtcaaaaatgctacaaatgagcaagaccttgcaaaccgttttaaagagtttgggaaaaagatggtgaaacttaactatgtagcagcaagaagacaacaggagctgaaggatcctcactgtcgggatgagatggcagccgcccgaggggctctgaagaagaatgccacaatgctgtacacggcctctcaagcatttctccgccacccagatgtcgccgctacgagagccaaccgagattatgtgttcaaacaagtccaggaggccatcgccggcatctccaatgctgctcaagctacctcgcccactgacgaagccaagggccacacgggcatcggcgagctggctgcggctcttaatgagtttgacaataagattatcctggaccccatgacgttcagcgaggccaggttccggccgtccctggaggagaggctggagagcatcatcagcggcgcagcgctgatggccgactcctcctgcacgcgagacgaccggcgcgagaggatcgtggcggagtgcaacgccgtgcggcaggcgctccaggacctgctcagcgagtacatgaataatactggaaggaaagaaaaaggagatcctctcaacattgcgattgataagatgactaagaaaacaagagatctaaggagacagcttcggaaagcagtgatggatcacatatctgactctttcctggaaaccaatgttcctttgctagttctcattgaggctgcaaagagcggaaatgaaaaggaagtgaaagaatatgcccaagttttccgtgagcatgccaacaaactggtagaggttgccaatttggcctgttccatctccaacaatgaagaaggggtgaaattagttcggatggcagccacccagattgacagcctgtgtccccaggtcatcaatgccgctctgacactggctgcccggccacagagcaaagttgctcaggataacatggacgtcttcaaagaccagtgggagaagcaggtccgagtgttgacagaggccgtggatgacatcacctcagtggatgacttcctctctgtctcagaaaatcacatcttggaggatgtgaacaagtgtgtgatagccctccaagagggcgatgtggacactctggaccggactgcaggggccatcaggggccgggcagctcgagtcatacacatcatcaatgctgagatggagaactatgaagctggggtttatactgagaaggtgttggaagctacaaaattgctttctgaaacagtgatgccacgcttcgctgaacaagtagaggttgccattgaagccctgagtgccaacgttcctcaaccgtttgaggagaatgagttcatcgatgcctctcgcctggtgtatgatggcgttcgggacatcagaaaggctgtgctgatgatcaggaccccagaagaactagaggatgattctgactttgagcaggaagattatgatgtgcgtagcaggacaagtgttcagactgaggatgaccagctcattgcagggcagagcgcacgggccatcatggcgcaactaccgcaggaggagaaggcaaaaatagctgagcaggtggagatattccatcaagagaaaagcaagctggatgcagaagtggccaaatgggacgacagcggcaatgatatcattgtactggccaagcagatgtgtatgatcatgatggaaatgacagacttcacaagaggcaaaggcccattgaaaaatacatctgatgtcattaatgctgccaagaaaattgccgaagcaggttctcgaatggacaaattagctcgtgctgtggctgatcagtgtcctgattcagcatgtaagcaggatttattagcctaccttcaacgaattgccttgtattgccatcagcttaatatctgcagcaaggtgaaggcagaagtgcagaatctgggaggagagctcattgtgtcagggctggacagtgccacatcgcttatccaggcagctaaaaacctgatgaatgctgttgtcctcacggtgaaagcatcctatgtggcctcaaccaaataccagaaggtctatgggacagcagctgtcaactcacctgttgtgtcttggaagatgaaggctccagagaagaagccccttgtgaagagagaaaagcctgaagaattccagacacgagttcgacgaggttctcagaagaaacacatttcgcctgtacaggctttaagtgaattcaaagcaatggattccttctaggacgataggttttaacaagaaagctttttctttcttttctttctttctttttctttttaattccatttttgtatgcatacctgccagctcgtatgcctctggcatggggaaattaagggaacagtgtctgtttgcatgtaagatgagatgagatcaatactactgatccatctgtagcctgggaaggagacaggacattcctgtactaaggtggcacagagctgtcctttgcaacattctcataaaattgggcacagagttcgcattggcgcaatatttatgggagtgggagggatggggaaaataaacttaactctacaaaagcaaactctaatgcatgcaagaatcattaggttggcaggtatatgcataagtgaaaaatctggaagtgtaatggtagaacataaaacttgtattgcttctgtttcagtgcaaaaatgtactagccaatacgcttaagtgtgtggcccatgaattgaacaatttaaccttgaagtctatatccgtgatattatgtcgatttttaactgaggggaaattaactagtccagcctaaaatgcttcttttaatctgcattctgtttcctcttctagttgtgccattactagtgatcatgtttttttcccccctttaatgaaaacaataaacatctatttgagacaattaaaatccttctgggggcactggaagcacaatacggtgaccaatcttgctttcatttttttttctttttaatttgaaccatgattttgctagaaatagaaggcccagtggtggaatattagagggaaggaaactgacaacgtgtgaaagttagaggcaaatacataggtgtagcttggagtgctggtatctaatataccattgtattcactaactaactcaaaataaacacatttaatcttga

SEQ ID NO: 455625 - DNA, 2792 bp, Homo sapiens
tttggacctttgctttagaaaagcaacttgagagaagacacaggaaggcaatgatttggggcttggctaagatttttggggttttttccccctcttgcgggtactggaattctgcagtcagccagcccttttttgaggtggagaggggaaatgctttccaaacccacctagtttgggaagccatccaagtcccggtggtgtgagatccagtgtggcaaaaagactggaaggaaagaaaaaggagatcctctcaacattgcgattgataagatgactaagaaaacaagagatctaaggagacagcttcggaaagcagtgatggatcacatatctgactctttcctggaaaccaatgttcctttgctagttctcattgaggctgcaaagagcggaaatgaaaaggaagtgaaagaatatgcccaagttttccgtgagcatgccaacaaactggtagaggttgccaatttggcctgttccatctccaacaatgaagaaggggtgaaattagttcggatggcagccacccagattgacagcctgtgtccccaggtcatcaatgccgctctgacactggctgcccggccacagagcaaagttgctcaggataacatggacgtcttcaaagaccagtgggagaagcaggtccgagtgttgacagaggccgtggatgacatcacctcagtggatgacttcctctctgtctcagaaaatcacatcttggaggatgtgaacaagtgtgtgatagccctccaagagggcgatgtggacactctggaccggactgcaggggccatcaggggccgggcagctcgagtcatacacatcatcaatgctgagatggagaactatgaagctggggtttatactgagaaggtgttggaagctacaaaattgctttctgaaacagtgatgccacgcttcgctgaacaagtagaggttgccattgaagccctgagtgccaacgttcctcaaccgtttgaggagaatgagttcatcgatgcctctcgcctggtgtatgatggcgttcgggacatcagaaaggctgtgctgatgatcaggaccccagaagaactagaggatgattctgactttgagcaggaagattatgatgtgcgtagcaggacaagtgttcagactgaggatgaccagctcattgcagggcagagcgcacgggccatcatggcgcaactaccgcaggaggagaaggcaaaaatagctgagcaggtggagatattccatcaagagaaaagcaagctggatgcagaagtggccaaatgggacgacagcggcaatgatatcattgtactggccaagcagatgtgtatgatcatgatggaaatgacagacttcacaagaggcaaaggcccattgaaaaatacatctgatgtcattaatgctgccaagaaaattgccgaagcaggttctcgaatggacaaattagctcgtgctgtggctgatcagtgtcctgattcagcatgtaagcaggatttattagcctaccttcaacgaattgccttgtattgccatcagcttaatatctgcagcaaggtgaaggcagaagtgcagaatctgggaggagagctcattgtgtcagggctggacagtgccacatcgcttatccaggcagctaaaaacctgatgaatgctgttgtcctcacggtgaaagcatcctatgtggcctcaaccaaataccagaaggtctatgggacagcagctgtcaactcacctgttgtgtcttggaagatgaaggctccagagaagaagccccttgtgaagagagaaaagcctgaagaattccagacacgagttcgacgaggttctcagaagaaacacatttcgcctgtacaggctttaagtgaattcaaagcaatggattccttctaggacgataggttttaacaagaaagctttttctttcttttctttctttctttttctttttaattccatttttgtatgcatacctgccagctcgtatgcctctggcatggggaaattaagggaacagtgtctgtttgcatgtaagatgagatgagatcaatactactgatccatctgtagcctgggaaggagacaggacattcctgtactaaggtggcacagagctgtcctttgcaacattctcataaaattgggcacagagttcgcattggcgcaatatttatgggagtgggagggatggggaaaataaacttaactctacaaaagcaaactctaatgcatgcaagaatcattaggttggcaggtatatgcataagtgaaaaatctggaagtgtaatggtagaacataaaacttgtattgcttctgtttcagtgcaaaaatgtactagccaatacgcttaagtgtgtggcccatgaattgaacaatttaaccttgaagtctatatccgtgatattatgtcgatttttaactgaggggaaattaactagtccagcctaaaatgcttcttttaatctgcattctgtttcctcttctagttgtgccattactagtgatcatgtttttttcccccctttaatgaaaacaataaacatctatttgagacaattaaaatccttctgggggcactggaagcacaatacggtgaccaatcttgctttcatttttttttctttttaatttgaaccatgattttgctagaaatagaaggcccagtggtggaatattagagggaaggaaactgacaacgtgtgaaagttagaggcaaatacataggtgtagcttggagtgctggtatctaatataccattgtattcactaactaactcaaaataaacacatttaatcttga

SEQ ID NO: 455626 - DNA, 4077 bp, Homo sapiens
agatttaagtctcagagccagcactcaggatgagtgccaatggaagcctgtccttggagtccagaatgaacgtcagaagcaacccagccacagcaggagactgtccatgaatgtcatctggctgaacctaaagtttccttagacacatgaatgaacacagtcatgctgtcaggaagaggaaaaggaagactgataaataaacgttcaatttaagccaatccagtatctatactgtagacctcagtgaaggctggaagactaatccaacacaatctgacatcctgattctttccaatcacctttatgttccaccctctcacctctggatttagatgcactccttcaaggaccatgggttctgcaacagtaccccctctccattgttccagctctgactcagatgggccctccttgatggcactcccagcagcacagccttagcactgggagcatgacttcggcaacttcacctatcattctgaaatgggaccccaaaagtttggaaatccggacgctaacagtggaaaggctgttggagccacttgttacacaggtgactacacttgtcaacacaagcaacaaaggcccatctggtaaaaagaaagggaggtcaaagaaagcccatgtactagctgcctctgtagagcaagccactcagaatttcctggaaaagggtgaacagatcgctaaggagagtcaagatctcaaagaagagttggtggctgctgtagaggatgtgcgcaaacaaggtgagacgatgcggatcgcctcctccgagtttgcagatgacccttgctcgtcggtaaagcgcggcaccatggtacgggcggcaagggctttgctctccgcggtgacacgcttactcatcctggcggacatggcagatgtcatgagacttttatcccatctgaaaattgtggaagaggccctggaagctgtcaaaaatgctacaaatgagcaagaccttgcaaaccgttttaaagagtttgggaaaaagatggtgaaacttaactatgtagcagcaagaagacaacaggagctgaaggatcctcactgtcgggatgagatggcagccgcccgaggggctctgaagaagaatgccacaatgctgtacacggcctctcaagcatttctccgccacccagatgtcgccgctacgagagccaaccgagattatgtgttcaaacaagtccaggaggccatcgccggcatctccaatgctgctcaagctacctcgcccactgacgaagccaagggccacacgggcatcggcgagctggctgcggctcttaatgagtttgacaataagattatcctggaccccatgacgttcagcgaggccaggttccggccgtccctggaggagaggctggagagcatcatcagcggcgcagcgctgatggccgactcctcctgcacgcgagacgaccggcgcgagaggatcgtggcggagtgcaacgccgtgcggcaggcgctccaggacctgctcagcgagtacatgaataatactggaaggaaagaaaaaggagatcctctcaacattgcgattgataagatgactaagaaaacaagagatctaaggagacagcttcggaaagcagtgatggatcacatatctgactctttcctggaaaccaatgttcctttgctagttctcattgaggctgcaaagagcggaaatgaaaaggaagtgaaagaatatgcccaagttttccgtgagcatgccaacaaactggtagaggttgccaatttggcctgttccatctccaacaatgaagaaggggtgaaattagttcggatggcagccacccagattgacagcctgtgtccccaggtcatcaatgccgctctgacactggctgcccggccacagagcaaagttgctcaggataacatggacgtcttcaaagaccagtgggagaagcaggtccgagtgttgacagaggccgtggatgacatcacctcagtggatgacttcctctctgtctcagaaaatcacatcttggaggatgtgaacaagtgtgtgatagccctccaagagggcgatgtggacactctggaccggactgcaggggccatcaggggccgggcagctcgagtcatacacatcatcaatgctgagatggagaactatgaagctggggtttatactgagaaggtgttggaagctacaaaattgctttctgaaacagtgatgccacgcttcgctgaacaagtagaggttgccattgaagccctgagtgccaacgttcctcaaccgtttgaggagaatgagttcatcgatgcctctcgcctggtgtatgatggcgttcgggacatcagaaaggctgtgctgatgatcaggaccccagaagaactagaggatgattctgactttgagcaggaagattatgatgtgcgtagcaggacaagtgttcagactgaggatgaccagctcattgcagggcagagcgcacgggccatcatggcgcaactaccgcaggaggagaaggcaaaaatagctgagcaggtggagatattccatcaagagaaaagcaagctggatgcagaagtggccaaatgggacgacagcggcaatgatatcattgtactggccaagcagatgtgtatgatcatgatggaaatgacagacttcacaagaggcaaaggcccattgaaaaatacatctgatgtcattaatgctgccaagaaaattgccgaagcaggttctcgaatggacaaattagctcgtgctgtggctgatcagtgtcctgattcagcatgtaagcaggatttattagcctaccttcaacgaattgccttgtattgccatcagcttaatatctgcagcaaggtgaaggcagaagtgcagaatctgggaggagagctcattgtgtcagggctggacagtgccacatcgcttatccaggcagctaaaaacctgatgaatgctgttgtcctcacggtgaaagcatcctatgtggcctcaaccaaataccagaaggtctatgggacagcagctgtcaactcacctgttgtgtcttggaagatgaaggctccagagaagaagccccttgtgaagagagaaaagcctgaagaattccagacacgagttcgacgaggttctcagaagaaacacatttcgcctgtacaggctttaagtgaattcaaagcaatggattccttctaggacgataggttttaacaagaaagctttttctttcttttctttctttctttttctttttaattccatttttgtatgcatacctgccagctcgtatgcctctggcatggggaaattaagggaacagtgtctgtttgcatgtaagatgagatgagatcaatactactgatccatctgtagcctgggaaggagacaggacattcctgtactaaggtggcacagagctgtcctttgcaacattctcataaaattgggcacagagttcgcattggcgcaatatttatgggagtgggagggatggggaaaataaacttaactctacaaaagcaaactctaatgcatgcaagaatcattaggttggcaggtatatgcataagtgaaaaatctggaagtgtaatggtagaacataaaacttgtattgcttctgtttcagtgcaaaaatgtactagccaatacgcttaagtgtgtggcccatgaattgaacaatttaaccttgaagtctatatccgtgatattatgtcgatttttaactgaggggaaattaactagtccagcctaaaatgcttcttttaatctgcattctgtttcctcttctagttgtgccattactagtgatcatgtttttttcccccctttaatgaaaacaataaacatctatttgagacaattaaaatccttctgggggcactggaagcacaatacggtgaccaatcttgctttcatttttttttctttttaatttgaaccatgattttgctagaaatagaaggcccagtggtggaatattagagggaaggaaactgacaacgtgtgaaagttagaggcaaatacataggtgtagcttggagtgctggtatctaatataccattgtattcactaactaactcaaaataaacacatttaatcttga

SEQ ID NO: 455627 - DNA, 1775 bp, Homo sapiens
agcggatgggagtgggacggggactttggggagcttatcagcctgtgctcgtggcctccctggaatggagaaagacgtgctttccggaatggcagggtagctcataagcctttgcagggtctggctctgccatccgcagaaggcagagtcaacatacggtctgtacttcctttgtcaccgtcactcacgctttttctgtaacccacgcaggccatcatggcgcaactaccgcaggaggagaaggcaaaaatagctgagcaggtggagatattccatcaagagaaaagcaagctggatgcagaagtggccaaatgggacgacagcggcaatgatatcattgtactggccaagcagatgtgtatgatcatgatggaaatgacagacttcacaagaggcaaaggcccattgaaaaatacatctgatgtcattaatgctgccaagaaaattgccgaagcaggttctcgaatggacaaattagctcgtgctgtggctgatcagtgtcctgattcagcatgtaagcaggatttattagcctaccttcaacgaattgccttgtattgccatcagcttaatatctgcagcaaggtgaaggcagaagtgcagaatctgggaggagagctcattgtgtcagggctggacagtgccacatcgcttatccaggcagctaaaaacctgatgaatgctgttgtcctcacggtgaaagcatcctatgtggcctcaaccaaataccagaaggtctatgggacagcagctgtcaactcacctgttgtgtcttggaagatgaaggctccagagaagaagccccttgtgaagagagtttcgcctgtacaggctttaagtgaattcaaagcaatggattccttctaggacgataggttttaacaagaaagctttttctttcttttctttctttctttttctttttaattccatttttgtatgcatacctgccagctcgtatgcctctggcatggggaaattaagggaacagtgtctgtttgcatgtaagatgagatgagatcaatactactgatccatctgtagcctgggaaggagacaggacattcctgtactaaggtggcacagagctgtcctttgcaacattctcataaaattgggcacagagttcgcattggcgcaatatttatgggagtgggagggatggggaaaataaacttaactctacaaaagcaaactctaatgcatgcaagaatcattaggttggcaggtatatgcataagtgaaaaatctggaagtgtaatggtagaacataaaacttgtattgcttctgtttcagtgcaaaaatgtactagccaatacgcttaagtgtgtggcccatgaattgaacaatttaaccttgaagtctatatccgtgatattatgtcgatttttaactgaggggaaattaactagtccagcctaaaatgcttcttttaatctgcattctgtttcctcttctagttgtgccattactagtgatcatgtttttttcccccctttaatgaaaacaataaacatctatttgagacaattaaaatccttctgggggcactggaagcacaatacggtgaccaatcttgctttcatttttttttctttttaatttgaaccatgattttgctagaaatagaaggcccagtggtggaatattagagggaaggaaactgacaacgtgtgaaagttagaggcaaatacataggtgtagcttggagtgctggtatctaatataccattgtattcactaactaactcaaaataaacacatttaatcttga

SEQ ID NO: 455628 - DNA, 326 bp, Homo sapiens
gttcggatggcagccacccagattgacagcctgtgtccccaggtaagcctcattcactttgtttcaaaagcctgtcagtgaccttctccactccagcccttgtgcccctccttttccttctctatttcctcttgctgaaaaaggctactcatcatttatgagctgtttcaagttctacctttctcagaaagaataaaccataccagtctcttcagaattaccatggcagcttggccaggcatggtggctcacacctataatcccagtgctctgggaggctgaagtgggaggattgattgaggccaggggttcaaggccagcctggg

SEQ ID NO: 455629 - DNA, 1829 bp, Homo sapiens
agcggatgggagtgggacggggactttggggagcttatcagcctgtgctcgtggcctccctggaatggagaaagacgtgctttccggaatggcagggtagctcataagcctttgcagggtctggctctgccatccgcagaaggcagagtcaacatacggtctgtacttcctttgtcaccgtcactcacgctttttctgtaacccacgcaggccatcatggcgcaactaccgcaggaggagaaggcaaaaatagctgagcaggtggagatattccatcaagagaaaagcaagctggatgcagaagtggccaaatgggacgacagcggcaatgatatcattgtactggccaagcagatgtgtatgatcatgatggaaatgacagacttcacaagaggcaaaggcccattgaaaaatacatctgatgtcattaatgctgccaagaaaattgccgaagcaggttctcgaatggacaaattagctcgtgctgtggctgatcagtgtcctgattcagcatgtaagcaggatttattagcctaccttcaacgaattgccttgtattgccatcagcttaatatctgcagcaaggtgaaggcagaagtgcagaatctgggaggagagctcattgtgtcagggctggacagtgccacatcgcttatccaggcagctaaaaacctgatgaatgctgttgtcctcacggtgaaagcatcctatgtggcctcaaccaaataccagaaggtctatgggacagcagctgtcaactcacctgttgtgtcttggaagatgaaggctccagagaagaagccccttgtgaagagagaaaagcctgaagaattccagacacgagttcgacgaggttctcagaagaaacacatttcgcctgtacaggctttaagtgaattcaaagcaatggattccttctaggacgataggttttaacaagaaagctttttctttcttttctttctttctttttctttttaattccatttttgtatgcatacctgccagctcgtatgcctctggcatggggaaattaagggaacagtgtctgtttgcatgtaagatgagatgagatcaatactactgatccatctgtagcctgggaaggagacaggacattcctgtactaaggtggcacagagctgtcctttgcaacattctcataaaattgggcacagagttcgcattggcgcaatatttatgggagtgggagggatggggaaaataaacttaactctacaaaagcaaactctaatgcatgcaagaatcattaggttggcaggtatatgcataagtgaaaaatctggaagtgtaatggtagaacataaaacttgtattgcttctgtttcagtgcaaaaatgtactagccaatacgcttaagtgtgtggcccatgaattgaacaatttaaccttgaagtctatatccgtgatattatgtcgatttttaactgaggggaaattaactagtccagcctaaaatgcttcttttaatctgcattctgtttcctcttctagttgtgccattactagtgatcatgtttttttcccccctttaatgaaaacaataaacatctatttgagacaattaaaatccttctgggggcactggaagcacaatacggtgaccaatcttgctttcatttttttttctttttaatttgaaccatgattttgctagaaatagaaggcccagtggtggaatattagagggaaggaaactgacaacgtgtgaaagttagaggcaaatacataggtgtagcttggagtgctggtatctaatataccattgtattcactaactaactcaaaataaacacatttaatcttga

SEQ ID NO: 455630 - DNA, 3757 bp, Homo sapiens
agcggggacccaggcgggcgggcagagcaggcggcaccgcacctcggccagaggcggctgcagcagctgctgcccttgtccctgccgccgcctctccagtcccttctgtgattaccactccagctgctgggaacgggcgagaaagaggaggaggcgagaaactcccaccgacccacagagggagcatgacttcggcaacttcacctatcattctgaaatgggaccccaaaagtttggaaatccggacgctaacagtggaaaggctgttggagccacttgttacacaggtgactacacttgtcaacacaagcaacaaaggcccatctggtaaaaagaaagggaggtcaaagaaagcccatgtactagctgcctctgtagagcaagccactcagaatttcctggaaaagggtgaacagatcgctaaggagagtcaagatctcaaagaagagttggtggctgctgtagaggatgtgcgcaaacaaggtgagacgatgcggatcgcctcctccgagtttgcagatgacccttgctcgtcggtaaagcgcggcaccatggtacgggcggcaagggctttgctctccgcggtgacacgcttactcatcctggcggacatggcagatgtcatgagacttttatcccatctgaaaattgtggaagaggccctggaagctgtcaaaaatgctacaaatgagcaagaccttgcaaaccgttttaaagagtttgggaaaaagatggtgaaacttaactatgtagcagcaagaagacaacaggagctgaaggatcctcactgtcgggatgagatggcagccgcccgaggggctctgaagaagaatgccacaatgctgtacacggcctctcaagcatttctccgccacccagatgtcgccgctacgagagccaaccgagattatgtgttcaaacaagtccaggaggccatcgccggcatctccaatgctgctcaagctacctcgcccactgacgaagccaagggccacacgggcatcggcgagctggctgcggctcttaatgagtttgacaataagattatcctggaccccatgacgttcagcgaggccaggttccggccgtccctggaggagaggctggagagcatcatcagcggcgcagcgctgatggccgactcctcctgcacgcgagacgaccggcgcgagaggatcgtggcggagtgcaacgccgtgcggcaggcgctccaggacctgctcagcgagtacatgaataatactggaaggaaagaaaaaggagatcctctcaacattgcgattgataagatgactaagaaaacaagagatctaaggagacagcttcggaaagcagtgatggatcacatatctgactctttcctggaaaccaatgttcctttgctagttctcattgaggctgcaaagagcggaaatgaaaaggaagtgaaagaatatgcccaagttttccgtgagcatgccaacaaactggtagaggttgccaatttggcctgttccatctccaacaatgaagaaggggtgaaattagttcggatggcagccacccagattgacagcctgtgtccccaggtcatcaatgccgctctgacactggctgcccggccacagagcaaagttgctcaggataacatggacgtcttcaaagaccagtgggagaagcaggtccgagtgttgacagaggccgtggatgacatcacctcagtggatgacttcctctctgtctcagaaaatcacatcttggaggatgtgaacaagtgtgtgatagccctccaagagggcgatgtggacactctggaccggactgcaggggccatcaggggccgggcagctcgagtcatacacatcatcaatgctgagatggagaactatgaagctggggtttatactgagaaggtgttggaagctacaaaattgctttctgaaacagtgatgccacgcttcgctgaacaagtagaggttgccattgaagccctgagtgccaacgttcctcaaccgtttgaggagaatgagttcatcgatgcctctcgcctggtgtatgatggcgttcgggacatcagaaaggctgtgctgatgatcaggaccccagaagaactagaggatgattctgactttgagcaggaagattatgatgtgcgtagcaggacaagtgttcagactgaggatgaccagctcattgcagggcagagcgcacgggccatcatggcgcaactaccgcaggaggagaaggcaaaaatagctgagcaggtggagatattccatcaagagaaaagcaagctggatgcagaagtggccaaatgggacgacagcggcaatgatatcattgtactggccaagcagatgtgtatgatcatgatggaaatgacagacttcacaagaggcaaaggcccattgaaaaatacatctgatgtcattaatgctgccaagaaaattgccgaagcaggttctcgaatggacaaattagctcgtgctgtggctgatcagtgtcctgattcagcatgtaagcaggatttattagcctaccttcaacgaattgccttgtattgccatcagcttaatatctgcagcaaggtgaaggcagaagtgcagaatctgggaggagagctcattgtgtcagggctggacagtgccacatcgcttatccaggcagctaaaaacctgatgaatgctgttgtcctcacggtgaaagcatcctatgtggcctcaaccaaataccagaaggtctatgggacagcagctgtcaactcacctgttgtgtcttggaagatgaaggctccagagaagaagccccttgtgaagagagtttcgcctgtacaggctttaagtgaattcaaagcaatggattccttctaggacgataggttttaacaagaaagctttttctttcttttctttctttctttttctttttaattccatttttgtatgcatacctgccagctcgtatgcctctggcatggggaaattaagggaacagtgtctgtttgcatgtaagatgagatgagatcaatactactgatccatctgtagcctgggaaggagacaggacattcctgtactaaggtggcacagagctgtcctttgcaacattctcataaaattgggcacagagttcgcattggcgcaatatttatgggagtgggagggatggggaaaataaacttaactctacaaaagcaaactctaatgcatgcaagaatcattaggttggcaggtatatgcataagtgaaaaatctggaagtgtaatggtagaacataaaacttgtattgcttctgtttcagtgcaaaaatgtactagccaatacgcttaagtgtgtggcccatgaattgaacaatttaaccttgaagtctatatccgtgatattatgtcgatttttaactgaggggaaattaactagtccagcctaaaatgcttcttttaatctgcattctgtttcctcttctagttgtgccattactagtgatcatgtttttttcccccctttaatgaaaacaataaacatctatttgagacaattaaaatccttctgggggcactggaagcacaatacggtgaccaatcttgctttcatttttttttctttttaatttgaaccatgattttgctagaaatagaaggcccagtggtggaatattagagggaaggaaactgacaacgtgtgaaagttagaggcaaatacataggtgtagcttggagtgctggtatctaatataccattgtattcactaactaactcaaaataaacacatttaatcttga

SEQ ID NO: 455631 - DNA, 2196 bp, Homo sapiens
agcggggacccaggcgggcgggcagagcaggcggcaccgcacctcggccagaggcggctgcagcagctgctgcccttgtccctgccgccgcctctccagtcccttctgtgattaccactccagctgctgggaacgggcgagaaagaggaggaggcgagaaactcccaccgacccacagagggagcatgacttcggcaacttcacctatcattctgaaatgggaccccaaaagtttggaaatccggacgctaacagtggaaaggctgttggagccacttgttacacaggtgactacacttgtcaacacaagcaacaaaggcccatctggtaaaaagaaagggaggtcaaagaaagcccatgtactagctgcctctgtagagcaagccactcagaatttcctggaaaagggtgaacagatcgctaaggagagtcaagatctcaaagaagagttggtggctgctgtagaggatgtgcgcaaacaaggtgagacgatgcggatcgcctcctccgagtttgcagatgacccttgctcgtcggtaaagcgcggcaccatggtacgggcggcaagggctttgctctccgcggtgacacgcttactcatcctggcggacatggcagatgtcatgagacttttatcccatctgaaaattgtggaagaggccctggaagctgtcaaaaatgctacaaatgagcaagaccttgcaaaccgttttaaagagtttgggaaaaagatggtgaaacttaactatgtagcagcaagaagacaacaggagctgaaggatcctcactgtcgggatgagatggcagccgcccgaggggctctgaagaagaatgccacaatgctgtacacggcctctcaagcatttctccgccacccagatgtcgccgctacgagagccaaccgagattatgtgttcaaacaagtccaggaggccatcgccggcatctccaatgctgctcaagctacctcgcccactgacgaagccaagggccacacgggcatcggcgagctggctgcggctcttaatgagtttgacaataagattatcctggaccccatgacgttcagcgaggccaggttccggccgtccctggaggagaggctggagagcatcatcagcggcgcagcgctgatggccgactcctcctgcacgcgagacgaccggcgcgagaggatcgtggcggagtgcaacgccgtgcggcaggcgctccaggacctgctcagcgagtacatgaataatactggaaggaaagaaaaaggagatcctctcaacattgcgattgataagatgactaagaaaacaagagatctaaggagacagcttcggaaagcagtgatggatcacatatctgactctttcctggaaaccaatgttcctttgctagttctcattgaggctgcaaagagcggaaatgaaaaggaagtgaaagaatatgcccaagttttccgtgagcatgccaacaaactggtagaggttgccaatttggcctgttccatctccaacaatgaagaaggggtgaaattagttcggatggcagccacccagattgacagcctgtgtccccaggtcatcaatgccgctctgacactggctgcccggccacagagcaaagttgctcaggataacatggacgtcttcaaagaccagtgggagaagcaggtccgagtgttgacagaggccgtggatgacatcacctcagtggatgacttcctctctgtctcagaaaatcacatcttggaggatgtgaacaagtgtgtgatagccctccaagagggcgatgtggacactctggaccggactgcaggggccatcaggggccgggcagctcgagtcatacacatcatcaatgctgagatggagaactatgaagctggggtttatactgagaaggtgttggaagctacaaaattgctttctgaaacagtgatgccacgcttcgctgaacaagtagaggttgccattgaagccctgagtgccaacgttcctcaaccgtttgaggagaatgagttcatcgatgcctctcgcctggtgtatgatggcgttcgggacatcagaaaggctgtgctgatgatcaggaccccagaagaactagaggataacatggacgtcttcaaagaccagtgggagaagcaggtccgagtgttgacagaggccgtggatgacatcacctcagtggatgacttcctctctgtct

SEQ ID NO: 455632 - DNA, 550 bp, Homo sapiens
cactgagattgaggaaggtttcttgtctccgagccttctcccagtagagctataaatccaggctggctcctccctccccacacagctgctcctgctctccctcctccaggtgaccccagccatgaggaccctcgccatccttgctgccattctcctggtggccctgcaggcccaggctgagccactccaggcaagagctgatgaggttgctgcagccccggagcagattgcagcggacatcccagaagtggttgtttcccttgcatgggacgaaagcttggctccaaagcatccaggtgagagaggcaggcatgcagagctgctaagtctagagggaaggacgggagagaggttccagagttgggtctcagcagtctatgtcactgaggtggcttcacttagaatctctgggcattgattttctcatctagaaattgaacagagagccaaataaacctgagaaactttatttctccaaagacttgattccaagaaacatctgtgaaattcactaagtttaagatatgaagagacagactagttatttctg

SEQ ID NO: 455633 - DNA, 469 bp, Homo sapiens
ttgttaattgttactcaagtctaagtagaggtggaaataataaactttcttttttttacttaaaccactctgtgtcactgagctgatttcacctttagcctgataaaatcattgtcctctccaccctgattcctacaggagactactcaccccataacctcaaaaacctcttcatgaggatggtaagtcacctgaatcctgaagtgaattactcgctattccattggaactcatataggacaccagaatctagacctccagagaacagcaggacccatcttcagaaaataagaagcatttgttccctgagcctgttgaatcaaagtgcaatttctattctttttggaatgttaaaaagtgaatcataatatttaagcaggtgaacccacgagtaacatagcagggtctttcttgtcattattagctccaacctagcacagacattagaggtacagatgtatactagcat

SEQ ID NO: 455634 - DNA, 236 bp, Homo sapiens
agctggtgggaaatgcatgcccaagaacccttctagacacccaggggcaccaggagaccagggaaaggacccagtgcacagtggggaggccttgctcgcaataattgctatagaagacctgggacagaggactgctgtctgccctctctggtcaccctgcctagctagaggatctgacccctagccacggtctacccactagccacggtcgacccactagccacggtcaacccacg

SEQ ID NO: 455635 - DNA, 230 bp, Homo sapiens
aaaactctcatgaggatggtagtcactcgatagaatctagactcagaacgaagaagcatttgttccctgagcctgttgaatcaaagtgcaatttctattctttttggaatgttaaaaagtgaatcataatatttaagcaggtgaacccacgagtaacatagcagggtctttcttgtcattattagctccaacctagcacagacattagaggtacagatgtatactagcat

SEQ ID NO: 455636 - DNA, 514 bp, Homo sapiens
aagtccacttgtgcacggctgctccttgctatagaagacctgggacagaggactgctgtctgccctctctggtcaccctgcctagctagaggatctgtgaccccagccatgaggaccctcgccatccttgctgccattctcctggtggccctgcaggcccaggctgagccactccaggcaagagctgatgaggttgctgcagccccggagcagattgcagcggacatcccagaagtggttgtttcccttgcatgggacgaaagcttggctccaaagcatccaggctcaaggaaaaacatggcctgctattgcagaataccagcgtgcattgcaggagaacgtcgctatggaacctgcatctaccagggaagactctgggcattctgctgctgagcttgcagaaaaagaaaaatgagctcaaaatttgctttgagagctacagggaattgctattactcctgtaccttctgctcaatttcctttcctcatcccaaataaatgccttgttacaaga

SEQ ID NO: 455637 - DNA, 592 bp, Homo sapiens
aaaaggatctaagggaagatcactgtagtttagttctgttgacctgtgcacctaccccttggaaatgtctgctggtatttctaattccacaggtcatcagatgcctgcttgataatatataaacaataaaaacaactttcacttcttcctattgtaagcctagctagaggatctgtgaccccagccatgaggaccctcgccatccttgctgccattctcctggtggccctgcaggcccaggctgagccactccaggcaagagctgatgaggttgctgcagccccggagcagattgcagcggacatcccagaagtggttgtttcccttgcatgggacgaaagcttggctccaaagcatccaggctcaaggaaaaacatggcctgctattgcagaataccagcgtgcattgcaggagaacgtcgctatggaacctgcatctaccagggaagactctgggcattctgctgctgagcttgcagaaaaagaaaaatgagctcaaaatttgctttgagagctacagggaattgctattactcctgtaccttctgctcaatttcctttcctcatcccaaataaatgccttgttacaaga

SEQ ID NO: 455638 - DNA, 524 bp, Homo sapiens
  misc_feature (501)..(501): n is a, c, g, or t
tgctcggtaccagcggggaacaatcacttttgctatagaagacctgggacagaggactgctgtctgccctctctggtcaccctgcctagctagaggatctgtgaccccagccatgaggaccctcgccatccttgctgccattctcctggtggccctgcaggcccaggctgagccactccaggcaagagctgatgaggttgctgcagccccggagcagattgcagcggacatcccagaagtggttgtttcccttgcatgggacgaaagcttggctccaaagcatccaggctcaaggaaaaacatggcctgctattgcagaataccagcgtgcattgcaggagaacgtcgctatggaacctgcatctaccagggaagactctgggcattctgctgctgagcttgcagaaaaagaaaaatgagctcaaaatttgctttgagagctacagggaattgctattactcctgtaccttctgctcaatttcctttcctcagcctggtcncctaagctcggtagatcgaccca

SEQ ID NO: 455639 - DNA, 452 bp, Homo sapiens
ctacacggtgaatacctgtctctactaaaaatacaaaaaattagccgggcgttgtggcgtggcgcccgtaatcccagctactcctggggctgttatggaatcctaacagtccccgataaagggagaattattccaaacagccccggagcagattgcagcggacatcccagaagtggttgtttcccttgcatgggacgaaagcttggctccaaagcatccaggctcaaggaaaaacatggcctgctattgcagaataccagcgtgcattgcaggagaacgtcgctatggaacctgcatctaccagggaagactctgggcattctgctgctgagcttgcagaaaaagaaaaatgagctcaaaatttgctttgagagctacagggaattgctattactcctgtaccttctgctcaatttcctttcctcatcccaaataaatgccttgttacaaga

SEQ ID NO: 455640 - DNA, 576 bp, Homo sapiens
tcaagaagttaaccagttccgttccagcttcttgatcaggggtgtcagctgctcctttgacttttcaaagtaagacttggcctcggcctgaagctctgggctcttgaccttctccatcaggttgctatagaagacctgggacagaggactgctgtctgccctctctggtcaccctgcctagctagaggatctgtaagtactacaaaacttaaactttacactgagttttcatcattgaagctatgcctccaatctgacctctgactgtggggccgccccagagggacccagcgggtgaatccctgctaggaacgtctgtccggacctctggtgactgctggggacgatggcttccagctaacttaatagagaaactcaagcagtttccttctaaatacacatgtcacatgtcctggttgacatgtccagtagagactatcacaggtctttggaacattcttttgagagaaacctatttaggtccttggtctgtttttcaatcaggttgtttgatttttgctattgagttgttggaattccttatgtattcagatatttgccccttctgccatgtag

SEQ ID NO: 455641 - DNA, 523 bp, Homo sapiens
tcaagaagttaaccagttccgttccagcttcttgatcaggggtgtcagctgctcctttgacttttcaaagtaagacttggcctcggcctgaagctctgggctcttgaccttctccatcaggttgctatagaagacctgggacagaggactgctgtctgccctctctggtcaccctgcctagctagaggatctgagactactcaccccataacctcaaaaacctcttcatgaggatggtaagtcacctgaatcctgaagtgaattactcgctattccattggaactcatataggacaccagaatctagacctccagagaacagcaggacccatcttcagaaaataagaagcatttgttccctgagcctgttgaatcaaagtgcaatttctattctttttggaatgttaaaaagtgaatcataatatttaagcaggtgaacccacgagtaacatagcagggtctttcttgtcattattagctccaacctagcacagacattagaggtacagatgtatactagcat

SEQ ID NO: 455642 - DNA, 610 bp, Homo sapiens
tcaagaagttaaccagttccgttccagcttcttgatcaggggtgtcagctgctcctttgacttttcaaagtaagacttggcctcggcctgaagctctgggctcttgaccttctccatcaggttgctatagaagacctgggacagaggactgctgtctgccctctctggtcaccctgcctagctagaggatctgtgaccccagccatgaggaccctcgccatccttgctgccattctcctggtggccctgcaggcccaggctgagccactccaggcaagagctgatgaggttgctgcagccccggagcagattgcagcggacatcccagaagtggttgtttcccttgcatgggacgaaagcttggctccaaagcatccaggctcaaggaaaaacatggcctgctattgcagaataccagcgtgcattgcaggagaacgtcgctatggaacctgcatctaccagggaagactctgggcattctgctgctgagcttgcagaaaaagaaaaatgagctcaaaatttgctttgagagctacagggaattgctattactcctgtaccttctgctcaatttcctttcctcatcccaaataaatgccttgttacaaga

SEQ ID NO: 455643 - DNA, 518 bp, Homo sapiens
tgctcggtaccagcggggaacaatcacttttgctatagaagacctgggacagaggactgctgtctgccctctctggtcaccctgcctagctagaggatctgtgaccccagccatgaggaccctcgccatccttgctgccattctcctggtggccctgcaggcccaggctgagccactccaggcaagagctgatgaggttgctgcagccccggagcagattgcagcggacatcccagaagtggttgtttcccttgcatgggacgaaagcttggctccaaagcatccaggctcaaggaaaaacatggcctgctattgcagaataccagcgtgcattgcaggagaacgtcgctatggaacctgcatctaccagggaagactctgggcattctgctgctgagcttgcagaaaaagaaaaatgagctcaaaatttgctttgagagctacagggaattgctattactcctgtaccttctgctcaatttcctttcctcatcccaaataaatgccttgttacaaga

SEQ ID NO: 455644 - DNA, 735 bp, Homo sapiens
tgctcggtaccagcggggaacaatcacttttgctatagaagacctgggacagaggactgctgtctgccctctctggtcaccctgcctagctagaggatctgtgaccccagccatgaggaccctcgccatccttgctgccattctcctggtggccctgcaggcccaggctgagccactccaggcaagagctgatgaggttgctgcagccccggagcagattgcagcggacatcccagaagtggttgtttcccttgcatgggacgaaagcttggctccaaagcatccaggctcaaggaaaaacatggcctgctattgcagaataccagcgtgcattgcaggagaacgtcgctatggaacctgcatctaccagggaagactctgggcattctgctgctgagcttgcagaaaaagaaaaatgagctcaaaatttgctttgagagctacagggaattgctattactcctgtaccttctgctcaatttcctttcctcatcccaaataaatgccttgttacaagaaaaaaaaaaaaaaaaagaaaaaaaaaaaaaaaaagccaaaaagccgaaaaaaaaaacacaaacacaaaactagagaaaaagaaaagggaggggggcgagcgggcacacaaaaataccgaccggaggggccgccacaaatagcagagcagcacacccacggtaatagagtgtaaacaggtgcgggcgacccacacacggaggcggcccagcaaagaaa

SEQ ID NO: 455645 - DNA, 827 bp, Homo sapiens
  misc_feature (381)..(381): n is a, c, g, or t
tcaagaagttaaccagttccgttccagcttcttgatcaggggtgtcagctgctcctttgacttttcaaagtaagacttggcctcggcctgaagctctgggctcttgaccttctccatcaggttgctatagaagacctgggacagaggactgctgtctgccctctctggtcaccctgcctagctagaggatctgtgaccccagccatgaggaccctcgccatccttgctgccattctcctggtggccctgcaggcccaggctgagccactccaggcaagagctgatgaggttgctgcagccccggagcagattgcagcggacatcccagaagtggttgtttcccttgcatgggacgaaagcttggctccaaagcatccagcncaaggcaacacggtttttgcagttgcggcattgtagcgctgccgtgcagtagcaagtttgtatggctgctgcttgtctctagagagtctcctgtctgtagcctgctgagcttgcagaaaaagaaaaatgagctcaaaatttgctttgagagctacagggaattgctattactcctgtaccttctgctcaatttcctttcctcatcccaaataaatgccttgttacaagaaaaaaaaaaaaaaaaagaaaaaaaaaaaaaaaaagccaaaaagccgaaaaaaaaaacacaaacacaaaactagagaaaaagaaaagggaggggggcgagcgggcacacaaaaataccgaccggaggggccgccacaaatagcagagcagcacacccacggtaatagagtgtaaacaggtgcgggcgacccacacacggaggcggcccagcaaagaaa

SEQ ID NO: 455646 - DNA, 580 bp, Homo sapiens
cgggggcggggcctgagtcagtctcgccagctgccggtctttcgggggctccgtaactttctatccgtccgcgtcagcgccttgccaccctcatctccaatatgcctggtccgacccccagtggcactaacgtgggatcctcagggcgctctcccagcaaagcagtggccgcccgggcggcgggatccactgtccggcagaggaaaaatgccagctgtgggacaaggagtgcaggccgcacaacctcggcaggcaccggggggatgtggcgattctacacagaagattcacctgggctcaaagttggccctgttccagtattggttatgagtcttctgttcatcgcttctgtatttatgttgcacatttggggcaagtacactcgttcgtagattcagttacatccatctgtcatctgaagaaggaggaaaaaacccaacatttcttggaccaaaagtatagtgactatctgttcatgagagaaattttctgtaagcttgctgttttacaggggatttatcaataattgattttgaggaatcagtttttttctatggctaataaactttttaattcactt

SEQ ID NO: 455647 - DNA, 862 bp, Homo sapiens
cgggggcggggcctgagtcagtctcgccagctgccggtctttcgggggctccgtaactttctatccgtccgcgtcagcgccttgccaccctcatctccaatatgcctggtccgacccccagtggcactaacgtgggatcctcagggcgctctcccagcaaagcagtggccgcccgggcggcgggatccactgtccggcagaggaaaaatgccagctgtgggacaaggagtgcaggccgcacaacctcggcaggcaccggggggatgtggcgattctacacagaagattcacctgggctcaaagttggccctgttccagtattggttatgagtcttctgttcatcgcttctgtatttatgttgcacatttggggcaagtacactcgttcgtagattcagttacatccatctgtcatctgaagaaggaggaaaaaacccaacatttcttggaccaaaagtatagtgactatctgttcatgagagaaattttctgtaagcttgctgttttacaggggatttatcaataattgattttgaggaatcagtttttttctatggctaataaactttttaattcacttcaaaaaaaaaaaaaaaaaaaaaaaaaaatttttggggggccggggacctagaaaggtttttaaacacatgtgtgggggcgggggccagtggtaatgtgaccttgccgtacgtgtccaaggaaacctggcatgaaatgggtggtttccaaaaaaaaagcgggggacgggggtctaaaacagcgggttgggctttggcttcaggctcgagtgctcccccttcggcgcggtgtgggtgaaagagagagagatagaaagtaggggaaacaatagtaaaagtgagta

SEQ ID NO: 455648 - DNA, 491 bp, Homo sapiens
aagaaagttttttttttttgattccttaactgtgtaataatggtagcatatgttataatgctattctaataatttccagaaaaggccatttgtaacattttcctctctttcaggaaaaatgccagctgtgggacaaggagtgcaggccgcacaacctcggcaggcaccggggggatgtggcgattctacacagaagattcacctgggctcaaagttggccctgttccagtattggttatgagtcttctgttcatcgcttctgtatttatgttgcacatttggggcaagtacactcgttcgtagattcagttacatccatctgtcatctgaagaaggaggaaaaaacccaacatttcttggaccaaaagtatagtgactatctgttcatgagagaaattttctgtaagcttgctgttttacaggggatttatcaataattgattttgaggaatcagtttttttctatggctaataaactttttaattcactt

SEQ ID NO: 455649 - DNA, 659 bp, Homo sapiens
cgggggcggggcctgagtcagtctcgccagctgccggtctttcgggggctccgtaactttctatccgtccgcgtcagcgccttgccaccctcatctccaatatgcctggtccgacccccagtggcactaacgtgggatcctcagggcgctctcccagcaaagcagtggccgcccgggcggcgggatccactgtccggcagagggaggaaaaaatcttgaacacatgcatggaaacttctgaaggatgtgaagagggatgtgacattttctggctgcaacaggaaaaatgccagctgtgggacaaggagtgcaggccgcacaacctcggcaggcaccggggggatgtggcgattctacacagaagattcacctgggctcaaagttggccctgttccagtattggttatgagtcttctgttcatcgcttctgtatttatgttgcacatttggggcaagtacactcgttcgtagattcagttacatccatctgtcatctgaagaaggaggaaaaaacccaacatttcttggaccaaaagtatagtgactatctgttcatgagagaaattttctgtaagcttgctgttttacaggggatttatcaataattgattttgaggaatcagtttttttctatggctaataaactttttaattcactt

SEQ ID NO: 455650 - DNA, 752 bp, Homo sapiens
  misc_feature (661)..(661): n is a, c, g, or t
  misc_feature (666)..(666): n is a, c, g, or t
cgggggcggggcctgagtcagtctcgccagctgccggtctttcgggggctccgtaactttctatccgtccgcgtcagcgccttgccaccctcatctccaatatgcctggtccgacccccagtggcactaacgtgggatcctcagggcgctctcccagcaaagcagtggccgcccgggcggcgggatccactgtccggcagagggaggaaaaaatcttgaacacatgcatggaaacttctgaaggatgtgaagagggatgtgacattttctggctgcaacaggaaaaatgccagctgtgggacaaggagtgcaggccgcacaacctcggcaggcaccggggggatgtggcgattctacacagaagattcacctgggctcaaagttggccctgttccagtattggttatgagtcttctgttcatcgcttctgtatttatgttgcacatttggggcaagtacactcgttcgtagattcagttacatccatctgtcatctgaagaaggaggaaaaaacccaacatttcttggaccaaaagtatagtgactatctgttcatgagagaaattttctgtaagcttgctgttttacaggggatttatcaataattgattttgaggaatcagtttttttctatggctaataaactttttaattcacttanaaaanaaaaaattcgggttttatatttttaaggtggggggggagcgggcatggacggggtggggcactatttaagaaggggggcgggggat

SEQ ID NO: 455651 - DNA, 690 bp, Homo sapiens
aagaaagttttttttttttgattccttaactgtgtaataatggtagcatatgttataatgctattctaataatttccagaaaaggccatttgtaacattttcctctctttcaggaaaaatgccagctgtgggacaaggagtgcaggccgcacaacctcggcaggcaccggggggatgtggcgattctacacagaagattcacctgggctcaaagttggccctgttccagtattggttatgagtcttctgttcatcgcttctgtatttatgttgcacatttggggcaagtacactcgttcgtagattcagttacatccatctgtcatctgaagaaggaggaaaaaacccaacatttcttggaccaaaagtatagtgactatctgttcatgagagaaattttctgtaagcttgctgttttacaggggatttatcaataattgattttgaggaatcagtttttttctatggctaataaactttttaattcacttatactgagtctgatcgttgatgcctcactgctagggcccttagtctttctgcctttagatttgtaagtaaatatgtagcaaatatgtctggtgaatattgagttttttgttggattgacagttcctcacatgaccatgtggttattcaagtccaagattctgtaattgcccttggcttgttttcttctaggtatttctg

SEQ ID NO: 455652 - DNA, 831 bp, Homo sapiens
cgggggcggggcctgagtcagtctcgccagctgccggtctttcgggggctccgtaactttctatccgtccgcgtcagcgccttgccaccctcatctccaatatgcctggtccgacccccagtggcactaacgtgggatcctcagggcgctctcccagcaaagcagtggccgcccgggcggcgggatccactgtccggcagaggaaaaatgccagctgtgggacaaggagtgcaggccgcacaacctcggcaggcaccggggggatgtggcgattctacacagaagattcacctgggctcaaagttggccctgttccagtattgcgttacttggacgcttctttccgtgctttccaagtcgggctttttccctttgggttaacttttttgtaacgttggttgtgccaccattattgcgggggcaaaagggtacactcgttcgtagattcagttacatccatctgtcatctgaagaaggaggaaaaaacccaacatttcttggaccaaaagtatagtgactatctgttcatgagagaaattttctgtaagcttgctgttttacaggggatttatcaataattgattttgaggaatcagtttttttctatggctaataaactttttaattcacttatactgagtctgatcgttgatgcctcactgctagggcccttagtctttctgcctttagatttgtaagtaaatatgtagcaaatatgtctggtgaatattgagttttttgttggattgacagttcctcacatgaccatgtggttattcaagtccaagattctgtaattgcccttggcttgttttcttctaggtatttctg

SEQ ID NO: 455653 - DNA, 779 bp, Homo sapiens
cgggggcggggcctgagtcagtctcgccagctgccggtctttcgggggctccgtaactttctatccgtccgcgtcagcgccttgccaccctcatctccaatatgcctggtccgacccccagtggcactaacgtgggatcctcagggcgctctcccagcaaagcagtggccgcccgggcggcgggatccactgtccggcagaggaaaaatgccagctgtgggacaaggagtgcaggccgcacaacctcggcaggcaccggggggatgtggcgattctacacagaagattcacctgggctcaaagttggccctgttccagtattggttatgagtcttctgttcatcgcttctgtatttatgttgcacatttggggcaagtacactcgttcgtagattcagttacatccatctgtcatctgaagaaggaggaaaaaacccaacatttcttggaccaaaagtatagtgactatctgttcatgagagaaattttctgtaagcttgctgttttacaggggatttatcaataattgattttgaggaatcagtttttttctatggctaataaactttttaattcacttatactgagtctgatcgttgatgcctcactgctagggcccttagtctttctgcctttagatttgtaagtaaatatgtagcaaatatgtctggtgaatattgagttttttgttggattgacagttcctcacatgaccatgtggttattcaagtccaagattctgtaattgcccttggcttgttttcttctaggtatttctg

SEQ ID NO: 455654 - DNA, 688 bp, Homo sapiens
cgggggcggggcctgagtcagtctcgccagctgccggtctttcgggggctccgtaactttctatccgtccgcgtcagcgccttgccaccctcatctccaatatgcctggtccgacccccagtggcactaacgtgggatcctcagggcgctctcccagcaaagcagtggccgcccgggcggcgggatccactgtccggcagaggaaaaatgccagctgtgggacaaggagtgcaggccgcacaacctcggcaggcaccggggggatgtggcgattctacacagaagattcacctgggctcaaagttggccctgttccagtattggttatgagtcttctgttcatcgcttctgtatttatgttgcacatttggggcaagtacactcgttcgtagattcagttacatccatctgtcatctgaagaaggaggaaaaaacccaacatttcttggaccaaaagtatagtgactatctgttcatgagagaaattttctgtaagcttgctgttttacaggggatttatcaataattgattttgaggaatcagtttttttctatggctaataaactttttaattcacttaaaaaaaaacactcatcactctcctttctctaaccagaaattaactcagttccgtacctacaggtagccacatcctttttacggcccagccctcatcatccctgagtg

SEQ ID NO: 455655 - DNA, 584 bp, Homo sapiens
atcttgtctgaccccggttatatttttccttcggtagggattggactttctgaaggacgttgtgatccaaaggaaggaggccggaggtctctacttcccatacagcagcctggtccgacccccagtggcactaacgtgggatcctcagggcgctctcccagcaaagcagtggccgcccgggcggcgggatccactgtccggcagaggaaaaatgccagctgtgggacaaggagtgcaggccgcacaacctcggcaggcaccggggggatgtggcgattctacacagaagattcacctgggctcaaagttggccctgttccagtattggttatgagtcttctgttcatcgcttctgtatttatgttgcacatttggggcaagtacactcgttcgtagattcagttacatccatctgtcatctgaagaaggaggaaaaaacccaacatttcttggaccaaaagtatagtgactatctgttcatgagagaaattttctgtaagcttgctgttttacaggggatttatcaataattgattttgaggaatcagtttttttctatggctaataaactttttaattcactt

SEQ ID NO: 455656 - DNA, 898 bp, Homo sapiens
cgggggcggggcctgagtcagtctcgccagctgccggtctttcgggggctccgtaactttctatccgtccgcgtcagcgccttgccaccctcatctccaatatgcctggtccgacccccagtggcactaacgtgggatcctcagggcgctctcccagcaaagcagtggccgcccgggcggcgggatccactgtccggcagaggtaaggaaccctgcagttcgttcgcttccagactcggagataggacccagaacctcgctgattctggggtggagaccctagcatgtgaagattgacaaaggcaaaatgagcttctagtgacgtggccgtgggagtagttaaaggccttttgggaggaaggcgacattttttttctcgttgctcagtttagggcactactcttaaaaaaggaaagttaacaaactggaatagagtcagagataactttgagaaaaccgatgtcattaaactggtgtctctggacctgaggtttgcactcacatttccatctggcggccccataagcaatctgtcctacagataactcgtcctacacaaaacttagtctcttttcagctcagctctctcactctcaattatatctccttacttccatatggcactgttgtacactcatttactcagagccagaaacgtcagcgtcatcttggatttttcttatgctctttctctctctagtcatatgccagactttaaactctgcttgaaagctttctcataagctctttccttttccctttctactgctttgcatttgctacttaacccttttcttcaggctgtttgctttccagtccatcgttcgctctgctgttactcttctgcgtagtttctgttacttgttgctgaactaaaaaaaacaaacaaacaaaaaaa

SEQ ID NO: 455657 - DNA, 597 bp, Homo sapiens
atcttgtctgaccccggttatatttttccttcggtagggattggactttctgaaggacgttgtgatccaaaggaaggaggccggaggtctctacttcccatacagcagcctggtccgacccccagtggcactaacgtgggatcctcagggcgctctcccagcaaagcagtggccgcccgggcggcgggatccactgtccggcagagggaggaaaaaatcttgaacacatgcatggaaacttctgaaggatgtgaagagggatgtgacattttctggctgcaacaggtaaatctaaaactgatgatttgaacttacatgaaatatttcacatcagaacaaagacattctaatagaactggcagaaatgtaaaattatcctgaatgattttgagttccctgtcattgggatgttcatgaggagtgtatcaggctgtggtttaacttatatgggctttgagtgctgtccccttcccaccctgggttttagagatttttcgtgcaggaatggaaaacatgtcctgtgggtgcggttccttgggaatggttctgcttaatgagaattggtaatactgtggcagggaagtttggccatccgag

SEQ ID NO: 455658 - DNA, 6112 bp, Homo sapiens
gtcagatcagggatcattttttttccttcctctactccctcccccctacccgcccctccctccctgtttcccttccctccctccctcccctctctgctgggtctgtgcgctggggcgcccgatcccctccgcagctgggacgctccgaactcgaggcaggagtcggctctccggagcctcgtccctcccttccccttccctgcccccttcccccacccccgactcgggcttggcgcggcggccagaggaaccccgagtcccggcccaggcccctgagctggagggatggaaaactcctctgcagcatcagcctcctcggaggcagggagcagccgctcccaggagatcgaggagctggagcgcttcatcgacagctacgtgctggagtaccaggtgcaggggctgctggctgacaagacggagggtgatggcgagagcgagaggacccagtcccacatctcccagtggacagcggactgcagcgaaccgctggacagcagctgttccttctcccgagggcgagcccccccacagcagaatggcagcaaagacaactctctggacatgctgggcacggacatctgggcggccaacaccttcgattccttcagtggtgccacctgggacctgcagccggaaaagctggacttcacccagttccaccgcaaagtccgacacacgcccaagcagcccctgccacacatcgaccgcgaagggtgtggcaaagggaagctggaagatggggatggcatcaacctgaatgacatcgagaaggtccttccagcctggcagggctaccacccgatgccccatgaagtggagatcgcacacaccaagaagctgttccgcaggaggagaaatgatcgaaggcggcagcagagacctccggggggcaacaagccccaacagcatggtgaccaccagccaggcagtgccaaacacaacagggaccaccagaaatcctaccaggggggctcagcaccccacccctcagggaggcccactcaccatggctacagccagaaccggcgctggcaccatggcaacatgaagcacccaccaggcgacaagggggaggcaggcgcacaccgcaatgccaaagagaccatgaccatcgagaacccaaaactggaggacactgcaggggacaccgggcacagcagcctcgaggccccccgcagccctgacaccctggccccggtggcttctgagcggctgcccccacagcagtcaggggggccagaggttgagacaaaacgtaaagacagtattcttcccgagcgcatcggggagcggcccaaaattaccctgctccagtcttccaaagacagactgcggcgaaggctaaaggaaaaggatgaagtggccgtggagacgaccactccccagcagaacaagatggacaagctgatcgagatcctgaacagcatgcggaacaacagcagcgacgtggacaccaagctcaccaccttcatggaggaggcccagaactccaccaactccgaggagatgctgggcgagatcgtgcgcacaatctaccagaaggctgtgtccgaccgcagcttcgccttcaccgctgccaagctctgcgacaagatggcgctctttatggtggaggggaccaagttccggagcctgctcctcaacatgctgcagaaggacttcacggtgcgcgaggagctgcagcagcaggacgtggagcgctggctgggcttcatcaccttcctgtgcgaggtcttcggcaccatgcgcagcagcacaggcgagcccttccgtgtgctcgtgtgccccatctacacctgcctcagggagctcttgcaatctcaggatgtgaaggaagatgctgtcctttgctgctctatggagctgcagagtacaggccggctgctggaggaacagctgcctgagatgatgacagagctcctggccagcgcacgggacaagatgctgtgcccctcggagtccatgctgacccggtcgctgctcctagaggtcatcgagctccacgctaacagctggaaccctctgacgccccccatcacgcagtactacaacagaaccatccagaaactgacagcctgacagccagggggcctggcaggcggcccacgggcagctggggccctggtgcacagggccagatggacaggcgggaggacaggggtggccctggcgggagaaagaaatggggaggagggcaggcagagtcggtggccagtctggagccagacggggaagggagcaaatccctgagaggagtgcccccgcacaagccccccagcccgagcatgcaagctcacaccaataagggaagcatgtttctttttcctggtggccctggccctccccttcctcactcccgcctctcccctccccatcagacccatcccccacggagctttgtgtgagggatctcatcgctgtgactcctcggagaccttggcagcctcgcacgccggggcaccgcttgggtcagaaaggacctcggaaggctgaaaaagtgggtcggagacgggctcgcattgttcccgcatgctgtcagccgcagtcgccaactggcagcaggcgacgtgtagcagatgtccgggaggacaaaggcaggcacggtccccaccagccgcccgtaattgacggcctttgtcagccatggcagagctgacgctccacctcccacctccaagtcctcctcactgcagcccccacagcctcaggcctagggggtcaggcgcagcgggggagatggagtttgcagttccacttgcactcttttgtttattgtgttttatttttcaaaagtcggttgctttgaagtctctttggccaatgaaaatgcccgtgatgtgatcacacagtcagcactgttgaggacccccggattagtgggagatcaaacccagctcccctctagaagaaggattcgagccacagacagcttgccagtagccaattagggtaattggaaacttctgccccggcggggggtccccgctggaatcctgtgttcctcgccactggcttccagcgcctctgttttctcaaagggctgatactgtcaccactgggaccaagttaaacctggtcctggccccaggggccttgtggcaaacagggcacagaacgagactggcaaattaaaaccaaaattctagatggtgtcttgcgctccacacgcaggtcttactggggaaaaggatgggagtgggggctccccaggactcgattttagctaatgcgctgtgtcactgccccagctcggacgtagaagcccagccctccgtgagctcttgggaaaggggtgaattcactgggtcatggaagggacagtcaggtgaccagcggggtcgccagatgaagcttcccagccgggaaacaagacggggtttcttggcaggccctggtcctggggagcaggccctgttgttggctggagaggaaggtgtggggtggaacaggtgtccacatagctccatctctgggggctggagcacacactttgatgagcccccccggaaatgatgtcagagcctagccgcttccttatttgctcttttattgaggccgggcaggccctgggtcactttggaggcccctcttggtccacactggactggccgggaggtgatgggcggggaaggttctcgtgattgattgattctgagtctgagagtggcgagtggggagaggcttccccagttctctccagctttccctgcagctgcaacctgccctctggtcccaggtgtggagcctttgcctgtctctaaaaagagcctgttggcgacaaggtgtagggggcacaagtttacctgaaacaggtcagtggtctctcccaagaagcgcacgccacctctggtccctggccctgaaccctgccttcttcctccctccacggtttcttcccagactttctcaagctcctcctcactgcccttcctccccagcccagcctgggaacacagatgccccgcgggtaggaggcctcgagggaggagccgggctgatgcggggctgctcagggcaggccccagggcgagcttgccatcgtggccaggcagcctccacctgtgcttcagtggcccctgcccccctgaagcatgtggggtttgtccgctaggaggaggcaaggcccccgaagagaggagagacctgggagtgggagctcaggtcagggaggaggcaggggagtggggtctcccagacccaacggtgagctcagagcaagcttcacgcaggacgctccgaaacactgtgtggagggggctgtgttgtgggcaccttggggcctgattctccttcctccgaacgggctccttgatggcctggccacaggggcagctccccattggctgttaggaccagagtgtgaagaagaagtgaaatataaatatgtatacatatataaatatatttttaattacatgtcgtgtcacggtggctccagacatactgtttgcctagtttattccactgcttgaaagcgcttcctagccaatctgaacaacaacactttaagctgtttttctaaatgcaggttgctgctcctttttcagatatggaaggaaaacgttaagactattttttttttaaagaaacaacagtcaagcctaaaatttgagaccccgaggcagcttcccgagggagactgctcagacaggaactgcaggacagaagtggatgccccacagaccctggccccctccccaagtccatcccctctctgtggcatgaggaaggccgcgtccgagttgacctctgaatgtatgtgatgagaggcagagctggatattgcatttctaaggcttgcattgctttcccctcgcccgcggttcttggcgcatggaagaggcggtccagccatctgatgttgatcctgtctcagtctccccactgcctgtcaggatgagttagtcattgtttttctccgaggcggcctgcttgccacagccctgctccccaaggcctggtggctttgccgaagctctgggaccgcagccccagcgaggcccccaacctcacccagacgaggccaggagccccgccaccctccacgggatgtgcaccctcagaccccattctctctgttcgtccttccttgaccagtctgtaaaccttcactgtttggggatcgtcctgtccatccatgtaaatgtaaatgttggccgagtcggtatttattctgattgatttttattttattctattattttctccgagggatgagggtggggggtgtgggaagggtaccacagatcaggccggggcagctgtaggggcgggggcccagacagccaggccgccaccagagcagccccatggggtgccccagacgcgggcctccaagaagccaagtcccagtctgttttctggcatcagacaccggcccgtgttccttgtcagacagacagactctcaggcctgcctggggagtcgtgtccctcagctgcagggcactgtgttgggaaaccattggctgggcctttgaggacacagatcagaagaaagaaagacaactttcctctgcgcggaacactcacacggaagggctggccgcctccctgagccggctgggagtggacgacaggacctacctccccagagcaagggcctggggcttcccgccaaagctgccgcggaaccccgctagtgcgaccaccctccctccgtcggtatgtcctgctttccagctgaacccaaactacaagtgggtttaaaaaaataaacaaacaccaatcagctaaaatacaaatattcactatctactctaccgcccgcagatcttctcaccactctctcttctccttctctcctctctcactccgttgccactccacaccacacatcatcacaccacaccgttataccaccccaccttgccccaccatcacccgccctctctccccaccaccatcttcaagtcaacactcactcctccgcgcccctcaccccgcctcgtcatcaaacatacccagccaacaccctcgctccaccctccctctctcacccacatcaccacgaaacactcagtctccctctcaccctcttccccccctcctcctaacactatccaacacccttcttcctcccctcctcctcctcctcctacctctatctc

SEQ ID NO: 455659 - DNA, 6174 bp, Homo sapiens
gtcagatcagggatcattttttttccttcctctactccctcccccctacccgcccctccctccctgtttcccttccctccctccctcccctctctgctgggtctgtgcgctggggcgcccgatcccctccgcagctgggacgctccgaactcgaggcaggagtcggctctccggagcctcgtccctcccttccccttccctgcccccttcccccacccccgactcgggcttggcgcggcggccagaggaaccccgagcccgcatttgctgcatcgagcagttggtttagtatcagccaaacttgcagctgttttctctgtcctctttcccaccagtcccggcccaggcccctgagctggagggatggaaaactcctctgcagcatcagcctcctcggaggcagggagcagccgctcccaggagatcgaggagctggagcgcttcatcgacagctacgtgctggagtaccaggtgcaggggctgctggctgacaagacggagggtgatggcgagagcgagaggacccagtcccacatctcccagtggacagcggactgcagcgaaccgctggacagcagctgttccttctcccgagggcgagcccccccacagcagaatggcagcaaagacaactctctggacatgctgggcacggacatctgggcggccaacaccttcgattccttcagtggtgccacctgggacctgcagccggaaaagctggacttcacccagttccaccgcaaagtccgacacacgcccaagcagcccctgccacacatcgaccgcgaagggtgtggcaaagggaagctggaagatggggatggcatcaacctgaatgacatcgagaaggtccttccagcctggcagggctaccacccgatgccccatgaagtggagatcgcacacaccaagaagctgttccgcaggaggagaaatgatcgaaggcggcagcagagacctccggggggcaacaagccccaacagcatggtgaccaccagccaggcagtgccaaacacaacagggaccaccagaaatcctaccaggggggctcagcaccccacccctcagggaggcccactcaccatggctacagccagaaccggcgctggcaccatggcaacatgaagcacccaccaggcgacaagggggaggcaggcgcacaccgcaatgccaaagagaccatgaccatcgagaacccaaaactggaggacactgcaggggacaccgggcacagcagcctcgaggccccccgcagccctgacaccctggccccggtggcttctgagcggctgcccccacagcagtcaggggggccagaggttgagacaaaacgtaaagacagtattcttcccgagcgcatcggggagcggcccaaaattaccctgctccagtcttccaaagacagactgcggcgaaggctaaaggaaaaggatgaagtggccgtggagacgaccactccccagcagaacaagatggacaagctgatcgagatcctgaacagcatgcggaacaacagcagcgacgtggacaccaagctcaccaccttcatggaggaggcccagaactccaccaactccgaggagatgctgggcgagatcgtgcgcacaatctaccagaaggctgtgtccgaccgcagcttcgccttcaccgctgccaagctctgcgacaagatggcgctctttatggtggaggggaccaagttccggagcctgctcctcaacatgctgcagaaggacttcacggtgcgcgaggagctgcagcagcaggacgtggagcgctggctgggcttcatcaccttcctgtgcgaggtcttcggcaccatgcgcagcagcacaggcgagcccttccgtgtgctcgtgtgccccatctacacctgcctcagggagctcttgcaatctcaggatgtgaaggaagatgctgtcctttgctgctctatggagctgcagagtacaggccggctgctggaggaacagctgcctgagatgatgacagagctcctggccagcgcacgggacaagatgctgtgcccctcggagtccatgctgacccggtcgctgctcctagaggtcatcgagctccacgctaacagctggaaccctctgacgccccccatcacgcagtactacaacagaaccatccagaaactgacagcctgacagccagggggcctggcaggcggcccacgggcagctggggccctggtgcacagggccagatggacaggcgggaggacaggggtggccctggcgggagaaagaaatggggaggagggcaggcagagtcggtggccagtctggagccagacggggaagggagcaaatccctgagaggagtgcccccgcacaagccccccagcccgagcatgcaagctcacaccaataagggaagcatgtttctttttcctggtggccctggccctccccttcctcactcccgcctctcccctccccatcagacccatcccccacggagctttgtgtgagggatctcatcgctgtgactcctcggagaccttggcagcctcgcacgccggggcaccgcttgggtcagaaaggacctcggaaggctgaaaaagtgggtcggagacgggctcgcattgttcccgcatgctgtcagccgcagtcgccaactggcagcaggcgacgtgtagcagatgtccgggaggacaaaggcaggcacggtccccaccagccgcccgtaattgacggcctttgtcagccatggcagagctgacgctccacctcccacctccaagtcctcctcactgcagcccccacagcctcaggcctagggggtcaggcgcagcgggggagatggagtttgcagttccacttgcactcttttgtttattgtgttttatttttcaaaagtcggttgctttgaagtctctttggccaatgaaaatgcccgtgatgtgatcacacagtcagcactgttgaggacccccggattagtgggagatcaaacccagctcccctctagaagaaggattcgagccacagacagcttgccagtagccaattagggtaattggaaacttctgccccggcggggggtccccgctggaatcctgtgttcctcgccactggcttccagcgcctctgttttctcaaagggctgatactgtcaccactgggaccaagttaaacctggtcctggccccaggggccttgtggcaaacagggcacagaacgagactggcaaattaaaaccaaaattctagatggtgtcttgcgctccacacgcaggtcttactggggaaaaggatgggagtgggggctccccaggactcgattttagctaatgcgctgtgtcactgccccagctcggacgtagaagcccagccctccgtgagctcttgggaaaggggtgaattcactgggtcatggaagggacagtcaggtgaccagcggggtcgccagatgaagcttcccagccgggaaacaagacggggtttcttggcaggccctggtcctggggagcaggccctgttgttggctggagaggaaggtgtggggtggaacaggtgtccacatagctccatctctgggggctggagcacacactttgatgagcccccccggaaatgatgtcagagcctagccgcttccttatttgctcttttattgaggccgggcaggccctgggtcactttggaggcccctcttggtccacactggactggccgggaggtgatgggcggggaaggttctcgtgattgattgattctgagtctgagagtggcgagtggggagaggcttccccagttctctccagctttccctgcagctgcaacctgccctctggtcccaggtgtggagcctttgcctgtctctaaaaagagcctgttggcgacaaggtgtagggggcacaagtttacctgaaacaggtcagtggtctctcccaagaagcgcacgccacctctggtccctggccctgaaccctgccttcttcctccctccacggtttcttcccagactttctcaagctcctcctcactgcccttcctccccagcccagcctgggaacacagatgccccgcgggtagagccgggctgatgcggggctgctcagggcaggccccagggcgagcttgccatcgtggccaggcagcctccacctgtgcttcagtggcccctgcccccctgaagcatgtggggtttgtccgctaggaggaggcaaggcccccgaagagaggagagacctgggagtgggagctcaggtcagggaggaggcaggggagtggggtctcccagacccaacggtgagctcagagcaagcttcacgcaggacgctccgaaacactgtgtggagggggctgtgttgtgggcaccttggggcctgattctccttcctccgaacgggctccttgatggcctggccacaggggcagctccccattggctgttaggaccagagtgtgaagaagaagtgaaatataaatatgtatacatatataaatatatttttaattacatgtcgtgtcacggtggctccagacatactgtttgcctagtttattccactgcttgaaagcgcttcctagccaatctgaacaacaacactttaagctgtttttctaaatgcaggttgctgctcctttttcagatatggaaggaaaacgttaagactattttttttttaaagaaacaacagtcaagcctaaaatttgagaccccgaggcagcttcccgagggagactgctcagacaggaactgcaggacagaagtggatgccccacagaccctggccccctccccaagtccatcccctctctgtggcatgaggaaggccgcgtccgagttgacctctgaatgtatgtgatgagaggcagagctggatattgcatttctaaggcttgcattgctttcccctcgcccgcggttcttggcgcatggaagaggcggtccagccatctgatgttgatcctgtctcagtctccccactgcctgtcaggatgagttagtcattgtttttctccgaggcggcctgcttgccacagccctgctccccaaggcctggtggctttgccgaagctctgggaccgcagccccagcgaggcccccaacctcacccagacgaggccaggagccccgccaccctccacgggatgtgcaccctcagaccccattctctctgttcgtccttccttgaccagtctgtaaaccttcactgtttggggatcgtcctgtccatccatgtaaatgtaaatgttggccgagtcggtatttattctgattgatttttattttattctattattttctccgagggatgagggtggggggtgtgggaagggtaccacagatcaggccggggcagctgtaggggcgggggcccagacagccaggccgccaccagagcagccccatggggtgccccagacgcgggcctccaagaagccaagtcccagtctgttttctggcatcagacaccggcccgtgttccttgtcagacagacagactctcaggcctgcctggggagtcgtgtccctcagctgcagggcactgtgttgggaaaccattggctgggcctttgaggacacagatcagaagaaagaaagacaactttcctctgcgcggaacactcacacggaagggctggccgcctccctgagccggctgggagtggacgacaggacctacctccccagagcaagggcctggggcttcccgccaaagctgccgcggaaccccgctagtgcgaccaccctccctccgtcggtatgtcctgctttccagctgaacccaaactacaagtgggtttaaaaaaataaacaaacaccaatcagctaaaatacaaatattcactatctactctaccgcccgcagatcttctcaccactctctcttctccttctctcctctctcactccgttgccactccacaccacacatcatcacaccacaccgttataccaccccaccttgccccaccatcacccgccctctctccccaccaccatcttcaagtcaacactcactcctccgcgcccctcaccccgcctcgtcatcaaacatacccagccaacaccctcgctccaccctccctctctcacccacatcaccacgaaacactcagtctccctctcaccctcttccccccctcctcctaacactatccaacacccttcttcctcccctcctcctcctcctcctacctctatctc

SEQ ID NO: 455660 - DNA, 5998 bp, Homo sapiens
gtcagatcagggatcattttttttccttcctctactccctcccccctacccgcccctccctccctgtttcccttccctccctccctcccctctctgctgggtctgtgcgctggggcgcccgatcccctccgcagctgggacgctccgaactcgaggcaggagtcggctctccggagcctcgtccctcccttccccttccctgcccccttcccccacccccgactcgggcttggcgcggcggccagaggaaccccgagcccgcatttgctgcatcgagcagttggtttagtatcagccaaacttgcagctgttttctctgtcctctttcccaccagtcccggcccaggcccctgagctggagggatggaaaactcctctgcagcatcagcctcctcggaggcagggagcagccgctcccaggagatcgaggagctggagcgcttcatcgacagctacgtgctggagtaccaggtgcaggggctgctggctgacaagacggagggtgatggcgagagcgagaggacccagtcccacatctcccagtggacagcggactgcagcgaaccgctggacagcagctgttccttctcccgagggcgagcccccccacagcagaatggcagcaaagacaactctctggacatgctgggcacggacatctgggcggccaacaccttcgattccttcagtggtgccacctgggacctgcagccggaaaagctggacttcacccagttccaccgcaaagtccgacacacgcccaagcagcccctgccacacatcgaccgcgaagggtgtggcaaagggaagctggaagatggggatggcatcaacctgaatgacatcgagaaggtccttccagcctggcagggctaccacccgatgccccatgaagtggagatcgcacacaccaagaagctgttccgcaggaggagaaatgatcgaaggcggcagcagagacctccggggggcaacaagccccaacagcatggtgaccaccagccaggcagtgccaaacacaacagggaccaccagaaatcctaccaggggggctcagcaccccacccctcagggaggcccactcaccatggctacagccagaaccggcgctggcaccatggcaacatgaagcacccaccaggcgacaagggggaggcaggcgcacaccgcaatgccaaagagaccatgaccatcgagaacccaaaactggaggacactgcaggggacaccgggcacagcagcctcgaggccccccgcagccctgacaccctggccccggtggcttctgagcggctgcccccacagcagtcaggggggccagaggttgagacaaaacgtaaagacagtattcttcccgagcgcatcggggagcggcccaaaattaccctgctccagtcttccaaagacagactgcggcgaaggctaaaggaaaaggatgaagtggccgtggagacgaccactccccagcagaacaagatggacaagctgatcgagatcctgaacagcatgcggaacaacagcagcgacgtggacaccaagctcaccaccttcatggaggaggcccagaactccaccaactccgaggagatgctgggcgagatcgtgcgcacaatctaccagaaggctgtgtccgaccgcagcttcgccttcaccgctgccaagctctgcgacaagatggcgctctttatggtggaggggaccaagttccggagcctgctcctcaacatgctgcagaaggacttcacggtgcgcgaggagctgcagcagcaggacgtggagcgctggctgggcttcatcaccttcctgtgcgaggtcttcggcaccatgcgcagcagcacaggcgagcccttccgtgtgctcgtgtgccccatctacacctgcctcagggagctcttgcaatctcaggatgtgaaggaagatgctgtcctttgctgctctatggagctgcagagtacaggccggctgctggaggaacagctgcctgagatgatgacagagctcctggccagcgcacgggacaagatgctgtgcccctcggagtccatgctgacccggtcgctgctcctagaggtcatcgagctccacgctaacagctggaaccctctgacgccccccatcacgcagtactacaacagaaccatccagaaactgacagcctgacagccagggggcctggcaggcggcccacgggcagctggggccctggtgcacagggccagatggacaggcgggaggacaggggtggccctggcgggagaaagaaatggggaggagggcaggcagagtcggtggccagtctggagccagacggggaagggagcaaatccctgagaggagtgcccccgcacaagccccccagcccgagcatgcaagctcacaccaataagggaagcatgtttctttttcctggtggccctggccctccccttcctcactcccgcctctcccctccccatcagacccatcccccacggagctttgtgtgagggatctcatcgctgtgactcctcggagaccttggcagcctcgcacgccggggcaccgcttgggtcagaaaggacctcggaaggctgaaaaagtgggtcggagacgggctcgcattgttcccgcatgctgtcagccgcagtcgccaactggcagcaggcgacgtgtagcagatgtccgggaggacaaaggcaggcacggtccccaccagccgcccgtaattgacggcctttgtcagccatggcagagctgacgctccacctcccacctccaagtcctcctcactgcagcccccacagcctcaggcctagggggtcaggcgcagcgggggagatggagtttgcagttccacttgcactcttttgtttattgtgttttatttttcaaaagtcggttgctttgaagtctctttggccaatgaaaatgcccgtgatgtgatcacacagtcagcactgttgaggacccccggattagtgggagatcaaacccagctcccctctagaagaaggattcgagccacagacagcttgccagtagccaattagggtaattggaaacttctgccccggcggggggtccccgctggaatcctgtgttcctcgccactggcttccagcgcctctgttttctcaaagggctgatactgtcaccactgggaccaagttaaacctggtcctggccccaggggccttgtggcaaacagggcacagaacgagactggcaaattaaaaccaaaattctagatggtgtcttgcgctccacacgcaggtcttactggggaaaaggatgggagtgggggctccccaggactcgattttagctaatgcgctgtgtcactgccccagctcggacgtagaagcccagccctccgtgagctcttgggaaaggggtgaattcactgggtcatggaagggacagtcaggtgaccagcggggtcgccagatgaagcttcccagccgggaaacaagacggggtttcttggcaggccctggtcctggggagcaggccctgttgttggctggagaggaaggtgtggggtggaacaggtgtccacatagctccatctctgggggctggagcacacactttgatgagcccccccggaaatgatgtcagagcctagccgcttccttatttgctcttttattgaggccgggcaggccctgggtcactttggaggcccctcttggtccacactggactggccgggaggtgatgggcggggaaggttctcgtgattgattgattctgagtctgagagtggcgagtggggagaggcttccccagttctctccagctttccctgcagctgcaacctgccctctggtcccaggtgtggagcctttgcctgtctctaaaaagagcctgttggcgacaaggtgtagggggcacaagtttacctgaaacaggtcagtggtctctcccaagaagcgcacgccacctctggtccctggccctgaaccctgccttcttcctccctccacggtttcttcccagactttctcaagctcctcctcactgcccttcctccccagcccagcctgggaacacagatgccccgcgggtaggaggcctcgagggaggagccgggctgatgcggggctgctcagggcaggccccagggcgagcttgccatcgtggccaggcagcctccacctgtgcttcagtggcccctgcccccctgaagcatgtggggtttgtccgctaggaggaggcaaggcccccgaagagaggagagacctgggagtgggagctcaggtcagggaggaggcaggggagtggggtctcccagacccaacggtgagctcagagcaagcttcacgcaggacgctccgaaacactgtgtggagggggctgtgttgtgggcaccttggggcctgattctccttcctccgaacgggctccttgatggcctggccacaggggcagctccccattggctgttaggaccagagtgtgaagaagaagtgaaatataaatatgtatacatatataaatatatttttaattacatgtcgtgtcacggtggctccagacatactgtttgcctagtttattccactgcttgaaagcgcttcctagccaatctgaacaacaacactttaagctgtttttctaaatgcaggttgctgctcctttttcagatatggaaggaaaacgttaagactattttttttttaaagaaacaacagtcaagcctaaaatttgagaccccgaggcagcttcccgagggagactgctcagacaggaactgcaggacagaagtggatgccccacagaccctggccccctccccaagtccatcccctctctgtggcatgaggaaggccgcgtccgagttgacctctgaatgtatgtgatgagaggcagagctggatattgcatttctaaggcttgcattgctttcccctcgcccgcggttcttggcgcatggaagaggcggtccagccatctgatgttgatcctgtctcagtctccccactgcctgtcaggatgagttagtcattgtttttctccgaggcggcctgcttgccacagccctgctccccaaggcctggtggctttgccgaagctctgggaccgcagccccagcgaggcccccaacctcacccagacgaggccaggagccccgccaccctccacgggatgtgcaccctcagaccccattctctctgttcgtccttccttgaccagtctgtaaaccttcactgtttggggatcgtcctgtccatccatgtaaatgtaaatgttggccgagtcggtatttattctgattgatttttattttattctattattttctccgagggatgagggtggggggtgtgggaagggtaccacagatcagggcactgtgttgggaaaccattggctgggcctttgaggacacagatcagaagaaagaaagacaactttcctctgcgcggaacactcacacggaagggctggccgcctccctgagccggctgggagtggacgacaggacctacctccccagagcaagggcctggggcttcccgccaaagctgccgcggaaccccgctagtgcgaccaccctccctccgtcggtatgtcctgctttccagctgaacccaaactacaagtgggtttaaaaaaataaacaaacaccaatcagctaaaatacaaatattcactatctactctaccgcccgcagatcttctcaccactctctcttctccttctctcctctctcactccgttgccactccacaccacacatcatcacaccacaccgttataccaccccaccttgccccaccatcacccgccctctctccccaccaccatcttcaagtcaacactcactcctccgcgcccctcaccccgcctcgtcatcaaacatacccagccaacaccctcgctccaccctccctctctcacccacatcaccacgaaacactcagtctccctctcaccctcttccccccctcctcctaacactatccaacacccttcttcctcccctcctcctcctcctcctacctctatctc

SEQ ID NO: 455661 - DNA, 4668 bp, Homo sapiens
gtcagatcagggatcattttttttccttcctctactccctcccccctacccgcccctccctccctgtttcccttccctccctccctcccctctctgctgggtctgtgcgctggggcgcccgatcccctccgcagctgggacgctccgaactcgaggcaggagtcggctctccggagcctcgtccctcccttccccttccctgcccccttcccccacccccgactcgggcttggcgcggcggccagaggaaccccgagcccgcatttgctgcatcgagcagttggtttagtatcagccaaacttgcagctgttttctctgtcctctttcccaccagtcccggcccaggcccctgagctggagggatggaaaactcctctgcagcatcagcctcctcggaggcagggagcagccgctcccaggagatcgaggagctggagcgcttcatcgacagctacgtgctggagtaccaggtgcaggggctgctggctgacaagacggagggtgatggcgagagcgagaggacccagtcccacatctcccagtggacagcggactgcagcgaaccgctggacagcagctgttccttctcccgagggcgagcccccccacagcagaatggcagcaaagacaactctctggacatgctgggcacggacatctgggcggccaacaccttcgattccttcagtggtgccacctgggacctgcagccggaaaagctggacttcacccagttccaccgcaaagtccgacacacgcccaagcagcccctgccacacatcgaccgcgaagggtgtggcaaagggaagctggaagatggggatggcatcaacctgaatgacatcgagaaggtccttccagcctggcagggctaccacccgatgccccatgaagtggagatcgcacacaccaagaagctgttccgcaggaggagaaatgatcgaaggcggcagcagagacctccggggggcaacaagccccaacagcatggtgaccaccagccaggcagtgccaaacacaacagggaccaccagaaatcctaccaggggggctcagcaccccacccctcagggaggcccactcaccatggctacagccagaaccggcgctggcaccatggcaacatgaagcacccaccaggcgacaagggggaggcaggcgcacaccgcaatgccaaagagaccatgaccatcgagaacccaaaactggaggacactgcaggggacaccgggcacagcagcctcgaggccccccgcagccctgacaccctggccccggtggcttctgagcggctgcccccacagcagtcaggggggccagaggttgagacaaaacgtaaagacagtattcttcccgagcgcatcggggagcggcccaaaattaccctgctccagtcttccaaagacagactgcggcgaaggctaaaggaaaaggatgaagtggccgtggagacgaccactccccagcagaacaagatggacaagctgatcgagatcctgaacagcatgcggaacaacagcagcgacgtggacaccaagctcaccaccttcatggaggaggcccagaactccaccaactccgaggagatgctgggcgagatcgtgcgcacaatctaccagaaggctgtgtccgaccgcagcttcgccttcaccgctgccaagctctgcgacaagatggcgctctttatggtggaggggaccaagttccggagcctgctcctcaacatgctgcagaaggacttcacggtgcgcgaggagctgcagcagcaggacgtggagcgctggctgggcttcatcaccttcctgtgcgaggtcttcggcaccatgcgcagcagcacaggcgagcccttccgtgtgctcgtgtgccccatctacacctgcctcagggagctcttgcaatctcaggatgtgaaggaagatgctgtcctttgctgctctatggagctgcagagtacaggccggctgctggaggaacagctgcctgagatgatgacagagctcctggccagcgcacgggacaagatgctgtgcccctcggagtccatgctgacccggtcgctgctcctagaggtcatcgagctccacgctaacagctggaaccctctgacgccccccatcacgcagtactacaacagaaccatccagaaactgacagcctgacagccagggggcctggcaggcggcccacgggcagctggggccctggtgcacagggccagatggacaggcgggaggacaggggtggccctggcgggagaaagaaatggggaggagggcaggcagagtcggtggccagtctggagccagacggggaagggagcaaatccctgagaggagtgcccccgcacaagccccccagcccgagcatgcaagctcacaccaataagggaagcatgtttctttttcctggtggccctggccctccccttcctcactcccgcctctcccctccccatcagacccatcccccacggagctttgtgtgagggatctcatcgctgtgactcctcggagaccttggcagcctcgcacgccggggcaccgcttgggtcagaaaggacctcggaaggctgaaaaagtgggtcggagacgggctcgcattgttcccgcatgctgtcagccgcagtcgccaactggcagcaggcgacgtgtagcagatgtccgggaggacaaaggcaggcacggtccccaccagccgcccgtaattgacggcctttgtcagccatggcagagctgacgctccacctcccacctccaagtcctcctcactgcagcccccacagcctcaggcctagggggtcaggcgcagcgggggagatggagtttgcagttccacttgcactcttttgtttattgtgttttatttttcaaaagtcggttgctttgaagtctctttggccaatgaaaatgcccgtgatgtgatcacacagtcagcactgttgaggacccccggattagtgggagatcaaacccagctcccctctagaagaaggattcgagccacagacagcttgccagtagccaattagggtgtggagcctttgcctgtctctaaaaagagcctgttggcgacaaggtgtagggggcacaagtttacctgaaacagatatggaaggaaaacgttaagactattttttttttaaagaaacaacagtcaagcctaaaatttgagaccccgaggcagcttcccgagggagactgctcagacaggaactgcaggacagaagtggatgccccacagaccctggccccctccccaagtccatcccctctctgtggcatgaggaaggccgcgtccgagttgacctctgaatgtatgtgatgagaggcagagctggatattgcatttctaaggcttgcattgctttcccctcgcccgcggttcttggcgcatggaagaggcggtccagccatctgatgttgatcctgtctcagtctccccactgcctgtcaggatgagttagtcattgtttttctccgaggcggcctgcttgccacagccctgctccccaaggcctggtggctttgccgaagctctgggaccgcagccccagcgaggcccccaacctcacccagacgaggccaggagccccgccaccctccacgggatgtgcaccctcagaccccattctctctgttcgtccttccttgaccagtctgtaaaccttcactgtttggggatcgtcctgtccatccatgtaaatgtaaatgttggccgagtcggtatttattctgattgatttttattttattctattattttctccgagggatgagggtggggggtgtgggaagggtaccacagatcaggccggggcagctgtaggggcgggggcccagacagccaggccgccaccagagcagccccatggggtgccccagacgcgggcctccaagaagccaagtcccagtctgttttctggcatcagacaccggcccgtgttccttgtcagacagacagactctcaggcctgcctggggagtcgtgtccctcagctgcagggcactgtgttgggaaaccattggctgggcctttgaggacacagatcagaagaaagaaagacaactttcctctgcgcggaacactcacacggaagggctggccgcctccctgagccggctgggagtggacgacaggacctacctccccagagcaagggcctggggcttcccgccaaagctgccgcggaaccccgctagtgcgaccaccctccctccgtcggtatgtcctgctttccagctgaacccaaactacaagtgggtttaaaaaaataaacaaacaccaatcagctaaaatacaaatattcactatctactctaccgcccgcagatcttctcaccactctctcttctccttctctcctctctcactccgttgccactccacaccacacatcatcacaccacaccgttataccaccccaccttgccccaccatcacccgccctctctccccaccaccatcttcaagtcaacactcactcctccgcgcccctcaccccgcctcgtcatcaaacatacccagccaacaccctcgctccaccctccctctctcacccacatcaccacgaaacactcagtctccctctcaccctcttccccccctcctcctaacactatccaacacccttcttcctcccctcctcctcctcctcctacctctatctc

SEQ ID NO: 455662 - DNA, 5459 bp, Homo sapiens
gtcagatcagggatcattttttttccttcctctactccctcccccctacccgcccctccctccctgtttcccttccctccctccctcccctctctgctgggtctgtgcgctggggcgcccgatcccctccgcagctgggacgctccgaactcgaggcaggagtcggctctccggagcctcgtccctcccttccccttccctgcccccttcccccacccccgactcgggcttggcgcggcggccagaggaaccccgagcccgcatttgctgcatcgagcagttggtttagtatcagccaaacttgcagctgttttctctgtcctctttcccaccagtcccggcccaggcccctgagctggagggatggaaaactcctctgcagcatcagcctcctcggaggcagggagcagccgctcccaggagatcgaggagctggagcgcttcatcgacagctacgtgctggagtaccaggtgcaggggctgctggctgacaagacggagggtgatggcgagagcgagaggacccagtcccacatctcccagtggacagcggactgcagcgaaccgctggacagcagctgttccttctcccgagggcgagcccccccacagcagaatggcagcaaagacaactctctggacatgctgggcacggacatctgggcggccaacaccttcgattccttcagtggtgccacctgggacctgcagccggaaaagctggacttcacccagttccaccgcaaagtccgacacacgcccaagcagcccctgccacacatcgaccgcgaagggtgtggcaaagggaagctggaagatggggatggcatcaacctgaatgacatcgagaaggtccttccagcctggcagggctaccacccgatgccccatgaagtggagatcgcacacaccaagaagctgttccgcaggaggagaaatgatcgaaggcggcagcagagacctccggggggcaacaagccccaacagcatggtgaccaccagccaggcagtgccaaacacaacagggaccaccagaaatcctaccaggggggctcagcaccccacccctcagggaggcccactcaccatggctacagccagaaccggcgctggcaccatggcaacatgaagcacccaccaggcgacaagggggaggcaggcgcacaccgcaatgccaaagagaccatgaccatcgagaacccaaaactggaggacactgcaggggacaccgggcacagcagcctcgaggccccccgcagccctgacaccctggccccggtggcttctgagcggctgcccccacagcagtcaggggggccagaggttgagacaaaacgtaaagacagtattcttcccgagcgcatcggggagcggcccaaaattaccctgctccagtcttccaaagacagactgcggcgaaggctaaaggaaaaggatgaagtggccgtggagacgaccactccccagcagaacaagatggacaagctgatcgagatcctgaacagcatgcggaacaacagcagcgacgtggacaccaagctcaccaccttcatggaggaggcccagaactccaccaactccgaggagatgctgggcgagatcgtgcgcacaatctaccagaaggctgtgtccgaccgcagcttcgccttcaccgctgccaagctctgcgacaagatggcgctctttatggtggaggggaccaagttccggagcctgctcctcaacatgctgcagaaggacttcacggtgcgcgaggagctgcagcagcaggacgtggagcgctggctgggcttcatcaccttcctgtgcgaggtcttcggcaccatgcgcagcagcacaggcgagcccttccgtgtgctcgtgtgccccatctacacctgcctcagggagctcttgcaatctcaggatgtgaaggaagatgctgtcctttgctgctctatggagctgcagagtacaggccggctgctggaggaacagctgcctgagatgatgacagagctcctggccagcgcacgggacaagatgctgtgcccctcggagtccatgctgacccggtcgctgctcctagaggtcatcgagctccacgctaacagctggaaccctctgacgccccccatcacgcagtactacaacagaaccatccagaaactgacagcctgacagccagggggcctggcaggcggcccacgggcagctggggccctggtgcacagggccagatggacaggcgggaggacaggggtggccctggcgggagaaagaaatggggaggagggcaggcagagtcggtggccagtctggagccagacggggaagggagcaaatccctgagaggagtgcccccgcacaagccccccagcccgagcatgcaagctcacaccaataagggaagcatgtttctttttcctggtggccctggccctccccttcctcactcccgcctctcccctccccatcagacccatcccccacggagctttgtgtgagggatctcatcgctgtgactcctcggagaccttggcagcctcgcacgccggggcaccgcttgggtcagaaaggacctcggaaggctgaaaaagtgggtcggagacgggctcgcattgttcccgcatgctgtcagccgcagtcgccaactggcagcaggcgacgtgtagcagatgtccgggaggacaaaggcaggcacggtccccaccagccgcccgtaattgacggcctttgtcagccatggcagagctgacgctccacctcccacctccaagtcctcctcactgcagcccccacagcctcaggcctagggggtcaggcgcagcgggggagatggagtttgcagttccacttgcactcttttgtttattgtgttttatttttcaaaagtcggttgctttgaagtctctttggccaatgaaaatgcccgtgatgtgatcacacagtcagcactgttgaggacccccggattagtgggagatcaaacccagctcccctctagaagaaggattcgagccacagacagcttgccagtagccaattagggtaattggaaacttctgccccggcggggggtccccgctggaatcctgtgttcctcgccactggcttccagcgcctctgttttctcaaagggctgatactgtcaccactgggaccaagttaaacctggtcctggccccaggggccttgtggcaaacagggcacagaacgagactggcaaattaaaaccaaaattctagatggtgtcttgcgctccacacgcaggtcttactggggaaaaggatgggagtgggggctccccaggactcgattttagctaatgcgctgtgtcactgccccagctcggacgtagaagcccagccctccgtgagctcttgggaaaggggtgaattcactgggtcatggaagggacagtcaggtgaccagcggggtcgccagatgaagcttcccagccgggaaacaagacggggtttcttggcaggccctggtcctggggagcaggccctgttgttggctggagaggaaggtgtggggtggaacaggtgtccacatagctccatctctgggggctggagcacacactttgatgagcccccccggaaatgatgtcagagcctagccgcttccttatttgctcttttattgaggccgggcaggccctgggtcactttggaggcccctcttggtccacactggactggccgggaggtgatgggcggggaaggttctcgtgattgattgattctgagtctgagagtggcgagtggggagaggcttccccagttctctccagctttccctgcagctgcaacctgccctctggtcccaggtgtggagcctttgcctgtctctaaaaagagcctgttggcgacaaggtgtagggggcacaagtttacctgaaacaggtcagtggtctctcccaagaagcgcacgccacctctggtccctggccctgaaccctgccttcttcctccctccacggtttcttcccagactttctcaagctcctcctcactgcccttcctccccagcccagcctgggaacacagatgccccgcgggtaggaggcctcgagggaggagccgggctgatgcggggctgctcagggcaggccccagggcgagcttgccatcgtggccaggcagcctccacctgtgcttcagtggcccctgcccccctgaagcatgtggggtttgtccgctaggaggaggcaaggcccccgaagagaggagagacctgggagtgggagctcaggtcagggaggaggcaggggagtggggtctcccagacccaacggtgagctcagagcaagcttcacgcaggacgctccgaaacactgtgtggagggggctgtgttgtgggcaccttggggcctgattctccttcctccgaacgggctccttgatggcctggccacaggggcagctccccattggctgttaggaccagagtgtgaagaagaagtgaaatataaatatgtatacatatataaatatatttttaattacatgtcgtgtcacggtggctccagacatactgtttgcctagtttattccactgcttgaaagcgcttcctagccaatctgaacaacaacactttaagctgtttttctaaatgcaggttgctgctcctttttcagatatggaaggaaaacgttaagactattttttttttaaagaaacaacagtcaagcctaaaatttgagaccccgaggcagcttcccgagggagactgctcagacaggaactgcaggacagaagtggatgccccacagaccctggccccctccccaagtccatcccctctctgtggcatgaggaaggccgcgtccgagttgacctctgaatgtatgtgatgagaggcagagctggatattgcatttctaaggcttgcattgctttcccctcgcctccctgagccggctgggagtggacgacaggacctacctccccagagcaagggcctggggcttcccgccaaagctgccgcggaaccccgctagtgcgaccaccctccctccgtcggtatgtcctgctttccagctgaacccaaactacaagtgggtttaaaaaaataaacaaacaccaatcagctaaaatacaaatattcactatctactctaccgcccgcagatcttctcaccactctctcttctccttctctcctctctcactccgttgccactccacaccacacatcatcacaccacaccgttataccaccccaccttgccccaccatcacccgccctctctccccaccaccatcttcaagtcaacactcactcctccgcgcccctcaccccgcctcgtcatcaaacatacccagccaacaccctcgctccaccctccctctctcacccacatcaccacgaaacactcagtctccctctcaccctcttccccccctcctcctaacactatccaacacccttcttcctcccctcctcctcctcctcctacctctatctc

SEQ ID NO: 455663 - DNA, 2542 bp, Homo sapiens
gtcagatcagggatcattttttttccttcctctactccctcccccctacccgcccctccctccctgtttcccttccctccctccctcccctctctgctgggtctgtgcgctggggcgcccgatcccctccgcagctgggacgctccgaactcgaggcaggagtcggctctccggagcctcgtccctcccttccccttccctgcccccttcccccacccccgactcgggcttggcgcggcggccagaggaaccccgagcccgcatttgctgcatcgagcagttggtttagtatcagccaaacttgcagctgttttctctgtcctctttcccaccagtcccggcccaggcccctgagctggagggatggaaaactcctctgcagcatcagcctcctcggaggcagggagcagccgctcccaggagatcgaggagctggagcgcttcatcgacagctacgtgctggagtaccaggtgcaggggctgctggctgacaagacggagggtgatggcgagagcgagaggacccagtcccacatctcccagtggacagcggactgcagcgaaccgctggacagcagctgttccttctcccgagggcgagcccccccacagcagaatggcagcaaagacaactctctggacatgctgggcacggacatctgggcggccaacaccttcgattccttcagtggtgccacctgggacctgcagccggaaaagctggacttcacccagttccaccgcaaagtccgacacacgcccaagcagcccctgccacacatcgaccgcgaagggtgtggcaaagggaagctggaagatggggatggcatcaacctgaatgacatcgagaaggtccttccagcctggcagggctaccacccgatgccccatgaagtggagatcgcacacaccaagaagctgttccgcaggaggagaaatgatcgaaggcggcagcagagacctccggggggcaacaagccccaacagcatggtgaccaccagccaggcagtgccaaacacaacagggaccaccagaaatcctaccaggggggctcagcaccccacccctcagggaggcccactcaccatggctacagccagaaccggcgctggcaccatggcaacatgaagcacccaccaggcgacaagggggaggcaggcgcacaccgcaatgccaaagagaccatgaccatcgagaacccaaaactggaggacactgcaggggacaccgggcacagcagcctcgaggccccccgcagccctgacaccctggccccggtggcttctgagcggctgcccccacagcagtcaggggggccagaggttgagacaaaacgtaaagacagtattcttcccgagcgcatcggggagcggcccaaaattaccctgctccagtcttccaaagacagactgcggcgaaggctaaaggaaaaggatgaagtggccgtggagacgaccactccccagcagaacaagatggacaagctgatcgagatcctgaacagcatgcggaacaacagcagcgacgtggacaccaagctcaccaccttcatggaggaggcccagaactccaccaactccgaggagatgctgggcgagatcgtgcgcacaatctaccagaaggctgtgtccgaccgcagcttcgccttcaccgctgccaagctctgcgacaagatggcgctctttatggtggaggggaccaagttccggagcctgctcctcaacatgctgcagaaggacttcacggtgcgcgaggagctgcagcagcaggacgtggagcgctggctgggcttcatcaccttcctgtgcgaggtcttcggcaccatgcgcagcagcacaggcgagcccttccgtgtgtcgtgtccctcagctgcagggcactgtgttgggaaaccattggctgggcctttgaggacacagatcagaagaaagaaagacaactttcctctgcgcggaacactcacacggaagggctggccgcctccctgagccggctgggagtggacgacaggacctacctccccagagcaagggcctggggcttcccgccaaagctgccgcggaaccccgctagtgcgaccaccctccctccgtcggtatgtcctgctttccagctgaacccaaactacaagtgggtttaaaaaaataaacaaacaccaatcagctaaaatacaaatattcactatctactctaccgcccgcagatcttctcaccactctctcttctccttctctcctctctcactccgttgccactccacaccacacatcatcacaccacaccgttataccaccccaccttgccccaccatcacccgccctctctccccaccaccatcttcaagtcaacactcactcctccgcgcccctcaccccgcctcgtcatcaaacatacccagccaacaccctcgctccaccctccctctctcacccacatcaccacgaaacactcagtctccctctcaccctcttccccccctcctcctaacactatccaacacccttcttcctcccctcctcctcctcctcctacctctatctc

SEQ ID NO: 455664 - DNA, 639 bp, Homo sapiens
ctccgtgtgagtgttccgcgcagaggaggcggcagcccttccgtgtgagtgttccgcgcagaggaaagggctggccgcctccctgagccggctgggagtggacgacaggacctacctccccagagcaagggcctggggcttcccgccaaagctgccgcggaaccccgctagtgcgaccaccctccctccgtcggtatgtcctgctttccagctgaacccaaactacaagtgggtttaaaaaaataaacaaacaccaatcagctaaaatacaaatattcactatctactctaccgcccgcagatcttctcaccactctctcttctccttctctcctctctcactccgttgccactccacaccacacatcatcacaccacaccgttataccaccccaccttgccccaccatcacccgccctctctccccaccaccatcttcaagtcaacactcactcctccgcgcccctcaccccgcctcgtcatcaaacatacccagccaacaccctcgctccaccctccctctctcacccacatcaccacgaaacactcagtctccctctcaccctcttccccccctcctcctaacactatccaacacccttcttcctcccctcctcctcctcctcctacctctatctc

SEQ ID NO: 455665 - DNA, 574 bp, Homo sapiens
gtcagatcagggatcattttttttccttcctctactccctcccccctacccgcccctccctccctgtttcccttccctccctccctcccctctctgctgggtctgtgcgctggggcgcccgatcccctccgcagctgggacgctccgaactcgaggcaggagtcggctctccggagcctcgtccctcccttccccttccctgcccccttcccccacccccgactcgggcttggcgcggcggccagaggaaccccgagtcccggcccaggcccctgagctggagggatggaaaactcctctgcagcatcagcctcctcggaggcagggagcagccgctcccaggagatcgaggagctggagcgcttcatcgacagctacgtgctggagtaccaggtgcaggggctgctggctgacaagacggagggtgatggcgagagcgagaggacccagtcccacatctcccagtggacagcggactgcagcgaaccgctggacagcagctgttccttctcccgagggcgagcccccccacagcagaatacagcaccacgaatgggatcctctagacgccacc

SEQ ID NO: 455666 - DNA, 6190 bp, Homo sapiens
gtcagatcagggatcattttttttccttcctctactccctcccccctacccgcccctccctccctgtttcccttccctccctccctcccctctctgctgggtctgtgcgctggggcgcccgatcccctccgcagctgggacgctccgaactcgaggcaggagtcggctctccggagcctcgtccctcccttccccttccctgcccccttcccccacccccgactcgggcttggcgcggcggccagaggaaccccgagcccgcatttgctgcatcgagcagttggtttagtatcagccaaacttgcagctgttttctctgtcctctttcccaccagtcccggcccaggcccctgagctggagggatggaaaactcctctgcagcatcagcctcctcggaggcagggagcagccgctcccaggagatcgaggagctggagcgcttcatcgacagctacgtgctggagtaccaggtgcaggggctgctggctgacaagacggagggtgatggcgagagcgagaggacccagtcccacatctcccagtggacagcggactgcagcgaaccgctggacagcagctgttccttctcccgagggcgagcccccccacagcagaatggcagcaaagacaactctctggacatgctgggcacggacatctgggcggccaacaccttcgattccttcagtggtgccacctgggacctgcagccggaaaagctggacttcacccagttccaccgcaaagtccgacacacgcccaagcagcccctgccacacatcgaccgcgaagggtgtggcaaagggaagctggaagatggggatggcatcaacctgaatgacatcgagaaggtccttccagcctggcagggctaccacccgatgccccatgaagtggagatcgcacacaccaagaagctgttccgcaggaggagaaatgatcgaaggcggcagcagagacctccggggggcaacaagccccaacagcatggtgaccaccagccaggcagtgccaaacacaacagggaccaccagaaatcctaccaggggggctcagcaccccacccctcagggaggcccactcaccatggctacagccagaaccggcgctggcaccatggcaacatgaagcacccaccaggcgacaagggggaggcaggcgcacaccgcaatgccaaagagaccatgaccatcgagaacccaaaactggaggacactgcaggggacaccgggcacagcagcctcgaggccccccgcagccctgacaccctggccccggtggcttctgagcggctgcccccacagcagtcaggggggccagaggttgagacaaaacgtaaagacagtattcttcccgagcgcatcggggagcggcccaaaattaccctgctccagtcttccaaagacagactgcggcgaaggctaaaggaaaaggatgaagtggccgtggagacgaccactccccagcagaacaagatggacaagctgatcgagatcctgaacagcatgcggaacaacagcagcgacgtggacaccaagctcaccaccttcatggaggaggcccagaactccaccaactccgaggagatgctgggcgagatcgtgcgcacaatctaccagaaggctgtgtccgaccgcagcttcgccttcaccgctgccaagctctgcgacaagatggcgctctttatggtggaggggaccaagttccggagcctgctcctcaacatgctgcagaaggacttcacggtgcgcgaggagctgcagcagcaggacgtggagcgctggctgggcttcatcaccttcctgtgcgaggtcttcggcaccatgcgcagcagcacaggcgagcccttccgtgtgctcgtgtgccccatctacacctgcctcagggagctcttgcaatctcaggatgtgaaggaagatgctgtcctttgctgctctatggagctgcagagtacaggccggctgctggaggaacagctgcctgagatgatgacagagctcctggccagcgcacgggacaagatgctgtgcccctcggagtccatgctgacccggtcgctgctcctagaggtcatcgagctccacgctaacagctggaaccctctgacgccccccatcacgcagtactacaacagaaccatccagaaactgacagcctgacagccagggggcctggcaggcggcccacgggcagctggggccctggtgcacagggccagatggacaggcgggaggacaggggtggccctggcgggagaaagaaatggggaggagggcaggcagagtcggtggccagtctggagccagacggggaagggagcaaatccctgagaggagtgcccccgcacaagccccccagcccgagcatgcaagctcacaccaataagggaagcatgtttctttttcctggtggccctggccctccccttcctcactcccgcctctcccctccccatcagacccatcccccacggagctttgtgtgagggatctcatcgctgtgactcctcggagaccttggcagcctcgcacgccggggcaccgcttgggtcagaaaggacctcggaaggctgaaaaagtgggtcggagacgggctcgcattgttcccgcatgctgtcagccgcagtcgccaactggcagcaggcgacgtgtagcagatgtccgggaggacaaaggcaggcacggtccccaccagccgcccgtaattgacggcctttgtcagccatggcagagctgacgctccacctcccacctccaagtcctcctcactgcagcccccacagcctcaggcctagggggtcaggcgcagcgggggagatggagtttgcagttccacttgcactcttttgtttattgtgttttatttttcaaaagtcggttgctttgaagtctctttggccaatgaaaatgcccgtgatgtgatcacacagtcagcactgttgaggacccccggattagtgggagatcaaacccagctcccctctagaagaaggattcgagccacagacagcttgccagtagccaattagggtaattggaaacttctgccccggcggggggtccccgctggaatcctgtgttcctcgccactggcttccagcgcctctgttttctcaaagggctgatactgtcaccactgggaccaagttaaacctggtcctggccccaggggccttgtggcaaacagggcacagaacgagactggcaaattaaaaccaaaattctagatggtgtcttgcgctccacacgcaggtcttactggggaaaaggatgggagtgggggctccccaggactcgattttagctaatgcgctgtgtcactgccccagctcggacgtagaagcccagccctccgtgagctcttgggaaaggggtgaattcactgggtcatggaagggacagtcaggtgaccagcggggtcgccagatgaagcttcccagccgggaaacaagacggggtttcttggcaggccctggtcctggggagcaggccctgttgttggctggagaggaaggtgtggggtggaacaggtgtccacatagctccatctctgggggctggagcacacactttgatgagcccccccggaaatgatgtcagagcctagccgcttccttatttgctcttttattgaggccgggcaggccctgggtcactttggaggcccctcttggtccacactggactggccgggaggtgatgggcggggaaggttctcgtgattgattgattctgagtctgagagtggcgagtggggagaggcttccccagttctctccagctttccctgcagctgcaacctgccctctggtcccaggtgtggagcctttgcctgtctctaaaaagagcctgttggcgacaaggtgtagggggcacaagtttacctgaaacaggtcagtggtctctcccaagaagcgcacgccacctctggtccctggccctgaaccctgccttcttcctccctccacggtttcttcccagactttctcaagctcctcctcactgcccttcctccccagcccagcctgggaacacagatgccccgcgggtaggaggcctcgagggaggagccgggctgatgcggggctgctcagggcaggccccagggcgagcttgccatcgtggccaggcagcctccacctgtgcttcagtggcccctgcccccctgaagcatgtggggtttgtccgctaggaggaggcaaggcccccgaagagaggagagacctgggagtgggagctcaggtcagggaggaggcaggggagtggggtctcccagacccaacggtgagctcagagcaagcttcacgcaggacgctccgaaacactgtgtggagggggctgtgttgtgggcaccttggggcctgattctccttcctccgaacgggctccttgatggcctggccacaggggcagctccccattggctgttaggaccagagtgtgaagaagaagtgaaatataaatatgtatacatatataaatatatttttaattacatgtcgtgtcacggtggctccagacatactgtttgcctagtttattccactgcttgaaagcgcttcctagccaatctgaacaacaacactttaagctgtttttctaaatgcaggttgctgctcctttttcagatatggaaggaaaacgttaagactattttttttttaaagaaacaacagtcaagcctaaaatttgagaccccgaggcagcttcccgagggagactgctcagacaggaactgcaggacagaagtggatgccccacagaccctggccccctccccaagtccatcccctctctgtggcatgaggaaggccgcgtccgagttgacctctgaatgtatgtgatgagaggcagagctggatattgcatttctaaggcttgcattgctttcccctcgcccgcggttcttggcgcatggaagaggcggtccagccatctgatgttgatcctgtctcagtctccccactgcctgtcaggatgagttagtcattgtttttctccgaggcggcctgcttgccacagccctgctccccaaggcctggtggctttgccgaagctctgggaccgcagccccagcgaggcccccaacctcacccagacgaggccaggagccccgccaccctccacgggatgtgcaccctcagaccccattctctctgttcgtccttccttgaccagtctgtaaaccttcactgtttggggatcgtcctgtccatccatgtaaatgtaaatgttggccgagtcggtatttattctgattgatttttattttattctattattttctccgagggatgagggtggggggtgtgggaagggtaccacagatcaggccggggcagctgtaggggcgggggcccagacagccaggccgccaccagagcagccccatggggtgccccagacgcgggcctccaagaagccaagtcccagtctgttttctggcatcagacaccggcccgtgttccttgtcagacagacagactctcaggcctgcctggggagtcgtgtccctcagctgcagggcactgtgttgggaaaccattggctgggcctttgaggacacagatcagaagaaagaaagacaactttcctctgcgcggaacactcacacggaagggctggccgcctccctgagccggctgggagtggacgacaggacctacctccccagagcaagggcctggggcttcccgccaaagctgccgcggaaccccgctagtgcgaccaccctccctccgtcggtatgtcctgctttccagctgaacccaaactacaagtgggtttaaaaaaataaacaaacaccaatcagctaaaatacaaatattcactatctactctaccgcccgcagatcttctcaccactctctcttctccttctctcctctctcactccgttgccactccacaccacacatcatcacaccacaccgttataccaccccaccttgccccaccatcacccgccctctctccccaccaccatcttcaagtcaacactcactcctccgcgcccctcaccccgcctcgtcatcaaacatacccagccaacaccctcgctccaccctccctctctcacccacatcaccacgaaacactcagtctccctctcaccctcttccccccctcctcctaacactatccaacacccttcttcctcccctcctcctcctcctcctacctctatctc

SEQ ID NO: 455667 - DNA, 5937 bp, Homo sapiens
gtcagatcagggatcattttttttccttcctctactccctcccccctacccgcccctccctccctgtttcccttccctccctccctcccctctctgctgggtctgtgcgctggggcgcccgatcccctccgcagctgggacgctccgaactcgaggcaggagtcggctctccggagcctcgtccctcccttccccttccctgcccccttcccccacccccgactcgggcttggcgcggcggccagaggaaccccgagcccgcatttgctgcatcgagcagttggtttagtatcagccaaacttgcagctgttttctctgtcctctttcccaccagtcccggcccaggcccctgagctggagggatggaaaactcctctgcagcatcagcctcctcggaggcagggagcagccgctcccaggagatcgaggagctggagcgcttcatcgacagctacgtgctggagtaccaggtgcaggggctgctggctgacaagacggagggtgatggcgagagcgagaggacccagtcccacatctcccagtggacagcggactgcagcgaaccgctggacagcagctgttccttctcccgagggcgagcccccccacagcagaatggcagcaaagacaactctctggacatgctgggcacggacatctgggcggccaacaccttcgattccttcagtggtgccacctgggacctgcagccggaaaagctggacttcacccagttccaccgcaaagtccgacacacgcccaagcagcccctgccacacatcgaccgcgaagggtgtggcaaagggaagctggaagatggggatggcatcaacctgaatgacatcgagaaggtccttccagcctggcagggctaccacccgatgccccatgaagtggagatcgcacacaccaagaagctgttccgcaggaggagaaatgatcgaaggcggcagcagagacctccggggggcaacaagccccaacagcatggtgaccaccagccaggcagtgccaaacacaacagggaccaccagaaatcctaccaggggggctcagcaccccacccctcagggaggcccactcaccatggctacagccagaaccggcgctggcaccatggcaacatgaagcacccaccaggcgacaagggggaggcaggcgcacaccgcaatgccaaagagaccatgaccatcgagaacccaaaactggaggacactgcaggggacaccgggcacagcagcctcgaggccccccgcagccctgacaccctggccccggtggcttctgagcggctgcccccacagcagtcaggggggccagaggttgagacaaaacgtaaagacagtattcttcccgagcgcatcggggagcggcccaaaattaccctgctccagtcttccaaagacagactgcggcgaaggctaaaggaaaaggatgaagtggccgtggagacgaccactccccagcagaacaagatggacaagctgatcgagatcctgaacagcatgcggaacaacagcagcgacgtggacaccaagctcaccaccttcatggaggaggcccagaactccaccaactccgaggagatgctgggcgagatcgtgcgcacaatctaccagaaggctgtgtccgaccgcagcttcgccttcaccgctgccaagctctgcgacaagatggcgctctttatggtggaggggaccaagttccggagcctgctcctcaacatgctgcagaaggacttcacggtgcgcgaggagctgcagcagcaggacgtggagcgctggctgggcttcatcaccttcctgtgcgaggtcttcggcaccatgcgcagcagcacaggcgagcccttccgtgtgctcgtgtgccccatctacacctgcctcagggagctcttgcaatctcaggatgtgaaggaagatgctgtcctttgctgctctatggagctgcagagtacaggccggctgctggaggaacagctgcctgagatgatgacagagctcctggccagcgcacgggacaagatgctgtgcccctcggagtccatgctgacccggtcgctgctcctagaggtcatcgagctccacgctaacagctggaaccctctgacgccccccatcacgcagtactacaacagaaccatccagaaactgacagcctgacagccagggggcctggcaggcggcccacgggcagctggggccctggtgcacagggccagatggacaggcgggaggacaggggtggccctggcgggagaaagaaatggggaggagggcaggcagagtcggtggccagtctggagccagacggggaagggagcaaatccctgagaggagtgcccccgcacaagccccccagcccgagcatgcaagctcacaccaataagggaagcatgtttctttttcctggtggccctggccctccccttcctcactcccgcctctcccctccccatcagacccatcccccacggagctttgtgtgagggatctcatcgctgtgactcctcggagaccttggcagcctcgcacgccggggcaccgcttgggtcagaaaggacctcggaaggctgaaaaagtgggtcggagacgggctcgcattgttcccgcatgctgtcagccgcagtcgccaactggcagcaggcgacgtgtagcagatgtccgggaggacaaaggcaggcacggtccccaccagccgcccgtaattgacggcctttgtcagccatggcagagctgacgctccacctcccacctccaagtcctcctcactgcagcccccacagcctcaggcctagggggtcaggcgcagcgggggagatggagtttgcagttccacttgcactcttttgtttattgtgttttatttttcaaaagtcggttgctttgaagtctctttggccaatgaaaatgcccgtgatgtgatcacacagtcagcactgttgaggacccccggattagtgggagatcaaacccagctcccctctagaagaaggattcgagccacagacagcttgccagtagccaattagggtaattggaaacttctgccccggcggggggtccccgctggaatcctgtgttcctcgccactggcttccagcgcctctgttttctcaaagggctgatactgtcaccactgggaccaagttaaacctggtcctggccccaggggccttgtggcaaacagggcacagaacgagactggcaaattaaaaccaaaattctagatggtgtcttgcgctccacacgcaggtcttactggggaaaaggatgggagtgggggctccccaggactcgattttagctaatgcgctgtgtcactgccccagctcggacgtagaagcccagccctccgtgagctcttgggaaaggggtgaattcactgggtcatggaagggacagtcaggtgaccagcggggtcgccagatgaagcttcccagccgggaaacaagacggggtttcttggcaggccctggtcctggggagcaggccctgttgttggctggagaggaaggtgtggggtggaacaggtgtccacatagctccatctctgggggctggagcacacactttgatgagcccccccggaaatgatgtcagagcctagccgcttccttatttgctcttttattgaggccgggcaggccctgggtcactttggaggcccctcttggtccacactggactggccgggaggtgatgggcggggaaggttctcgtgattgattgattctgagtctgagagtggcgagtggggagaggcttccccagttctctccagctttccctgcagctgcaacctgccctctggtcccaggtgtggagcctttgcctgtctctaaaaagagcctgttggcgacaaggtgtagggggcacaagtttacctgaaacaggtcagtggtctctcccaagaagcgcacgccacctctggtccctggccctgaaccctgccttcttcctccctccacggtttcttcccagactttctcaagctcctcctcactgcccttcctccccagcccagcctgggaacacagatgccccgcgggtaggaggcctcgagggaggagccgggctgatgcggggctgctcagggcaggccccagggcgagcttgccatcgtggccaggcagcctccacctgtgcttcagtggcccctgcccccctgaagcatgtggggtttgtccgctaggaggaggcaaggcccccgaagagaggagagacctgggagtgggagctcaggtcagggaggaggcaggggagtggggtctcccagacccaacggtgagctcagagcaagcttcacgcaggacgctccgaaacactgtgtggagggggctgtgttgtgggcaccttggggcctgattctccttcctccgaacgggctccttgatggcctggccacaggggcagctccccattggctgttaggaccagagtgtgaagaagaagtgaaatataaatatgtatacatatataaatatatttttaattacatgtcgtgtcacggtggctccagacatactgtttgcctagtttattccactgcttgaaagcgcttcctagccaatctgaacaacaacactttaagctgtttttctaaatgcaggttgctgctcctttttcagatatggaaggaaaacgttaagactattttttttttaaagaaacaacagtcaagcctaaaatttgagaccccgaggcagcttcccgagggagactgctcagacaggaactgcaggacagaagtggatgccccacagaccctggccccctccccaagtccatcccctctctgtggcatgaggaaggccgcgtccgagttgacctctgaatgtatgtgatgagaggcagagctggatattgcatttctaaggcttgcattgctttcccctcgcccgcggttcttggcgcatggaagaggcggtccagccatctgatgttgatcctgtctcagtctccccactgcctgtcaggatgagttagtcattgtttttctccgaggcggcctgcttgccacagccctgctccccaaggcctggtggctttgccgaagctctgggaccgcagccccagcgaggcccccaacctcacccagacgaggccaggagccccgccaccctccacgggatgtgcaccctcagaccccattctctctgttcgtccttccttgaccagtctgtaaaccttcactgtttggggatcgtcctgtccatccatgtaaatacagactctcaggcctgcctggggagtcgtgtccctcagctgcagggcactgtgttgggaaaccattggctgggcctttgaggacacagatcagaagaaagaaagacaactttcctctgcgcggaacactcacacggaagggctggccgcctccctgagccggctgggagtggacgacaggacctacctccccagagcaagggcctggggcttcccgccaaagctgccgcggaaccccgctagtgcgaccaccctccctccgtcggtatgtcctgctttccagctgaacccaaactacaagtgggtttaaaaaaataaacaaacaccaatcagctaaaatacaaatattcactatctactctaccgcccgcagatcttctcaccactctctcttctccttctctcctctctcactccgttgccactccacaccacacatcatcacaccacaccgttataccaccccaccttgccccaccatcacccgccctctctccccaccaccatcttcaagtcaacactcactcctccgcgcccctcaccccgcctcgtcatcaaacatacccagccaacaccctcgctccaccctccctctctcacccacatcaccacgaaacactcagtctccctctcaccctcttccccccctcctcctaacactatccaacacccttcttcctcccctcctcctcctcctcctacctctatctc

SEQ ID NO: 455668 - DNA, 4498 bp, Homo sapiens
gtcagatcagggatcattttttttccttcctctactccctcccccctacccgcccctccctccctgtttcccttccctccctccctcccctctctgctgggtctgtgcgctggggcgcccgatcccctccgcagctgggacgctccgaactcgaggcaggagtcggctctccggagcctcgtccctcccttccccttccctgcccccttcccccacccccgactcgggcttggcgcggcggccagaggaaccccgagcccgcatttgctgcatcgagcagttggtttagtatcagccaaacttgcagctgttttctctgtcctctttcccaccagtcccggcccaggcccctgagctggagggatggaaaactcctctgcagcatcagcctcctcggaggcagggagcagccgctcccaggagatcgaggagctggagcgcttcatcgacagctacgtgctggagtaccaggtgcaggggctgctggctgacaagacggagggtgatggcgagagcgagaggacccagtcccacatctcccagtggacagcggactgcagcgaaccgctggacagcagctgttccttctcccgagggcgagcccccccacagcagaatggcagcaaagacaactctctggacatgctgggcacggacatctgggcggccaacaccttcgattccttcagtggtgccacctgggacctgcagccggaaaagctggacttcacccagttccaccgcaaagtccgacacacgcccaagcagcccctgccacacatcgaccgcgaagggtgtggcaaagggaagctggaagatggggatggcatcaacctgaatgacatcgagaaggtccttccagcctggcagggctaccacccgatgccccatgaagtggagatcgcacacaccaagaagctgttccgcaggaggagaaatgatcgaaggcggcagcagagacctccggggggcaacaagccccaacagcatggtgaccaccagccaggcagtgccaaacacaacagggaccaccagaaatcctaccaggggggctcagcaccccacccctcagggaggcccactcaccatggctacagccagaaccggcgctggcaccatggcaacatgaagcacccaccaggcgacaagggggaggcaggcgcacaccgcaatgccaaagagaccatgaccatcgagaacccaaaactggaggacactgcaggggacaccgggcacagcagcctcgaggccccccgcagccctgacaccctggccccggtggcttctgagcggctgcccccacagcagtcaggggggccagaggttgagacaaaacgtaaagacagtattcttcccgagcgcatcggggagcggcccaaaattaccctgctccagtcttccaaagacagactgcggcgaaggctaaaggaaaaggatgaagtggccgtggagacgaccactccccagcagaacaagatggacaagctgatcgagatcctgaacagcatgcggaacaacagcagcgacgtggacaccaagctcaccaccttcatggaggaggcccagaactccaccaactccgaggagatgctgggcgagatcgtgcgcacaatctaccagaaggctgtgtccgaccgcagcttcgccttcaccgctgccaagctctgcgacaagatggcgctctttatggtggaggggaccaagttccggagcctgctcctcaacatgctgcagaaggacttcacggtgcgcgaggagctgcagcagcaggacgtggagcgctggctgggcttcatcaccttcctgtgcgaggtcttcggcaccatgcgcagcagcacaggcgagcccttccgtgtgctcgtgtgccccatctacacctgcctcagggagctcttgcaatctcaggatgtgaaggaagatgctgtcctttgctgctctatggagctgcagagtacaggccggctgctggaggaacagctgcctgagatgatgacagagctcctggccagcgcacgggacaagatgctgtgcccctcggagtccatgctgacccggtcgctgctcctagaggtcatcgagctccacgctaacagctggaaccctctgacgccccccatcacgcagtactacaacagaaccatccagaaactgacagcctgacagccagggggcctggcaggcggcccacgggcagctggggccctggtgcacagggccagatggacaggcgggaggacaggggtggccctggcgggagaaagaaatggggaggagggcaggcagagtcggtggccagtctggagccagacggggaagggagcaaatccctgagaggagtgcccccgcacaagccccccagcccgagcatgcaagctcacaccaataagggaagcatgtttctttttcctggtggccctggccctccccttcctcactcccgcctctcccctccccatcagacccatcccccacggagctttgtgtgagggatctcatcgctgtgactcctcggagaccttggcagcctcgcacgccggggcaccgcttgggtcagaaaggacctcggaaggctgaaaaagtgggtcggagacgggctcgcattgttcccgcatgctgtcagccgcagtcgccaactggcagcaggcgacgtgtagcagatgtccgggaggacaaaggcaggcacggtccccaccagccgcccgtaattgacggcctttgtcagccatggcagagctgacgctccacctcccacctccaagtcctcctcactgcagcccccacagcctcaggcctagggggtcaggcgcagcgggggagatggagtttgcagttccacttgcactcttttgtttattgtgttttatttttcaaaagtcggttgctttgaagtctctttggccaatgaaaatgcccgtgatgtgatcacacagtcagcactgttgaggacccccggattagtgggagatcaaacccagctcccctctagaagaaggattcgagccacagacagcttgccagtagccaattagggtaattggaaacttctgccccggcggggggtccccgctggaatcctgtgttcctcgccactggcttccagcgcctctgttttctcaaagggctgatactgtcaccactgggaccaagttaaacctggtcctggccccaggggccttgtggcaaacagggcacagaacgagactggcaaattaaaaccaaaattctagatggtgtcttgcgctccacacgcaggtcttactggggaaaaggatgggagtgggggctccccaggactcgattttagctaatgcgctgtgtcactgccccagctcggacgtagaagcccagccctccgtgagctcttgggaaaggggtgaattcactgggtcatggaagggacagtcaggtgaccagcggggtcgccagatgaagcttcccagccgggaaacaagacggggtttcttggcaggccctggtcctggggagcaggccctgttgttggctggagaggaaggtgtggggtggaacaggtgtccacatagctccatctctgggggctggagcacacactttgatgagcccccccggaaatgatgtcagagcctagccgcttccttatttgctcttttattgaggccgggcaggccctgggtcactttggaggcccctcttggtccacactggactggccgggaggtgatgggcggggaaggttctcgtgattgattgattctgagtctgagagtggcgagtggggagaggcttccccagttctctccagctttccctgcagctgcaacctgccctctggtcccaggtgtggagcctttgcctgtctctaaaaagagcctgttggcgacaaggtgtagggggcacaagtttacctgaaacaggtcagtggtctctcccaagaagcgcacgccacctctggtccctggccctgaaccctgccttcttcctccctccacggtttcttcccagactttctcaagctcctcctcactgcccttcctccccagcccagcctgggaacacagatgccccgcgggtaggaggcctcgagggaggagccgggctgatgcggggctgctcagggcaggccccagggcgagcttgccatcgtggccaggcagcctccacctgtgcttcagtggcccctgcccccctgaagcatgtggggtttgtccgctaggaggaggcaaggcccccgaagagaggagagacctgggagtgggagctcaggtcagggaggaggcaggggagtggggtctcccagacccaacggtgagctcagagcaagcttcacgcaggacgctccgaaacactgtgtggagggggctgtgttgtgggcaccttggggcctgattctccttcctccgaacgggctccttgatggcctggccacaggggcagctccccattggctgttaggaccagagtgtgaagaagaagtgaaatataaatatgtatacatatataaatatatttttaattacat

SEQ ID NO: 455669 - DNA, 5183 bp, Homo sapiens
gtcagatcagggatcattttttttccttcctctactccctcccccctacccgcccctccctccctgtttcccttccctccctccctcccctctctgctgggtctgtgcgctggggcgcccgatcccctccgcagctgggacgctccgaactcgaggcaggagtcggctctccggagcctcgtccctcccttccccttccctgcccccttcccccacccccgactcgggcttggcgcggcggccagaggaaccccgagcccgcatttgctgcatcgagcagttggtttagtatcagccaaacttgcagctgttttctctgtcctctttcccaccagtcccggcccaggcccctgagctggagggatggaaaactcctctgcagcatcagcctcctcggaggcagggagcagccgctcccaggagatcgaggagctggagcgcttcatcgacagctacgtgctggagtaccaggtgcaggggctgctggctgacaagacggagggtgatggcgagagcgagaggacccagtcccacatctcccagtggacagcggactgcagcgaaccgctggacagcagctgttccttctcccgagggcgagcccccccacagcagaatggcagcaaagacaactctctggacatgctgggcacggacatctgggcggccaacaccttcgattccttcagtggtgccacctgggacctgcagccggaaaagctggacttcacccagttccaccgcaaagtccgacacacgcccaagcagcccctgccacacatcgaccgcgaagggtgtggcaaagggaagctggaagatggggatggcatcaacctgaatgacatcgagaaggtccttccagcctggcagggctaccacccgatgccccatgaagtggagatcgcacacaccaagaagctgttccgcaggaggagaaatgatcgaaggcggcagcagagacctccggggggcaacaagccccaacagcatggtgaccaccagccaggcagtgccaaacacaacagggaccaccagaaatcctaccaggggggctcagcaccccacccctcagggaggcccactcaccatggctacagccagaaccggcgctggcaccatggcaacatgaagcacccaccaggcgacaagggggaggcaggcgcacaccgcaatgccaaagagaccatgaccatcgagaacccaaaactggaggacactgcaggggacaccgggcacagcagcctcgaggccccccgcagccctgacaccctggccccggtggcttctgagcggctgcccccacagcagtcaggggggccagaggttgagacaaaacgtaaagacagtattcttcccgagcgcatcggggagcggcccaaaattaccctgctccagtcttccaaagacagactgcggcgaaggctaaaggaaaaggatgaagtggccgtggagacgaccactccccagcagaacaagatggacaagctgatcgagatcctgaacagcatgcggaacaacagcagcgacgtggacaccaagctcaccaccttcatggaggaggcccagaactccaccaactccgaggagatgctgggcgagatcgtgcgcacaatctaccagaaggctgtgtccgaccgcagcttcgccttcaccgctgccaagctctgcgacaagatggcgctctttatggtggaggggaccaagttccggagcctgctcctcaacatgctgcagaaggacttcacggtgcgcgaggagctgcagcagcaggacgtggagcgctggctgggcttcatcaccttcctgtgcgaggtcttcggcaccatgcgcagcagcacaggcgagcccttccgtgtgctcgtgtgccccatctacacctgcctcagggagctcttgcaatctcaggatgtgaaggaagatgctgtcctttgctgctctatggagctgcagagtacaggccggctgctggaggaacagctgcctgagatgatgacagagctcctggccagcgcacgggacaagatgctgtgcccctcggagtccatgctgacccggtcgctgctcctagaggtcatcgagctccacgctaacagctggaaccctctgacgccccccatcacgcagtactacaacagaaccatccagaaactgacagcctgacagccagggggcctggcaggcggcccacgggcagctggggccctggtgcacagggccagatggacaggcgggaggacaggggtggccctggcgggagaaagaaatggggaggagggcaggcagagtcggtggccagtctggagccagacggggaagggagcaaatccctgagaggagtgcccccgcacaagccccccagcccgagcatgcaagctcacaccaataagggaagcatgtttctttttcctggtggccctggccctccccttcctcactcccgcctctcccctccccatcagacccatcccccacggagctttgtgtgagggatctcatcgctgtgactcctcggagaccttggcagcctcgcacgccggggcaccgcttgggtcagaaaggacctcggaaggctgaaaaagtgggtcggagacgggctcgcattgttcccgcatgctgtcagccgcagtcgccaactggcagcaggcgacgtgtagcagatgtccgggaggacaaaggcaggcacggtccccaccagccgcccgtaattgacggcctttgtcagccatggcagagctgacgctccacctcccacctccaagtcctcctcactgcagcccccacagcctcaggcctagggggtcaggcgcagcgggggagatggagtttgcagttccacttgcactcttttgtttattgtgttttatttttcaaaagtcggttgctttgaagtctctttggccaatgaaaatgcccgtgatgtgatcacacagtcagcactgttgaggacccccggattagtgggagatcaaacccagctcccctctagaagaaggattcgagccacagacagcttgccagtagccaattagggtaattggaaacttctgccccggcggggggtccccgctggaatcctgtgttcctcgccactggcttccagcgcctctgttttctcaaagggctgatactgtcaccactgggaccaagttaaacctggtcctggccccaggggccttgtggcaaacagggcacagaacgagactggcaaattaaaaccaaaattctagatggtgtcttgcgctccacacgcaggtcttactggggaaaaggatgggagtgggggctccccaggactcgattttagctaatgcgctgtgtcactgccccagctcggacgtagaagcccagccctccgtgagctcttgggaaaggggtgaattcactgggtcatggaagggacagtcaggtgaccagcggggtcgccagatgaagcttcccagccgggaaacaagacggggtttcttggcaggccctggtcctggggagcaggccctgttgttggctggagaggaaggtgtggggtggaacaggtgtccacatagctccatctctgggggctggagcacacactttgatgagcccccccggaaatgatgtcagagcctagccgcttccttatttgctcttttattgaggccgggcaggccctgggtcactttggaggcccctcttggtccacactggactggccgggaggtgatgggcggggaaggttctcgtgattgattgattctgagtctgagagtggcgagtggggagaggcttccccagttctctccagctttccctgcagctgcaacctgccctctggtcccaggtgtggagcctttgcctgtctctaaaaagagcctgttggcgacaaggtgtagggggcacaagtttacctgaaacaggtcagtggtctctcccaagaagcgcacgccacctctggtccctggccctgaaccctgccttcttcctccctccacggtttcttcccagactttctcaagctcctcctcactgcccttcctccccagcccagcctgggaacacagatgccccgcgggtaggaggcctcgagggaggagccgggctgatgcggggctgctcagggcaggccccagggcgagcttgccatcgtggccaggcagcctccacctgtgcttcagtggcccctgcccccctgaagcatgtggggtttgtccgctaggaggaggcaaggcccccgaagagaggagagacctgggagtgggagctcaggtcagggaggaggcaggggagtggggtctcccagacccaacggtgagctcagagcaagcttcacgcaggacgctccgaaacactgtgtggagggggctgtgttgtgggcaccttggggcctgattctccttcctccgaacgggctccttgatggcctggccacaggggcagctccccattggctgttaggaccagagtgtgaagaagaagtgaaatataaatatgtatacatatataaatatatttttaattacattcgtgtccctcagctgcagggcactgtgttgggaaaccattggctgggcctttgaggacacagatcagaagaaagaaagacaactttcctctgcgcggaacactcacacggaagggctggccgcctccctgagccggctgggagtggacgacaggacctacctccccagagcaagggcctggggcttcccgccaaagctgccgcggaaccccgctagtgcgaccaccctccctccgtcggtatgtcctgctttccagctgaacccaaactacaagtgggtttaaaaaaataaacaaacaccaatcagctaaaatacaaatattcactatctactctaccgcccgcagatcttctcaccactctctcttctccttctctcctctctcactccgttgccactccacaccacacatcatcacaccacaccgttataccaccccaccttgccccaccatcacccgccctctctccccaccaccatcttcaagtcaacactcactcctccgcgcccctcaccccgcctcgtcatcaaacatacccagccaacaccctcgctccaccctccctctctcacccacatcaccacgaaacactcagtctccctctcaccctcttccccccctcctcctaacactatccaacacccttcttcctcccctcctcctcctcctcctacctctatctc

SEQ ID NO: 455670 - DNA, 808 bp, Homo sapiens
tagtcattttcttggaggacctgagcccctcagaggtttgtgtctcgggccccattgtgcaccctcaatcttggttctgttgtttatttcatcctgctttgtggtagattctgttaaatctgagtcaggaagtgaggcttggcctgtaggctgagctcatcttctgcctttcccagcgattaaggcctaggtagacactaactctgacactgcacagtgcctgtgctggccaatcagacaagtggcctgcattccctgggcctcagtctcctgccctacacagtgggaattacagcacatagtttatgctgagggcaagccagcccctcgctgacttctcagggttgttggaagaacagaacgccatgatggataagaagatgcttccaggagcagagggtgtttctcaggtgtgggcatcgtcgtctcctccagcagcgtctcacggagttctctgtcctctttcccaccagtcccggcccaggcccctgagctggagggatggaaaactcctctgcagcatcagcctcctcggaggcagggagcagccgctcccaggagatcgaggagctggagcgcttcatcgacagctacgtgctggagtaccaggtgcaggggctgctggctgacaagacggagggtgatggcgagagcgagaggacccagtcccacatctcccaggtgagcgcgggcccggggttggggcagcttgggaaattcagagggggtgatgcaggagcccctaattctgggcagcatccagttgcctgacactagaccgccaaggcatgaatggtcccacccagca

SEQ ID NO: 455671 - DNA, 2767 bp, Homo sapiens
gaagtttccttattcagttgaagattgctatggtgtaacagaagttgtattttgcttttccccttaatccactttccaccctacgcaacccccctcttttcgcttaagaacatactgtagatttgttagaaatagtagtaccttctttccccaccccaaactgctacctgtttcttccttgtttggactctctgctcctctagaagatttcacagcaatgctggactgcagtgactatgttctagactcaagaatgaacaatccgtcagaaaccagtaaaccatctatggagagtggagatggcaacacaggcacacaaaccaatggtctggactttcagaagcagcctgtgcctgtaggaggagcaatctcaacagcccaggcgcaggctttccttggacatctccatcaggtccaactcgctggaacaagtttacaggctgctgctcagtctttaaatgtacagtctaaatctaatgaagaatcgggggattcgcagcagccaagccagccttcccagcagccttcagtgcaggcagccattccccagacccagcttatgctagctggaggacagataactgggcttactttgacgcctgcccagcaacagttactactccagcaggcacaggcacaggcacagctgctggctgctgcagtgcagcagcactccgccagccagcagcacagtgctgctggagccaccatctccgcctctgctgccacgcccatgacgcagatccccctgtctcagcccatacagatcgcacaggatcttcaacaactgcaacagcttcaacagcagaatctcaacctgcaacagtttgtgttggtgcatccaaccaccaatttgcagccagcgcagtttatcatctcacagacgccccagggccagcagggtctcctgcaagcgcaaaatcttctaacgcaactacctcagcaaagccaagccaacctcctacagtcgcagccaagcatcaccctcacctcccagccagcaaccccaacacgcacaatagcagcaaccccaattcagacacttccacagagccagtcaacaccaaagcgaattgatactcccagcttggaggagcccagtgaccttgaggagcttgagcagtttgccaagaccttcaaacaaagacgaatcaaacttggattcactcagggtgatgttgggctcgctatggggaaactatatggaaatgacttcagccaaactaccatctctcgatttgaagccttgaacctcagctttaagaacatgtgcaagttgaagccacttttagagaagtggctaaatgatgcagagaacctctcatctgattcgtccctctccagcccaagtgccctgaattctccaggaattgagggcttgagccgtaggaggaagaaacgcaccagcatagagaccaacatccgtgtggccttagagaagagtttcttggagaatcaaaagcctacctcggaagagatcactatgattgctgatcagctcaatatggaaaaagaggtgattcgtgtttggttctgtaaccgccgccagaaagaaaaaagaatcaacccaccaagcagtggtgggaccagcagctcacctattaaagcaattttccccagcccaacttcactggtggcgaccacaccaagccttgtgactagcagtgcagcaactaccctcacagtcagccctgtcctccctctgaccagtgctgctgtgacgaatctttcagttacaggcacttcagacaccacctccaacaacacagcaaccgtgatttccacagcgcctccagcttcctcagcagtcacgtccccctctctgagtccctccccttctgcctcagcctccacctccgaggcatccagtgccagtgagaccagcacaacacagaccacctccactcctttgtcctcccctcttgggaccagccaggtgatggtgacagcatcaggtttgcaaacagcagcagctgctgcccttcaaggagctgcacagttgccagcaaatgccagtcttgctgccatggcagctgctgcaggactaaacccaagcctgatggcaccctcacagtttgcggctggaggtgccttactcagtctgaatccagggaccctgagcggtgctctcagcccagctctaatgagcaacagtacactggcaactattcaagctcttgcttctggtggctctcttccaataacatcacttgatgcaactgggaacctggtatttgccaatgcgggaggagcccccaacatcgtgactgcccctctgttcctgaaccctcagaacctctctctgctcaccagcaaccctgttagcttggtctctgccgccgcagcatctgcagggaactctgcacctgtagccagccttcacgccacctccacctctgctgagtccatccagaactctctcttcacagtggcctctgccagcggggctgcgtccaccaccaccaccgcctccaaggcacagtgagctgggcagagctgggctgccagaagcctttttcactctgcagtgtgattggactgccagccaggttaataaactgaaaaatgtgattggcttcctctcgccgtgttgtgagggcaaaggagagaagggagaaaaaaaaaaaaaaaccacacacacccatacacacataccagaaaaagaaagaaaggatggagacggaacatttgcctaattttgtaataaaacactgtcttttcaggattgcttcatggattggagaactttctaaccaaaaattaaaaa

SEQ ID NO: 455672 - DNA, 879 bp, Homo sapiens
aaaaatattcaaaatggcggacggaggagcagcgagtcaagatgagagttcagccgcggcggcagcagcagcagactcaagaatgaacaatccgtcagaaaccagtaaaccatctatggagagtggagatggcaacacaggcacacaaaccaatggtctggactttcagaagcagcctgtgcctgtaggaggagcaatctcaacagcccaggcgcaggctttccttggacatctccatcaggtccaactcgctggaacaagtttacaggctgctgctcagtctttaaatgtacagtctaaatctaatgaagaatcgggggattcgcagcagccaagccagccttcccagcagccttcagtgcaggcagccattccccagacccagcttatgctagctggaggacagataactgggcttactttgacgcctgcccagcaacagttactactccagcaggcacaggcacaggcacagctgctggctgctgcagtgcagcagcactccgccagccagcagcacagtgctgctggagccaccatctccgcctctgctgccacgcccatgacgcagatccccctgtctcagcccatacagatcgcacaggatcttcaacaactgcaacagcttcaacagcagaatctcaacctgcaacagtttgtgttggtgcatccaaccaccaatttgcagccagcgcagtttatcatctcacagacgccccagggccagcagggtctctgcaagcgcaaatcttctaacgcaataactcagaaagcaagccaacttctaaagtcggcagcaaggattaccttaactccagcaagaaaccaaaagaaatagggtacccaattgacttcccgagcagcaccaaggatggtccc

SEQ ID NO: 455673 - DNA, 2148 bp, Homo sapiens
aaaaatattcaaaatggcggacggaggagcagcgagtcaagatgagagttcagccgcggcggcagcagcagcagactggaaaagtaagaagagctttcctgcctttttaattaccaaactactctcagttttcaatgaatcagttcaaagaaagaatgcagtctttctatacctgactcaagaatgaacaatccgtcagaaaccagtaaaccatctatggagagtggagatggcaacacaggcacacaaaccaatggtctggactttcagaagcagcctgtgcctgtaggaggagcaatctcaacagcccaggcgcaggctttccttggacatctccatcaggtccaactcgctggaacaagtttacaggctgctgctcagtctttaaatgtacagtctaaatctaatgaagaatcgggggattcgcagcagccaagccagccttcccagcagccttcagtgcaggcagccattccccagacccagcttatgctagctggaggacagataactgggcttactttgacgcctgcccagcaacagttactactccagcaggcacaggcacaggcacagctgctggctgctgcagtgcagcagcactccgccagccagcagcacagtgctgctggagccaccatctccgcctctgctgccacgcccatgacgcagatccccctgtctcagcccatacagatcgcacaggatcttcaacaactgcaacagcttcaacagcagaatctcaacctgcaacagtttgtgttggtgcatccaaccaccaatttgcagccagcgcagtttatcatctcacagacgccccagggccagcagggtctcctgcaagcgcaaaatcttctaacgcaactacctcagcaaagccaagccaacctcctacagtcgcagccaagcatcaccctcacctcccagccagcaaccccaacacgcacaatagcagcaaccccaattcagacacttccacagagccagtcaacaccaaagcgaattgatactcccagcttggaggagcccagtgaccttgaggagcttgagcagtttgccaagaccttcaaacaaagacgaatcaaacttggattcactcagggtgatgttgggctcgctatggggaaactatatggaaatgacttcagccaaactaccatctctcgatttgaagccttgaacctcagctttaagaacatgtgcaagttgaagccacttttagagaagtggctaaatgatgcagagaacctctcatctgattcgtccctctccagcccaagtgccctgaattctccaggaattgagggcttgagccgtaggaggaagaaacgcaccagcatagagaccaacatccgtgtggccttagagaagagtttcttggagaatcaaaagcctacctcggaagagatcactatgattgctgatcagctcaatatggaaaaagaggtgattcgtgtttggttctgtaaccgccgccagaaagaaaaaagaatcaacccaccaagcagtggtgggaccagcagctcacctattaaagcaattttccccagcccaacttcactggtggcgaccacaccaagccttgtgactagcagtgcagcaactaccctcacagtcagccctgtcctccctctgaccagtgctgctgtgacgaatctttcagttacaggcacttcagacaccacctccaacaacacagcaaccgtgatttccacagcgcctccagcttcctcagcagtcacgtccccctctctgagtccctccccttctgcctcagcctccacctccgaggcatccagtgccagtgagaccagcacaacacagaccacctccactcctttgtcctcccctcttgggaccagccaggtgatggtgacagcatcaggtttgcaaacagcagcagctgctgcccttcaaggagctgcacagttgccagcaaatgccagtcttgctgccatggcagctgctgcaggactaaacccaagcctgatggcaccctcacagtttgcggctggaggtgccttactcagtctgaatccagggaccctgagcggtgctctcagcccagctctaatgagcaacagtacactggcaactattcaaggattgcttcatggattggagaactttctaaccaaaaattaaaaa

SEQ ID NO: 455674 - DNA, 2575 bp, Homo sapiens
aaaaatattcaaaatggcggacggaggagcagcgagtcaagatgagagttcagccgcggcggcagcagcagcagactcaagaatgaacaatccgtcagaaaccagtaaaccatctatggagagtggagatggcaacacaggcacacaaaccaatggtctggactttcagaagcagcctgtgcctgtaggaggagcaatctcaacagcccaggcgcaggctttccttggacatctccatcaggtccaactcgctggaacaagtttacaggctgctgctcagtctttaaatgtacagtctaaatctaatgaagaatcgggggattcgcagcagccaagccagccttcccagcagccttcagtgcaggcagccattccccagacccagcttatgctagctggaggacagataactgggcttactttgacgcctgcccagcaacagttactactccagcaggcacaggcacaggcacagctgctggctgctgcagtgcagcagcactccgccagccagcagcacagtgctgctggagccaccatctccgcctctgctgccacgcccatgacgcagatccccctgtctcagcccatacagatcgcacaggatcttcaacaactgcaacagcttcaacagcagaatctcaacctgcaacagtttgtgttggtgcatccaaccaccatcatctcacagacgccccagggccagcagggtctcctgcaagcgcaaaatcttctaacgcaactacctcagcaaagccaagccaacctcctacagtcgcagccaagcatcaccctcacctcccagccagcaaccccaacacgcacaatagcagcaaccccaattcagacacttccacagagccagtcaacaccaaagcgaattgatactcccagcttggaggagcccagtgaccttgaggagcttgagcagtttgccaagaccttcaaacaaagacgaatcaaacttggattcactcagggtgatgttgggctcgctatggggaaactatatggaaatgacttcagccaaactaccatctctcgatttgaagccttgaacctcagctttaagaacatgtgcaagttgaagccacttttagagaagtggctaaatgatgcagagaacctctcatctgattcgtccctctccagcccaagtgccctgaattctccaggaattgagggcttgagccgtaggaggaagaaacgcaccagcatagagaccaacatccgtgtggccttagagaagagtttcttggagaatcaaaagcctacctcggaagagatcactatgattgctgatcagctcaatatggaaaaagaggtgattcgtgtttggttctgtaaccgccgccagaaagaaaaaagaatcaacccaccaagcagtggtgggaccagcagctcacctattaaagcaattttccccagcccaacttcactggtggcgaccacaccaagccttgtgactagcagtgcagcaactaccctcacagtcagccctgtcctccctctgaccagtgctgctgtgacgaatctttcagttacaggcacttcagacaccacctccaacaacacagcaaccgtgatttccacagcgcctccagcttcctcagcagtcacgtccccctctctgagtccctccccttctgcctcagcctccacctccgaggcatccagtgccagtgagaccagcacaacacagaccacctccactcctttgtcctcccctcttgggaccagccaggtgatggtgacagcatcaggtttgcaaacagcagcagctgctgcccttcaaggagctgcacagttgccagcaaatgccagtcttgctgccatggcagctgctgcaggactaaacccaagcctgatggcaccctcacagtttgcggctggaggtgccttactcagtctgaatccagggaccctgagcggtgctctcagcccagctctaatgagcaacagtacactggcaactattcaagctcttgcttctggtggctctcttccaataacatcacttgatgcaactgggaacctggtatttgccaatgcgggaggagcccccaacatcgtgactgcccctctgttcctgaaccctcagaacctctctctgctcaccagcaaccctgttagcttggtctctgccgccgcagcatctgcagggaactctgcacctgtagccagccttcacgccacctccacctctgctgagtccatccagaactctctcttcacagtggcctctgccagcggggctgcgtccaccaccaccaccgcctccaaggcacagtgagctgggcagagctgggctgccagaagcctttttcactctgcagtgtgattggactgccagccaggttaataaactgaaaaatgtgattggcttcctctcgccgtgttgtgagggcaaaggagagaagggagaaaaaaaaaaaaaaaccacacacacccatacacacataccagaaaaagaaagaaaggatggagacggaacatttgcctaattttgtaataaaacactgtcttttcaggattgcttcatggattggagaactttctaaccaaaaattaaaaa

SEQ ID NO: 455675 - DNA, 2169 bp, Homo sapiens
aaaaatattcaaaatggcggacggaggagcagcgagtcaagatgagagttcagccgcggcggcagcagcagcagactcaagaatgaacaatccgtcagaaaccagtaaaccatctccgcctctgctgccacgcccatgacgcagatccccctgtctcagcccatacagatcgcacaggatcttcaacaactgcaacagcttcaacagcagaatctcaacctgcaacagtttgtgttggtgcatccaaccaccaatttgcagccagcgcagtttatcatctcacagacgccccagggccagcagggtctcctgcaagcgcaaaatcttctaacgcaactacctcagcaaagccaagccaacctcctacagtcgcagccaagcatcaccctcacctcccagccagcaaccccaacacgcacaatagcagcaaccccaattcagacacttccacagagccagtcaacaccaaagcgaattgatactcccagcttggaggagcccagtgaccttgaggagcttgagcagtttgccaagaccttcaaacaaagacgaatcaaacttggattcactcagggtgatgttgggctcgctatggggaaactatatggaaatgacttcagccaaactaccatctctcgatttgaagccttgaacctcagctttaagaacatgtgcaagttgaagccacttttagagaagtggctaaatgatgcagagaacctctcatctgattcgtccctctccagcccaagtgccctgaattctccaggaattgagggcttgagccgtaggaggaagaaacgcaccagcatagagaccaacatccgtgtggccttagagaagagtttcttggagaatcaaaagcctacctcggaagagatcactatgattgctgatcagctcaatatggaaaaagaggtgattcgtgtttggttctgtaaccgccgccagaaagaaaaaagaatcaacccaccaagcagtggtgggaccagcagctcacctattaaagcaattttccccagcccaacttcactggtggcgaccacaccaagccttgtgactagcagtgcagcaactaccctcacagtcagccctgtcctccctctgaccagtgctgctgtgacgaatctttcagttacaggcacttcagacaccacctccaacaacacagcaaccgtgatttccacagcgcctccagcttcctcagcagtcacgtccccctctctgagtccctccccttctgcctcagcctccacctccgaggcatccagtgccagtgagaccagcacaacacagaccacctccactcctttgtcctcccctcttgggaccagccaggtgatggtgacagcatcaggtttgcaaacagcagcagctgctgcccttcaaggagctgcacagttgccagcaaatgccagtcttgctgccatggcagctgctgcaggactaaacccaagcctgatggcaccctcacagtttgcggctggaggtgccttactcagtctgaatccagggaccctgagcggtgctctcagcccagctctaatgagcaacagtacactggcaactattcaagctcttgcttctggtggctctcttccaataacatcacttgatgcaactgggaacctggtatttgccaatgcgggaggagcccccaacatcgtgactgcccctctgttcctgaaccctcagaacctctctctgctcaccagcaaccctgttagcttggtctctgccgccgcagcatctgcagggaactctgcacctgtagccagccttcacgccacctccacctctgctgagtccatccagaactctctcttcacagtggcctctgccagcggggctgcgtccaccaccaccaccgcctccaaggcacagtgagctgggcagagctgggctgccagaagcctttttcactctgcagtgtgattggactgccagccaggttaataaactgaaaaatgtgattggcttcctctcgccgtgttgtgagggcaaaggagagaagggagaaaaaaaaaaaaaaaccacacacacccatacacacataccagaaaaagaaagaaaggatggagacggaacatttgcctaattttgtaataaaacactgtcttttcaggattgcttcatggattggagaactttctaaccaaaaattaaaaa

SEQ ID NO: 455676 - DNA, 2630 bp, Homo sapiens
ggctcactgcggcctcaaccttctgggttcaagcagtccttcccctctcagcccaagttgctgggactacaggcacacaaaccaatggtctggactttcagaagcagcctgtgcctgtaggaggagcaatctcaacagcccaggcgcaggctttccttggacatctccatcaggtccaactcgctggaacaagtttacaggctgctgctcagtctttaaatgtacagtctaaatctaatgaagaatcgggggattcgcagcagccaagccagccttcccagcagccttcagtgcaggcagccattccccagacccagcttatgctagctggaggacagataactgggcttactttgacgcctgcccagcaacagttactactccagcaggcacaggcacaggcacagctgctggctgctgcagtgcagcagcactccgccagccagcagcacagtgctgctggagccaccatctccgcctctgctgccacgcccatgacgcagatccccctgtctcagcccatacagatcgcacaggatcttcaacaactgcaacagcttcaacagcagaatctcaacctgcaacagtttgtgttggtgcatccaaccaccaatttgcagccagcgcagtttatcatctcacagacgccccagggccagcagggagggaagactgctataatagaaactacaaatttcgtctcctgcaagcgcaaaatcttctaacgcaactacctcagcaaagccaagccaacctcctacagtcgcagccaagcatcaccctcacctcccagatctggcccagtccagcctgaggtttctggagctggggtaacttatctgtaaccaccccatctaaagccagcaaccccaacacgcacaatagcagcaaccccaattcagacacttccacagagccagtcaacaccaaagcgaattgatactcccagcttggaggagcccagtgaccttgaggagcttgagcagtttgccaagaccttcaaacaaagacgaatcaaacttggattcactcagggtgatgttgggctcgctatggggaaactatatggaaatgacttcagccaaactaccatctctcgatttgaagccttgaacctcagctttaagaacatgtgcaagttgaagccacttttagagaagtggctaaatgatgcagagaacctctcatctgattcgtccctctccagcccaagtgccctgaattctccaggaattgagggcttgagccgtaggaggaagaaacgcaccagcatagagaccaacatccgtgtggccttagagaagagtttcttggagaatcaaaagcctacctcggaagagatcactatgattgctgatcagctcaatatggaaaaagaggtgattcgtgtttggttctgtaaccgccgccagaaagaaaaaagaatcaacccaccaagcagtggtgggaccagcagctcacctattaaagcaattttccccagcccaacttcactggtggcgaccacaccaagccttgtgactagcagtgcagcaactaccctcacagtcagccctgtcctccctctgaccagtgctgctgtgacgaatctttcagttacaggcacttcagacaccacctccaacaacacagcaaccgtgatttccacagcgcctccagcttcctcagcagtcacgtccccctctctgagtccctccccttctgcctcagcctccacctccgaggcatccagtgccagtgagaccagcacaacacagaccacctccactcctttgtcctcccctcttgggaccagccaggtgatggtgacagcatcaggtttgcaaacagcagcagctgctgcccttcaaggagctgcacagttgccagcaaatgccagtcttgctgccatggcagctgctgcaggactaaacccaagcctgatggcaccctcacagtttgcggctggaggtgccttactcagtctgaatccagggaccctgagcggtgctctcagcccagctctaatgagcaacagtacactggcaactattcaagctcttgcttctggtggctctcttccaataacatcacttgatgcaactgggaacctggtatttgccaatgcgggaggagcccccaacatcgtgactgcccctctgttcctgaaccctcagaacctctctctgctcaccagcaaccctgttagcttggtctctgccgccgcagcatctgcagggaactctgcacctgtagccagccttcacgccacctccacctctgctgagtccatccagaactctctcttcacagtggcctctgccagcggggctgcgtccaccaccaccaccgcctccaaggcacagtgagctgggcagagctgggctgccagaagcctttttcactctgcagtgtgattggactgccagccaggttaataaactgaaaaatgtgattggcttcctctcgccgtgttgtgagggcaaaggagagaagggagaaaaaaaaaaaaaaaccacacacacccatacacacataccagaaaaagaaagaaaggatggagacggaacatttgcctaattttgtaataaaacactgtcttttcaggattgcttcatggattggagaactttctaaccaaaaattaaaaa

SEQ ID NO: 455677 - DNA, 1475 bp, Homo sapiens
acaacacgcgcgacgcacacagcgaccgacgggcacacacaatgtgtctaggtacgaggcctgggtgttcacagcaatgctggactgcagtgactatgttctagactcaagaatgaacaatccgtcagaaaccagtaaaccatctatggagagtggagatggcaacacaggcacacaaaccaatggtctggactttcagaagcagcctgtgcctgtaggaggagcaatctcaacagcccaggcgcaggctttccttggacatctccatcaggtccaactcgctggaacaagtttacaggctgctgctcagtctttaaatgtacagtctaaatctaatgaagaatcgggggattcgcagcagccaagccagccttcccagcagccttcagtgcaggcagccattcctccctctgaccagtgctgctgtgacgaatctttcagttacaggcacttcagacaccacctccaacaacacagcaaccgtgatttccacagcgcctccagcttcctcagcagtcacgtccccctctctgagtccctccccttctgcctcagcctccacctccgaggcatccagtgccagtgagaccagcacaacacagaccacctccactcctttgtcctcccctcttgggaccagccaggtgatggtgacagcatcaggtttgcaaacagcagcagctgctgcccttcaaggagctgcacagttgccagcaaatgccagtcttgctgccatggcagctgctgcaggactaaacccaagcctgatggcaccctcacagtttgcggctggaggtgccttactcagtctgaatccagggaccctgagcggtgctctcagcccagctctaatgagcaacagtacactggcaactattcaagctcttgcttctggtggctctcttccaataacatcacttgatgcaactgggaacctggtatttgccaatgcgggaggagcccccaacatcgtgactgcccctctgttcctgaaccctcagaacctctctctgctcaccagcaaccctgttagcttggtctctgccgccgcagcatctgcagggaactctgcacctgtagccagccttcacgccacctccacctctgctgagtccatccagaactctctcttcacagtggcctctgccagcggggctgcgtccaccaccaccaccgcctccaaggcacagtgagctgggcagagctgggctgccagaagcctttttcactctgcagtgtgattggactgccagccaggttaataaactgaaaaatgtgattggcttcctctcgccgtgttgtgagggcaaaggagagaagggagaaaaaaaaaaaaaaaccacacacacccatacacacataccagaaaaagaaagaaaggatggagacggaacatttgcctaattttgtaataaaacactgtcttttcaggattgcttcatggattggagaactttctaaccaaaaattaaaaa

SEQ ID NO: 455678 - DNA, 1318 bp, Homo sapiens
agatggggaaaaaaatgtctttaaagcagtaatctctttgaagtgggctgttttgtgatcatacaaggactttgattatagttgagtttatgtttcttaacaccctgggaagggcagtagtcatacctttgtttccagatgaagacccaaaataccaggtcactaattaccttagtgacggggccaggaagaaagcctagaattcttgactcttattttccccattaaactctctcaactgcctacttcctaattctcaagcatagataagagatgtaataggagtctcaattttatactgttattgtcacacattataagaattatcttgtaaatatatctttttctctagaatgtttctttcattttggaaagaaagagaaataagtctttcaaagaagggtcaaaatgactataaaagttttacattttgtgctgatcataacctcgtttgtatgagtaagcatccaggaaagcagtaactgagaagcacaaaccatagaagagtaaagaaaaataaatatttccacctatttccccagctggattttcgttttgtaagttccttttggtgtgttgtcaaaatgagacctgcgtctgcatggtaataaagtgactcctcttttggacttgcagaggtgccttactcagtctgaatccagggaccctgagcggtgctctcagcccagctctaatgagcaacagtacactggcaactattcaagctcttgcttctggtggctctcttccaataacatcacttgatgcaactgggaacctggtatttgccaatgcgggaggagcccccaacatcgtgactgcccctctgttcctgaaccctcagaacctctctctgctcaccagcaaccctgttagcttggtctctgccgccgcagcatctgcagggaactctgcacctgtagccagccttcacgccacctccacctctgctgagtccatccagaactctctcttcacagtggcctctgccagcggggctgcgtccaccaccaccaccgcctccaaggcacagtgagctgggcagagctgggctgccagaagcctttttcactctgcagtgtgattggactgccagccaggttaataaactgaaaaatgtgattggcttcctctcgccgtgttgtgagggcaaaggagagaagggagaaaaaaaaaaaaaaaccacacacacccatacacacataccagaaaaagaaagaaaggatggagacggaacatttgcctaattttgtaataaaacactgtcttttcaggattgcttcatggattggagaactttctaaccaaaaattaaaaa

SEQ ID NO: 455679 - DNA, 909 bp, Homo sapiens
acaacacgcgcgacgcacacagcgaccgacgggcacacacaatgtgtctaggtacgaggcctgggtgttcacagcaatgctggactgcagtgactatgttctagactcaagaatgaacaatccgtcagaaaccagtaaaccatctatggagagtggagatggcaacacaggcacacaaaccaatggtctggactttcagaagcagcctgtgcctgtaggaggagcaatctcaacagcccaggcgcaggctttccttggacatctccatcaggtccaactcgctggaacaagtttacaggctgctgctcagtctttaaatgtacagtctaaatctaatgaagaatcgggggattcgcagcagccaagccagccttcccagcagccttcagtgcaggcagccattccccagacccagcttatgctagctggaggacagataactgggcttactttgacgcctgcccagcaacagttactactccagcaggcacaggcacaggcacagctgctggctgctgcagtgcagcagcactccgccagccagcagcacagtgctgctggagccaccatctccgcctctgctgccacgcccatgacgcagatccccctgtctcagcccatacagatcgcacaggatcttcaacaactgcaacagcttcaacagcagaatctcaacctgcaacagtttgtgttggtgcatccaaccaccaatttgcagccagcgcagtttatcatctcacagacgccccagggccagcagggtctctgcaagcgcaaatcttctaacgcaataactcagaaagcaagccaacttctaaagtcggcagcaaggattaccttaactccagcaagaaaccaaaagaaatagggtacccaattgacttcccgagcagcaccaaggatggtccc

SEQ ID NO: 455680 - DNA, 2596 bp, Homo sapiens
aaaaatattcaaaatggcggacggaggagcagcgagtcaagatgagagttcagccgcggcggcagcagcagcagactcaagaatgaacaatccgtcagaaaccagtaaaccatctatggagagtggagatggcaacacaggcacacaaaccaatggtctggactttcagaagcagcctgtgcctgtaggaggagcaatctcaacagcccaggcgcaggctttccttggacatctccatcaggtccaactcgctggaacaagtttacaggctgctgctcagtctttaaatgtacagtctaaatctaatgaagaatcgggggattcgcagcagccaagccagccttcccagcagccttcagtgcaggcagccattccccagacccagcttatgctagctggaggacagataactgggcttactttgacgcctgcccagcaacagttactactccagcaggcacaggcacaggcacagctgctggctgctgcagtgcagcagcactccgccagccagcagcacagtgctgctggagccaccatctccgcctctgctgccacgcccatgacgcagatccccctgtctcagcccatacagatcgcacaggatcttcaacaactgcaacagcttcaacagcagaatctcaacctgcaacagtttgtgttggtgcatccaaccaccaatttgcagccagcgcagtttatcatctcacagacgccccagggccagcagggtctcctgcaagcgcaaaatcttctaacgcaactacctcagcaaagccaagccaacctcctacagtcgcagccaagcatcaccctcacctcccagccagcaaccccaacacgcacaatagcagcaaccccaattcagacacttccacagagccagtcaacaccaaagcgaattgatactcccagcttggaggagcccagtgaccttgaggagcttgagcagtttgccaagaccttcaaacaaagacgaatcaaacttggattcactcagggtgatgttgggctcgctatggggaaactatatggaaatgacttcagccaaactaccatctctcgatttgaagccttgaacctcagctttaagaacatgtgcaagttgaagccacttttagagaagtggctaaatgatgcagagaacctctcatctgattcgtccctctccagcccaagtgccctgaattctccaggaattgagggcttgagccgtaggaggaagaaacgcaccagcatagagaccaacatccgtgtggccttagagaagagtttcttggagaatcaaaagcctacctcggaagagatcactatgattgctgatcagctcaatatggaaaaagaggtgattcgtgtttggttctgtaaccgccgccagaaagaaaaaagaatcaacccaccaagcagtggtgggaccagcagctcacctattaaagcaattttccccagcccaacttcactggtggcgaccacaccaagccttgtgactagcagtgcagcaactaccctcacagtcagccctgtcctccctctgaccagtgctgctgtgacgaatctttcagttacaggcacttcagacaccacctccaacaacacagcaaccgtgatttccacagcgcctccagcttcctcagcagtcacgtccccctctctgagtccctccccttctgcctcagcctccacctccgaggcatccagtgccagtgagaccagcacaacacagaccacctccactcctttgtcctcccctcttgggaccagccaggtgatggtgacagcatcaggtttgcaaacagcagcagctgctgcccttcaaggagctgcacagttgccagcaaatgccagtcttgctgccatggcagctgctgcaggactaaacccaagcctgatggcaccctcacagtttgcggctggaggtgccttactcagtctgaatccagggaccctgagcggtgctctcagcccagctctaatgagcaacagtacactggcaactattcaagctcttgcttctggtggctctcttccaataacatcacttgatgcaactgggaacctggtatttgccaatgcgggaggagcccccaacatcgtgactgcccctctgttcctgaaccctcagaacctctctctgctcaccagcaaccctgttagcttggtctctgccgccgcagcatctgcagggaactctgcacctgtagccagccttcacgccacctccacctctgctgagtccatccagaactctctcttcacagtggcctctgccagcggggctgcgtccaccaccaccaccgcctccaaggcacagtgagctgggcagagctgggctgccagaagcctttttcactctgcagtgtgattggactgccagccaggttaataaactgaaaaatgtgattggcttcctctcgccgtgttgtgagggcaaaggagagaagggagaaaaaaaaaaaaaaaccacacacacccatacacacataccagaaaaagaaagaaaggatggagacggaacatttgcctaattttgtaataaaacactgtcttttcaggattgcttcatggattggagaactttctaaccaaaaattaaaaa

SEQ ID NO: 455681 - DNA, 2218 bp, Homo sapiens
gaagtttccttattcagttgaagattgctatggtgtaacagaagttgtattttgcttttccccttaatccactttccaccctacgcaacccccctcttttcgcttaagaacatactgtagatttgttagaaatagtagtaccttctttccccaccccaaactgctacctgtttcttccttgtttggactctctgctcctctagaagatttcacagcaatgctggactgcagtgactatgttctagactcaagaatgaacaatccgtcagaaaccagtaaaccatctatggagagtggagatggcaacacaggcacacaaaccaatggtctggactttcagaagcagcctgtgcctgtaggaggagcaatctcaacagcccaggcgcaggctttccttggacatctccatcaggtccaactcgctggaacaagtttacaggctgctgctcagtctttaaatgtacagtctaaatctaatgaagaatcgggggattcgcagcagccaagccagccttcccagcagccttcagtgcaggcagccattccccagacccagcttatgctagctggaggacagataactgggcttactttgacgcctgcccagcaacagttactactccagcaggcacaggcacaggcacagctgctggctgctgcagtgcagcagcactccgccagccagcagcacagtgctgctggagccaccatctccgcctctgctgccacgcccatgacgcagatccccctgtctcagcccatacagatcgcacaggatcttcaacaactgcaacagcttcaacagcagaatctcaacctgcaacagtttgtgttggtgcatccaaccaccaatttgcagccagcgcagtttatcatctcacagacgccccagggccagcagggtctcctgcaagcgcaaaatcttctaacgcaactacctcagcaaagccaagccaacctcctacagtcgcagccaagcatcaccctcacctcccagccagcaaccccaacacgcacaatagcagcaaccccaattcagacacttccacagagccagtcaacaccaaagcgaattgatactcccagcttggaggagcccagtgaccttgaggagcttgagcagtttgccaagaccttcaaacaaagacgaatcaaacttggattcactcagggtgatgttgggctcgctatggggaaactatatggaaatgacttcagccaaactaccatctctcgatttgaagccttgaacctcagctttaagaacatgtgcaagttgaagccacttttagagaagtggctaaatgatgcagagaacctctcatctgattcgtccctctccagcccaagtgccctgaattctccaggaattgagggcttgagccgtaggaggaagaaacgcaccagcatagagaccaacatccgtgtggccttagagaagagtttcttggagaatcaaaagcctacctcggaagagatcactatgattgctgatcagctcaatatggaaaaagaggtgattcgtgtttggttctgtaaccgccgccagaaagaaaaaagaatcaacccaccaagcagtggtgggaccagcagctcacctattaaagcaattttccccagcccaacttcactggtggcgaccacaccaagccttgtgactagcagtgcagcaactaccctcacagtcagccctgtcctccctctgaccagtgctgctgtgacgaatctttcagttacaggcacttcagacaccacctccaacaacacagcaaccgtgatttccacagcgcctccagcttcctcagcagtcacgtccccctctctgagtccctccccttctgcctcagcctccacctccgaggcatccagtgccagtgagaccagcacaacacagaccacctccactcctttgtcctcccctcttgggaccagccaggtgatggtgacagcatcaggtttgcaaacagcagcagctgctgcccttcaaggagctgcacagttgccagcaaatgccagtcttgctgccatggcagctgctgcaggactaaacccaagcctgatggcaccctcacagtttgcggctggaggtgccttactcagtctgaatccagggaccctgagcggtgctctcagcccagctctaatgagcaacagtacactggcaactattcaaggattgcttcatggattggagaactttctaaccaaaaattaaaaa

SEQ ID NO: 455682 - DNA, 1879 bp, Homo sapiens
gaagtttccttattcagttgaagattgctatggtgtaacagaagttgtattttgcttttccccttaatccactttccaccctacgcaacccccctcttttcgcttaagaacatactgtagatttgttagaaatagtagtaccttctttccccaccccaaactgctacctgtttcttccttgtttggactctctgctcctctagaagatttcacagcaatgctggactgcagtgactatgttctagactcaagaatgaacaatccgtcagaaaccagtaaaccatctatggagagtggagatggcaacacaggcacacaaaccaatggtctggactttcagaagcagcctgtgcctgtaggaggagcaatctcaacagcccaggcgcaggctttccttggacatctccatcaggtccaactcgctggaacaagtttacaggctgctgctcagtctttaaatgtacagtctaaatctaatgaagaatcgggggattcgcagcagccaagccagccttcccagcagccttcagtgcaggcagccattccccagacccagcttatgctagctggaggacagataactgggcttactttgacgcctgcccagcaacagttactactccagcaggcacaggcacaggcacagctgctggctgctgcagtgcagcagcactccgccagccagcagcacagtgctgctggagccaccatctccgcctctgctgccacgcccatgacgcagatccccctgtctcagcccatacagatcgcacaggatcttcaacaactgcaacagcttcaacagcagaatctcaacctgcaacagtttgtgttggtgcatccaaccaccaatttgcagccagcgcagtttatcatctcacagacgccccagggccagcagggtctcctgcaagcgcaaaatcttctaacgcaactacctcagcaaagccaagccaacctcctacagtcgcagccaagcatcaccctcacctcccagccagcaaccccaacacgcacaatagcagcaaccccaattcagacacttccacagagccagtcaacaccaaagcgaattgatactcccagcttggaggagcccagtgaccttgaggagcttgagcagtttgccaagaccttcaaacaaagacgaatcaaacttggattcactcagggtgatgttgggctcgctatggggaaactatatggaaatgacttcagccaaactaccatctctcgatttgaagccttgaacctcagctttaagaacatgtgcaagttgaagccacttttagagaagtggctaaatgatgcagagaacctctcatctgattcgtccctctccagcccaagtgccctgaattctccaggaattgagggcttgagccgtaggaggaagaaacgcaccagcatagagaccaacatccgtgtggccttagagaagagtttcttggagaatcaaaagcctacctcggaagagatcactatgattgctgatcagctcaatatggaaaaagaggtgattcgtgtttggttctgtaaccgccgccagaaagaaaaaagaatcaacccaccaagcagtggtgggaccagcagctcacctattaaagcaattttccccagcccaacttcactggtggcgaccacaccaagccttgtgactagcagtgcagcaactaccctcacagtcagccctgtcctccctctgaccagtgctgctgtgacgaatctttcagttacaggcacttcagacaccacctccaacaacacataggaatgctggaccagggtaccagattttttcaacaaagggggtgaagtgtcctactaaaaagaataaatgttggcagtgaattaaccaatttttcaaataaaaaaaaaa

SEQ ID NO: 455683 - DNA, 2291 bp, Homo sapiens
acggcaggtacaggctgggtggaatcgcgtaagaaggtgtccctcagcatttactagtagccatgctatgaaagagtgtaagtgaaagtagtaacagggtattatttgatgcctgaccaagaattagttatactcgagaagatcatggcagcggagcgtcacctatggtgaggtggtagtaaattgcacgataagtcaggtaaaccatgaataaaggaatcgttgaagccaccatctccgcctctgctgccacgcccatgacgcagatccccctgtctcagcccatacagatcgcacaggatcttcaacaactgcaacagcttcaacagcagaatctcaacctgcaacagtttgtgttggtgcatccaaccaccaatttgcagccagcgcagtttatcatctcacagacgccccagggccagcagggtctcctgcaagcgcaaaatcttctaacgcaactacctcagcaaagccaagccaacctcctacagtcgcagccaagcatcaccctcacctcccagccagcaaccccaacacgcacaatagcagcaaccccaattcagacacttccacagagccagtcaacaccaaagcgaattgatactcccagcttggaggagcccagtgaccttgaggagcttgagcagtttgccaagaccttcaaacaaagacgaatcaaacttggattcactcagggtgatgttgggctcgctatggggaaactatatggaaatgacttcagccaaactaccatctctcgatttgaagccttgaacctcagctttaagaacatgtgcaagttgaagccacttttagagaagtggctaaatgatgcagagaacctctcatctgattcgtccctctccagcccaagtgccctgaattctccaggaattgagggcttgagccgtaggaggaagaaacgcaccagcatagagaccaacatccgtgtggccttagagaagagtttcttggagaatcaaaagcctacctcggaagagatcactatgattgctgatcagctcaatatggaaaaagaggtgattcgtgtttggttctgtaaccgccgccagaaagaaaaaagaatcaacccaccaagcagtggtgggaccagcagctcacctattaaagcaattttccccagcccaacttcactggtggcgaccacaccaagccttgtgactagcagtgcagcaactaccctcacagtcagccctgtcctccctctgaccagtgctgctgtgacgaatctttcagttacaggcacttcagacaccacctccaacaacacagcaaccgtgatttccacagcgcctccagcttcctcagcagtcacgtccccctctctgagtccctccccttctgcctcagcctccacctccgaggcatccagtgccagtgagaccagcacaacacagaccacctccactcctttgtcctcccctcttgggaccagccaggtgatggtgacagcatcaggtttgcaaacagcagcagctgctgcccttcaaggagctgcacagttgccagcaaatgccagtcttgctgccatggcagctgctgcaggactaaacccaagcctgatggcaccctcacagtttgcggctggaggtgccttactcagtctgaatccagggaccctgagcggtgctctcagcccagctctaatgagcaacagtacactggcaactattcaagctcttgcttctggtggctctcttccaataacatcacttgatgcaactgggaacctggtatttgccaatgcgggaggagcccccaacatcgtgactgcccctctgttcctgaaccctcagaacctctctctgctcaccagcaaccctgttagcttggtctctgccgccgcagcatctgcagggaactctgcacctgtagccagccttcacgccacctccacctctgctgagtccatccagaactctctcttcacagtggcctctgccagcggggctgcgtccaccaccaccaccgcctccaaggcacagtgagctgggcagagctgggctgccagaagcctttttcactctgcagtgtgattggactgccagccaggttaataaactgaaaaatgtgattggcttcctctcgccgtgttgtgagggcaaaggagagaagggagaaaaaaaaaaaaaaaccacacacacccatacacacataccagaaaaagaaagaaaggatggagacggaacatttgcctaattttgtaataaaacactgtcttttcaggattgcttcatggattggagaactttctaaccaaaaattaaaaa

SEQ ID NO: 455684 - DNA, 1561 bp, Homo sapiens
gaagtttccttattcagttgaagattgctatggtgtaacagaagttgtattttgcttttccccttaatccactttccaccctacgcaacccccctcttttcgcttaagaacatactgtagatttgttagaaatagtagtaccttctttccccaccccaaactgctacctgtttcttccttgtttggactctctgctcctctagaagatttcacagcaatgctggactgcagtgactatgttctagactcaagaatgaacaatccgtcagaaaccagtaaaccatctatggagagtggagatggcaacacaggcacacaaaccaatggtctggactttcagaagcagcctgtgcctgtaggaggagcaatctcaacagcccaggcgcaggctttccttggacatctccatcaggtccaactcgctggaacaagtttacaggctgctgctcagtctttaaatgtacagtctaaatctaatgaagaatcgggggattcgcagcagccaagccagccttcccagcagccttcagtgcaggcagccattccccagacccagcttatgctagctggaggacagataactgggcttactttgacgcctgcccagcaacagttactactccagcaggcacaggcacaggcacagctgctggctgctgcagtgcagcagcactccgccagccagcagcacagtgctgctggagccaccatctccgcctctgctgccacgcccatgacgcagatccccctgtctcagcccatacagatcgcacaggatcttcaacaactgcaacagcttcaacagcagaatctcaacctgcaacagtttgtgttggtgcatccaaccaccaatttgcagccagcgcagtttatcatctcacagacgccccagggccagcagggtctcctgcaagcgcaaaatcttctaacgcaactacctcagcaaagccaagccaacctcctacagtcgcagccaagcatcaccctcacctcccagccagcaaccccaacacgcacaatagcagcaaccccaattcagacacttccacagagccagtcaacaccaaagcgaattgatactcccagcttggaggagcccagtgaccttgaggagcttgagcagtttgccaagaccttcaaacaaagacgaatcaaacttggattcactcagcttcacgccacctccacctctgctgagtccatccagaactctctcttcacagtggcctctgccagcggggctgcgtccaccaccaccaccgcctccaaggcacagtgagctgggcagagctgggctgccagaagcctttttcactctgcagtgtgattggactgccagccaggttaataaactgaaaaatgtgattggcttcctctcgccgtgttgtgagggcaaaggagagaagggagaaaaaaaaaaaaaaaccacacacacccatacacacataccagaaaaagaaagaaaggatggagacggaacatttgcctaattttgtaataaaacactgtcttttcaggattgcttcatggattggagaactttctaaccaaaaattaaaaa

SEQ ID NO: 455685 - DNA, 532 bp, Homo sapiens
ttattggcagtccaggttcccgttgcatcacgtgatgttattggaagagagccaccagaacctctctctgctcaccagcaaccctgttagcttggtctctgccgccgcagcatctgcagggaactctgcacctgtagccagccttcacgccacctccacctctgctgagtccatccagaactctctcttcacagtggcctctgccagcggggctgcgtccaccaccaccaccgcctccaaggcacagtgagctgggcagagctgggctgccagaagcctttttcactctgcagtgtgattggactgccagccaggttaataaactgaaaaatgtgattggcttcctctcgccgtgttgtgagggcaaaggagagaagggagaaaaaaaaaaaaaaaccacacacacccatacacacataccagaaaaagaaagaaaggatggagacggaacatttgcctaattttgtaataaaacactgtcttttcaggattgcttcatggattggagaactttctaaccaaaaattaaaaa

SEQ ID NO: 455686 - DNA, 2620 bp, Homo sapiens
acttgtcatggcgactgtccagctttgtgccaggagcctcgcaggggttgatgggattggggttttcccctcccatgtgctcaagactggcgctaaaagttttgagcttctcaaaagtctagagccaccgtccagggagcaggtagctgctgggctccggggacactttgcgttcgggctgggagcgtgctttccacgacggtgacacgcttccctggattggcagccagactgccttccgggtcactgccatggaggagccgcagtcagatcctagcgtcgagccccctctgagtcaggaaacattttcagacctatggaaactacttcctgaaaacaacgttctgtcccccttgccgtcccaagcaatggatgatttgatgctgtccccggacgatattgaacaatggttcactgaagacccaggtccagatgaagctcccagaatgccagaggctgctccccgcgtggcccctgcaccagcagctcctacaccggcggcccctgcaccagccccctcctggcccctgtcatcttctgtcccttcccagaaaacctaccagggcagctacggtttccgtctgggcttcttgcattctgggacagccaagtctgtgacttgcacgtactcccctgccctcaacaagatgttttgccaactggccaagacctgccctgtgcagctgtgggttgattccacacccccgcccggcacccgcgtccgcgccatggccatctacaagcagtcacagcacatgacggaggttgtgaggcgctgcccccaccatgagcgctgctcagatagcgatggtctggcccctcctcagcatcttatccgagtggaaggaaatttgcgtgtggagtatttggatgacagaaacacttttcgacatagtgtggtggtgccctatgagccgcctgaggttggctctgactgtaccaccatccactacaactacatgtgtaacagttcctgcatgggcggcatgaaccggaggcccatcctcaccatcatcacactggaagactccagtggtaatctactgggacggaacagctttgaggtgcgtgtttgtgcctgtcctgggagagaccggcgcacagaggaagagaatctccgcaagaaaggggagcctcaccacgagctgcccccagggagcactaagcgagcactgcccaacaacaccagctcctctccccagccaaagaagaaaccactggatggagaatatttcacccttcagatccgtgggcgtgagcgcttcgagatgttccgagagctgaatgaggccttggaactcaaggatgcccaggctgggaaggagccaggggggagcagggctcactccagccacctgaagtccaaaaagggtcagtctacctcccgccataaaaaactcatgttcaagacagaagggcctgactcagactgacattctccacttcttgttccccactgacagcctcccacccccatctctccctcccctgccattttgggttttgggtctttgaacccttgcttgcaataggtgtgcgtcagaagcacccaggacttccatttgctttgtcccggggctccactgaacaagttggcctgcactggtgttttgttgtggggaggaggatggggagtaggacataccagcttagattttaaggtttttactgtgagggatgtttgggagatgtaagaaatgttcttgcagttaagggttagtttacaatcagccacattctaggtaggggcccacttcaccgtactaaccagggaagctgtccctcactgttgaattttctctaacttcaaggcccatatctgtgaaatgctggcatttgcacctacctcacagagtgcattgtgagggttaatgaaataatgtacatctggccttgaaaccaccttttattacatggggtctagaacttgacccccttgagggtgcttgttccctctccctgttggtcggtgggttggtagtttctacagttgggcagctggttaggtagagggagttgtcaagtctctgctggcccagccaaaccctgtctgacaacctcttggtgaaccttagtacctaaaaggaaatctcaccccatcccacaccctggaggatttcatctcttgtatatgatgatctggatccaccaagacttgttttatgctcagggtcaatttcttttttctttttttttttttttttctttttctttgagactgggtctcgctttgttgcccaggctggagtggagtggcgtgatcttggcttactgcagcctttgcctccccggctcgagcagtcctgcctcagcctccggagtagctgggaccacaggttcatgccaccatggccagccaacttttgcatgttttgtagagatggggtctcacagtgttgcccaggctggtctcaaactcctgggctcaggcgatccacctgtctcagcctcccagagtgctgggattacaattgtgagccaccacgtccagctggaagggtcaacatcttttacattctgcaagcacatctgcattttcaccccacccttcccctccttctccctttttatatcccatttttatatcgatctcttattttacaataaaactttgctgcca

SEQ ID NO: 455687 - DNA, 302 bp, Homo sapiens
ttgggaggccgaggtgggtggatcacctgaggtcaggagttcaacaccagcctggccaacatggtgaaaccccatctctactaaaaatacaaaattagccgggcgtagtggcgggcgcctgtaatcccacctcccagagtgctgggattacaattgtgagccaccacgtccagctggaagggtcaacatcttttacattctgcaagcacatctgcattttcaccccacccttcccctccttctccctttttatatcccatttttatatcgatctcttattttacaataaaactttgctgcca

SEQ ID NO: 455688 - DNA, 2065 bp, Homo sapiens
gtgttcagagtatcccgatggccgtcggggcgtcttgcgatcgtgggacagccaagtctgtgacttgcacgtactcccctgccctcaacaagatgttttgccaactggccaagacctgccctgtgcagctgtgggttgattccacacccccgcccggcacccgcgtccgcgccatggccatctacaagcagtcacagcacatgacggaggttgtgaggcgctgcccccaccatgagcgctgctcagatagcgatggtctggcccctcctcagcatcttatccgagtggaaggaaatttgcgtgtggagtatttggatgacagaaacacttttcgacatagtgtggtggtgccctatgagccgcctgaggttggctctgactgtaccaccatccactacaactacatgtgtaacagttcctgcatgggcggcatgaaccggaggcccatcctcaccatcatcacactggaagactccagtggtaatctactgggacggaacagctttgaggtgcgtgtttgtgcctgtcctgggagagaccggcgcacagaggaagagaatctccgcaagaaaggggagcctcaccacgagctgcccccagggagcactaagcgagcactgcccaacaacaccagctcctctccccagccaaagaagaaaccactggatggagaatatttcacccttcagatccgtgggcgtgagcgcttcgagatgttccgagagctgaatgaggccttggaactcaaggatgcccaggctgggaaggagccaggggggagcagggctcactccagccacctgaagtccaaaaagggtcagtctacctcccgccataaaaaactcatgttcaagacagaagggcctgactcagactgacattctccacttcttgttccccactgacagcctcccacccccatctctccctcccctgccattttgggttttgggtctttgaacccttgcttgcaataggtgtgcgtcagaagcacccaggacttccatttgctttgtcccggggctccactgaacaagttggcctgcactggtgttttgttgtggggaggaggatggggagtaggacataccagcttagattttaaggtttttactgtgagggatgtttgggagatgtaagaaatgttcttgcagttaagggttagtttacaatcagccacattctaggtaggggcccacttcaccgtactaaccagggaagctgtccctcactgttgaattttctctaacttcaaggcccatatctgtgaaatgctggcatttgcacctacctcacagagtgcattgtgagggttaatgaaataatgtacatctggccttgaaaccaccttttattacatggggtctagaacttgacccccttgagggtgcttgttccctctccctgttggtcggtgggttggtagtttctacagttgggcagctggttaggtagagggagttgtcaagtctctgctggcccagccaaaccctgtctgacaacctcttggtgaaccttagtacctaaaaggaaatctcaccccatcccacaccctggaggatttcatctcttgtatatgatgatctggatccaccaagacttgttttatgctcagggtcaatttcttttttctttttttttttttttttctttttctttgagactgggtctcgctttgttgcccaggctggagtggagtggcgtgatcttggcttactgcagcctttgcctccccggctcgagcagtcctgcctcagcctccggagtagctgggaccacaggttcatgccaccatggccagccaacttttgcatgttttgtagagatggggtctcacagtgttgcccaggctggtctcaaactcctgggctcaggcgatccacctgtctcagcctcccagagtgctgggattacaattgtgagccaccacgtccagctggaagggtcaacatcttttacattctgcaagcacatctgcattttcaccccacccttcccctccttctccctttttatatcccatttttatatcgatctcttattttacaataaaactttgctgcca

SEQ ID NO: 455689 - DNA, 1409 bp, Homo sapiens
acttgtcatggcgactgtccagctttgtgccaggagcctcgcaggggttgatgggattggggttttcccctcccatgtgctcaagactggcgctaaaagttttgagcttctcaaaagtctagagccaccgtccagggagcaggtagctgctgggctccggggacactttgcgttcgggctgggagcgtgctttccacgacggtgacacgcttccctggattggcagccagactgccttccgggtcactgccatggaggagccgcagtcagatcctagcgtcgagccccctctgagtcaggaaacattttcagacctatggaaactacttcctgaaaacaacgttctgtcccccttgccgtcccaagcaatggatgatttgatgctgtccccggacgatattgaacaatggttcactgaagacccaggtccagatgaagctcccagaatgccagaggctgctccccgcgtggcccctgcaccagcagctcctacaccggcggcccctgcaccagccccctcctggcccctgtcatcttctgtcccttcccagaaaacctaccagggcagctacggtttccgtctgggcttcttgcattctgggacagccaagtctgtgacttgcacgtactcccctgccctcaacaagatgttttgccaactggccaagacctgccctgtgcagctgtgggttgattccacacccccgcccggcacccgcgtccgcgccatggccatctacaagcagtcacagcacatgacggaggttgtgaggcgctgcccccaccatgagcgctgctcagatagcgatggtctggcccctcctcagcatcttatccgagtggaaggaaatttgcgtgtggagtatttggatgacagaaacacttttcgacatagtgtggtggtgccctatgagccgcctgaggttggctctgactgtaccaccatccactacaactacatgtgtaacagttcctgcatgggcggcatgaaccggaggcccatcctcaccatcatcacactggaagactccagtggtaatctactgggacggaacagctttgaggtgcgtgtttgtgcctgtcctgggagagaccggcgcacagaggaagagaatctccgcaagaaaggggagcctcaccacgagctgcccccagggagcactaagcgagcactgcccaacaacaccagctcctctccccagccaaagaagaaaccactggatggagaatatttcacccttcagatccgtgggcgtgagcgcttcgagatgttccgagagctgaatgaggccttggaactcaaggatgcccaggctgggaaggagccaggggggagcagggctcactccagccacatgaagtccacaaagggtcagtctaggtaccgagcatgaattgtatgtacatag

SEQ ID NO: 455690 - DNA, 1725 bp, Homo sapiens
ccctcacaatcaattgcttaaaatgtttctagaaattcctggtatcacttaaaaatagcttccgttttgtgctctagaaggttattgttgctgagtgccagcagctacattttagaattaaggcaggtttggccagattggtgtgcagtgtggagatgaagaatcccacccctgcaagacggagccacataagaagccagcctgggcaacaagagtgaaactccgtctcaaaaaagataaataaagtaaaatggggtaagggaagattacgagactaatacacactaatactctgaggtgctcagtaaacatatttgcatggggtgtggccaccatcttgatttgaattcccgttgtcccagccttaggcccttcaaagcattggtcagggaaaaggggcacagaccctctcactcatgtgatgtcatctctcctccctgcttctgtctcctacagccacctgaagtccaaaaagggtcagtctacctcccgccataaaaaactcatgttcaagacagaagggcctgactcagactgacattctccacttcttgttccccactgacagcctcccacccccatctctccctcccctgccattttgggttttgggtctttgaacccttgcttgcaataggtgtgcgtcagaagcacccaggacttccatttgctttgtcccggggctccactgaacaagttggcctgcactggtgttttgttgtggggaggaggatggggagtaggacataccagcttagattttaaggtttttactgtgagggatgtttgggagatgtaagaaatgttcttgcagttaagggttagtttacaatcagccacattctaggtaggggcccacttcaccgtactaaccagggaagctgtccctcactgttgaattttctctaacttcaaggcccatatctgtgaaatgctggcatttgcacctacctcacagagtgcattgtgagggttaatgaaataatgtacatctggccttgaaaccaccttttattacatggggtctagaacttgacccccttgagggtgcttgttccctctccctgttggtcggtgggttggtagtttctacagttgggcagctggttaggtagagggagttgtcaagtctctgctggcccagccaaaccctgtctgacaacctcttggtgaaccttagtacctaaaaggaaatctcaccccatcccacaccctggaggatttcatctcttgtatatgatgatctggatccaccaagacttgttttatgctcagggtcaatttcttttttctttttttttttttttttctttttctttgagactgggtctcgctttgttgcccaggctggagtggagtggcgtgatcttggcttactgcagcctttgcctccccggctcgagcagtcctgcctcagcctccggagtagctgggaccacaggttcatgccaccatggccagccaacttttgcatgttttgtagagatggggtctcacagtgttgcccaggctggtctcaaactcctgggctcaggcgatccacctgtctcagcctcccagagtgctgggattacaattgtgagccaccacgtccagctggaagggtcaacatcttttacattctgcaagcacatctgcattttcaccccacccttcccctccttctccctttttatatcccatttttatatcgatctcttattttacaataaaactttgctgcca

SEQ ID NO: 455691 - DNA, 2507 bp, Homo sapiens
aatgcagggctgaggagtgtccgaagagaatgggcaggtgagcggtgagacagttgttcttccagaagctttgcagtgaaaggaatcaaagaaatggagccgtgtatcagcagccagactgccttccgggtcactgccatggaggagccgcagtcagatcctagcgtcgagccccctctgagtcaggaaacattttcagacctatggaaactacttcctgaaaacaacgttctgtcccccttgccgtcccaagcaatggatgatttgatgctgtccccggacgatattgaacaatggttcactgaagacccaggtccagatgaagctcccagaatgccagaggctgctccccgcgtggcccctgcaccagcagctcctacaccggcggcccctgcaccagccccctcctggcccctgtcatcttctgtcccttcccagaaaacctaccagggcagctacggtttccgtctgggcttcttgcattctgggacagccaagtctgtgacttgcacgtactcccctgccctcaacaagatgttttgccaactggccaagacctgccctgtgcagctgtgggttgattccacacccccgcccggcacccgcgtccgcgccatggccatctacaagcagtcacagcacatgacggaggttgtgaggcgctgcccccaccatgagcgctgctcagatagcgatggtctggcccctcctcagcatcttatccgagtggaaggaaatttgcgtgtggagtatttggatgacagaaacacttttcgacatagtgtggtggtgccctatgagccgcctgaggttggctctgactgtaccaccatccactacaactacatgtgtaacagttcctgcatgggcggcatgaaccggaggcccatcctcaccatcatcacactggaagactccagtggtaatctactgggacggaacagctttgaggtgcgtgtttgtgcctgtcctgggagagaccggcgcacagaggaagagaatctccgcaagaaaggggagcctcaccacgagctgcccccagggagcactaagcgagcactgcccaacaacaccagctcctctccccagccaaagaagaaaccactggatggagaatatttcacccttcagatccgtgggcgtgagcgcttcgagatgttccgagagctgaatgaggccttggaactcaaggatgcccaggctgggaaggagccaggggggagcagggctcactccagccacctgaagtccaaaaagggtcagtctacctcccgccataaaaaactcatgttcaagacagaagggcctgactcagactgacattctccacttcttgttccccactgacagcctcccacccccatctctccctcccctgccattttgggttttgggtctttgaacccttgcttgcaataggtgtgcgtcagaagcacccaggacttccatttgctttgtcccggggctccactgaacaagttggcctgcactggtgttttgttgtggggaggaggatggggagtaggacataccagcttagattttaaggtttttactgtgagggatgtttgggagatgtaagaaatgttcttgcagttaagggttagtttacaatcagccacattctaggtaggggcccacttcaccgtactaaccagggaagctgtccctcactgttgaattttctctaacttcaaggcccatatctgtgaaatgctggcatttgcacctacctcacagagtgcattgtgagggttaatgaaataatgtacatctggccttgaaaccaccttttattacatggggtctagaacttgacccccttgagggtgcttgttccctctccctgttggtcggtgggttggtagtttctacagttgggcagctggttaggtagagggagttgtcaagtctctgctggcccagccaaaccctgtctgacaacctcttggtgaaccttagtacctaaaaggaaatctcaccccatcccacaccctggaggatttcatctcttgtatatgatgatctggatccaccaagacttgttttatgctcagggtcaatttcttttttctttttttttttttttttctttttctttgagactgggtctcgctttgttgcccaggctggagtggagtggcgtgatcttggcttactgcagcctttgcctccccggctcgagcagtcctgcctcagcctccggagtagctgggaccacaggttcatgccaccatggccagccaacttttgcatgttttgtagagatggggtctcacagtgttgcccaggctggtctcaaactcctgggctcaggcgatccacctgtctcagcctcccagagtgctgggattacaattgtgagccaccacgtccagctggaagggtcaacatcttttacattctgcaagcacatctgcattttcaccccacccttcccctccttctccctttttatatcccatttttatatcgatctcttattttacaataaaactttgctgcca

SEQ ID NO: 455692 - DNA, 1304 bp, Homo sapiens
acttgtcatggcgactgtccagctttgtgccaggagcctcgcaggggttgatgggattggggttttcccctcccatgtgctcaagactggcgctaaaagttttgagcttctcaaaagtctagagccaccgtccagggagcaggtagctgctgggctccggggacactttgcgttcgggctgggagcgtgctttccacgacggtgacacgcttccctggattggcagccagactgccttccgggtcactgccatggaggagccgcagtcagatcctagcgtcgagccccctctgagtcaggaaacattttcagacctatggaaactacttcctgaaaacaacgttctgtcccccttgccgtcccaagcaatggatgatttgatgctgtccccggacgatattgaacaatggttcactgaagacccaggtccagatgaagctcccagaatgccagaggctgctccccgcgtggcccctgcaccagcagctcctacaccggcggcccctgcaccagccccctcctggcccctgtcatcttctgtcccttcccagaaaacctaccagggcagctacggtttccgtctgggcttcttgcattctgggacagccaagtctgtgacttgcacgtactcccctgccctcaacaagatgttttgccaactggccaagacctgccctgtgcagctgtgggttgattccacacccccgcccggcacccgcgtccgcgccatggccatctacaagcagtcacagcacatgacggaggttgtgaggcgctgcccccaccatgagcgctgctcagatagcgatggtctggcccctcctcagcatcttatccgagtggaaggaaatttgcgtgtggagtatttggatgacagaaacacttttcgacatagtgtggtggtgccctatgagccgcctgaggttggctctgactgtaccaccatccactacaactacatgtgtaacagttcctgcatgggcggcatgaaccggaggcccatcctcaccatcatcacactggaagactccagtggtaatctactgggacggaacagctttgaggtgcgtgtttgtgcctgtcctgggagagaccggcgcacagaggaagagaatctccgcaagaaaggggagcctcaccacgagctgcccccagggagcactaagcgagcactgcccaacaacaccagctcctctccccagccaaagaagaaaccactggatggagaatatttcacccttcagatccgtgggcgtcagcgcggttatatgagtcgagacgttgttaagccccggacagtgacg

SEQ ID NO: 455693 - DNA, 2822 bp, Homo sapiens
cgtgggcaaaggtacttaaagccctgaccgtcgttctccgtcctcctctgggtaccaactctattgcgcagctcgctgccgtgcgtttaacccaggcgaggaggaggaggagaaaattcccccagattcgggcagactgctttccagacacctccggcccacacagccgttcaccccccgtcttttcagtcctggaaaaggaattcgggctttcattgtctaacgtcgacagtctatatttctgctcttcagtctgtccttaggatgaagctctaactgaactgaagtaaggagaaacagccttgaatctttggagggtctgtcttccttttgggctctgtgcaactgcagctacagtggaaaaaagcaaactgctcttgatcccaggccctgcctaagcctcagcagaacttgtaagcctaaactgaagagcctcacccggacgagcaggcatcccttaaccttaagcaatccagttccacgccctggatcagtgaataaccccagctgcaccatgagccgcgttcgggatgctggctgtgtagcggcggggatagtgataggggctggtgcctggtactgtgtctacaaatacaccagggggagagaccagaccaagaagagaatggccaagcccaaaaaccgggctgtggctgggactggagccagggctagagctgggctaagagccggattcacaatcgaccttgggtcaggattcagtcccccaaccccagtccgtgctgaagcagaggacagggcccaggatgaagcctctgctctggacacagttggagctgaggcagtggccccagctgcatccagcgctgaggctcagagtggggcaggcagtcaggcccaagaggcagatggagccggggttgggcctaaggccgaatcagtagttggggctgcaatggcttctgcaatagcaccacctcccggggtgacagaggcccttggggctgcagaagcccctgcaatggcaggggctcccaaagtggcagaagctcccagagaagcggagacttccagggcagcggtgcctcctgggacagtggtgcctaccgaagcggcagcacccactgaggtgaccgagggtcctggggtagcagcacctaccaaggtagctgaagctcccggggtggcatcgcctaccgaggcagctgaggctcctgtgcccgcaacgcctactggggctgcagcacctactggggctgcagagtctcctggaacttctggttcccctagaacagcggtggttcctggaacatcagctgccaagaaagcaacccctggggctcacactggggctataccgaaagccacatcagcgactggagcggtacccaaaggtggaggcaagggtgtaaccaggtcccggaatgggggcaagggcaagggcaagaaaagcaaagttgaagtagacgaactggggatgggcttccgtcctggagatggggctgcagcagctgctgcagcctctgctaatggcggacaggctttcctggcagaggtccctgattctgaggaaggggagtccgggtggactgacacagagtcagattcagactctgagcccgagacccagcgcagagggaggggaagaagacccgttgccatgcagaagcgcccctttccttatgaaattgatgagattctgggtgtccgcgatctcaggaaggtccttgccttgcttcagaaatctgatgatcctttcatccaacaggtagctttgctcactctgagcaacaatgccaattattcatgcaatcaagagacaatccgcaaattgggaggcctcccaattattgcaaacatgatcaacaaaactgatccacacattaaggaaaaagccttaatggccatgaataacctgagtgagaattatgaaaatcagggccggcttcaggtgtacatgaataaagtgatggatgatatcatggcctctaacctgaactcagcagttcaagtagttggactaaaatttctaacaaacatgactattactaatgactaccaacacctgcttgtcaattccattgcaaactttttccgtttgctatctcagggaggtggaaaaatcaaggttgagattttgaaaatcctttcgaattttgctgaaaatccagatatgttgaagaaacttctcagtacccaagtgccagcatcatttagttccctctataattcttacgtggaatcagaaatccttattaatgcccttactctatttgagattatctatgacaatctcagagcagaagtgtttaactatagagaattcaataaaggttcccttttttacttatgcactacatctggagtgtgtgttaagaaaattagagccttagcaaatcaccatgacctcttagtgaaagtgaaagttataaaactagtgaacaaattctgattggttatgtaccgtcaaaagacttgaagaaatttcatgattttgcagtgtggaagcgttgaaaattgaaagttactgcttttccacttgctcatatagtaaagggatcctttcagctgccagtgttgaataatgtatcatccagagtgatgttatctgtgacagtcaccagctttaagctgaaccattttatgaataccaaataaatagacctcttgtactgaaaacatatttgtgactttaatcgtgctgcttggatagaaatatttttactggttcttctgaattgacagtaaacctgtccattatgaatggcctactgttctattatttgttttgacttgaatttatccaccaaagacttcatttgtgtatcatcaataaagttgtatgtttcaactgacaaaaa

SEQ ID NO: 455694 - DNA, 2861 bp, Homo sapiens
cgtgggcaaaggtacttaaagccctgaccgtcgttctccgtcctcctctgggtaccaactctattgcgcagctcgctgccgtgcgtttaacccaggcgaggaggaggaggagaaaattcccccagattcgggcaggcccgcaccccacattccgtcctgttttgagaggaggagggaagagaaataaacgtggcagcgcatagaaggccagcagggagactgctttccagacacctccggcccacacagccgttcaccccccgtcttttcagtcctggaaaaggaattcggtctgtccttaggatgaagctctaactgaactgaagtaaggagaaacagccttgaatctttggagggtctgtcttccttttgggctctgtgcaactgcagctacagtggaaaaaagcaaactgctcttgatcccaggccctgcctaagcctcagcagaacttgtaagcctaaactgaagagcctcacccggacgagcaggcatcccttaaccttaagcaatccagttccacgccctggatcagtgaataaccccagctgcaccatgagccgcgttcgggatgctggctgtgtagcggcggggatagtgataggggctggtgcctggtactgtgtctacaaatacaccagggggagagaccagaccaagaagagaatggccaagcccaaaaaccgggctgtggctgggactggagccagggctagagctgggctaagagccggattcacaatcgaccttgggtcaggattcagtcccccaaccccagtccgtgctgaagcagaggacagggcccaggatgaagcctctgctctggacacagttggagctgaggcagtggccccagctgcatccagcgctgaggctcagagtggggcaggcagtcaggcccaagaggcagatggagccggggttgggcctaaggccgaatcagtagttggggctgcaatggcttctgcaatagcaccacctcccggggtgacagaggcccttggggctgcagaagcccctgcaatggcaggggctcccaaagtggcagaagctcccagagaagcggagacttccagggcagcggtgcctcctgggacagtggtgcctaccgaagcggcagcacccactgaggtgaccgagggtcctggggtagcagcacctaccaaggtagctgaagctcccggggtggcatcgcctaccgaggcagctgaggctcctgtgcccgcaacgcctactggggctgcagcacctactggggctgcagagtctcctggaacttctggttcccctagaacagcggtggttcctggaacatcagctgccaagaaagcaacccctggggctcacactggggctataccgaaagccacatcagcgactggagcggtacccaaaggtggaggcaagggtgtaaccaggtcccggaatgggggcaagggcaagggcaagaaaagcaaagttgaagtagacgaactggggatgggcttccgtcctggagatggggctgcagcagctgctgcagcctctgctaatggcggacaggctttcctggcagaggtccctgattctgaggaaggggagtccgggtggactgacacagagtcagattcagactctgagcccgagacccagcgcagagggaggggaagaagacccgttgccatgcagaagcgcccctttccttatgaaattgatgagattctgggtgtccgcgatctcaggaaggtccttgccttgcttcagaaatctgatgatcctttcatccaacaggtagctttgctcactctgagcaacaatgccaattattcatgcaatcaagagacaatccgcaaattgggaggcctcccaattattgcaaacatgatcaacaaaactgatccacacattaaggaaaaagccttaatggccatgaataacctgagtgagaattatgaaaatcagggccggcttcaggtgtacatgaataaagtgatggatgatatcatggcctctaacctgaactcagcagttcaagtagttggactaaaatttctaacaaacatgactattactaatgactaccaacacctgcttgtcaattccattgcaaactttttccgtttgctatctcagggaggtggaaaaatcaaggttgagattttgaaaatcctttcgaattttgctgaaaatccagatatgttgaagaaacttctcagtacccaagtgccagcatcatttagttccctctataattcttacgtggaatcagaaatccttattaatgcccttactctatttgagattatctatgacaatctcagagcagaagtgtttaactatagagaattcaataaaggttcccttttttacttatgcactacatctggagtgtgtgttaagaaaattagagccttagcaaatcaccatgacctcttagtgaaagtgaaagttataaaactagtgaacaaattctgattggttatgtaccgtcaaaagacttgaagaaatttcatgattttgcagtgtggaagcgttgaaaattgaaagttactgcttttccacttgctcatatagtaaagggatcctttcagctgccagtgttgaataatgtatcatccagagtgatgttatctgtgacagtcaccagctttaagctgaaccattttatgaataccaaataaatagacctcttgtactgaaaacatatttgtgactttaatcgtgctgcttggatagaaatatttttactggttcttctgaattgacagtaaacctgtccattatgaatggcctactgttctattatttgttttgacttgaatttatccaccaaagacttcatttgtgtatcatcaataaagttgtatgtttcaactgacaaaaa

SEQ ID NO: 455695 - DNA, 2807 bp, Homo sapiens
cgtgggcaaaggtacttaaagccctgaccgtcgttctccgtcctcctctgggtaccaactctattgcgcagctcgctgccgtgcgtttaacccaggcgaggaggaggaggagaaaattcccccagattcgggcaggcccgcaccccacattccgtcctgttttgagaggaggagggaagagaaataaacgtggcagcgcatagaaggccagcagggagactgctttccagacacctccggcccacacagccgttcaccccccgtcttttcagtcctggaaaaggaattcggtctgtccttaggatgaagctctaactgaactgaagtaaggagaaacagccttgaatctttggagggtctgtcttccttttgggctctgtgcaactgcagctacagtggaaaaaagcaaactgctcttgatcccaggccctgcctaagcctcagcagaacttgtaagcctaaactgaagagcctcacccggacgagcaggcatcccttaaccttaagcaatccagttccacgccctggatcagtgaataaccccagctgcaccatgagccgcgttcgggatgctggctgtgtagcggcggggatagtgataggggctggtgcctggtactgtgtctacaaatacaccagggggagagaccagaccaagaagagaatggccaagcccaaaaaccgggctgtggctgggactggagccagggctagagctgggctaagagccggattcacaatcgaccttgggtcaggattcagtcccccaaccccagtccgtgctgaagcagaggacagggcccaggatgaagcctctgctctggacacagttggagctgaggcagtggccccagctgcatccagcgctgaggctcagagtggggcaggcagtcaggcccaagaggcagatggagccggggttgggcctaaggccgaatcagtagttggggctgcaatggcttctgcaatagcaccacctcccggggtgacagaggcccttggggctgcagaagcccctgcaatggcaggggctcccaaagtggcagaagctcccagagaagcggagacttccagggcagcggtgcctcctgggacagtggtgcctaccgaagcggcagcacccactgaggtgaccgagggtcctggggtagcagcacctaccaaggtagctgaagctcccggggtggcatcgcctaccgaggcagctgaggctcctgtgcccgcaacgcctactggggctgcagcacctactggggctgcagagtctcctggaacttctggttcccctagaacagcggtggttcctggaacatcagctgccaagaaagcaacccctggggctcacactggggctataccgaaagccacatcagcgactggagcggtacccaaaggtggaggcaagggtgtaaccaggtcccggaatgggggcaagggcaagggcaaggctgcagcagctgctgcagcctctgctaatggcggacaggctttcctggcagaggtccctgattctgaggaaggggagtccgggtggactgacacagagtcagattcagactctgagcccgagacccagcgcagagggaggggaagaagacccgttgccatgcagaagcgcccctttccttatgaaattgatgagattctgggtgtccgcgatctcaggaaggtccttgccttgcttcagaaatctgatgatcctttcatccaacaggtagctttgctcactctgagcaacaatgccaattattcatgcaatcaagagacaatccgcaaattgggaggcctcccaattattgcaaacatgatcaacaaaactgatccacacattaaggaaaaagccttaatggccatgaataacctgagtgagaattatgaaaatcagggccggcttcaggtgtacatgaataaagtgatggatgatatcatggcctctaacctgaactcagcagttcaagtagttggactaaaatttctaacaaacatgactattactaatgactaccaacacctgcttgtcaattccattgcaaactttttccgtttgctatctcagggaggtggaaaaatcaaggttgagattttgaaaatcctttcgaattttgctgaaaatccagatatgttgaagaaacttctcagtacccaagtgccagcatcatttagttccctctataattcttacgtggaatcagaaatccttattaatgcccttactctatttgagattatctatgacaatctcagagcagaagtgtttaactatagagaattcaataaaggttcccttttttacttatgcactacatctggagtgtgtgttaagaaaattagagccttagcaaatcaccatgacctcttagtgaaagtgaaagttataaaactagtgaacaaattctgattggttatgtaccgtcaaaagacttgaagaaatttcatgattttgcagtgtggaagcgttgaaaattgaaagttactgcttttccacttgctcatatagtaaagggatcctttcagctgccagtgttgaataatgtatcatccagagtgatgttatctgtgacagtcaccagctttaagctgaaccattttatgaataccaaataaatagacctcttgtactgaaaacatatttgtgactttaatcgtgctgcttggatagaaatatttttactggttcttctgaattgacagtaaacctgtccattatgaatggcctactgttctattatttgttttgacttgaatttatccaccaaagacttcatttgtgtatcatcaataaagttgtatgtttcaactgacaaaaa

SEQ ID NO: 455696 - DNA, 2778 bp, Homo sapiens
cgtgggcaaaggtacttaaagccctgaccgtcgttctccgtcctcctctgggtaccaactctattgcgcagctcgctgccgtgcgtttaacccaggcgaggaggaggaggagaaaattcccccagattcgggcagactgctttccagacacctccggcccacacagccgttcaccccccgtcttttcagtcctggaaaaggaattcggtctgtccttaggatgaagctctaactgaactgaagtaaggagaaacagccttgaatctttggagggtctgtcttccttttgggctctgtgcaactgcagctacagtggaaaaaagcaaactgctcttgatcccaggccctgcctaagcctcagcagaacttgtaagcctaaactgaagagcctcacccggacgagcaggcatcccttaaccttaagcaatccagttccacgccctggatcagtgaataaccccagctgcaccatgagccgcgttcgggatgctggctgtgtagcggcggggatagtgataggggctggtgcctggtactgtgtctacaaatacaccagggggagagaccagaccaagaagagaatggccaagcccaaaaaccgggctgtggctgggactggagccagggctagagctgggctaagagccggattcacaatcgaccttgggtcaggattcagtcccccaaccccagtccgtgctgaagcagaggacagggcccaggatgaagcctctgctctggacacagttggagctgaggcagtggccccagctgcatccagcgctgaggctcagagtggggcaggcagtcaggcccaagaggcagatggagccggggttgggcctaaggccgaatcagtagttggggctgcaatggcttctgcaatagcaccacctcccggggtgacagaggcccttggggctgcagaagcccctgcaatggcaggggctcccaaagtggcagaagctcccagagaagcggagacttccagggcagcggtgcctcctgggacagtggtgcctaccgaagcggcagcacccactgaggtgaccgagggtcctggggtagcagcacctaccaaggtagctgaagctcccggggtggcatcgcctaccgaggcagctgaggctcctgtgcccgcaacgcctactggggctgcagcacctactggggctgcagagtctcctggaacttctggttcccctagaacagcggtggttcctggaacatcagctgccaagaaagcaacccctggggctcacactggggctataccgaaagccacatcagcgactggagcggtacccaaaggtggaggcaagggtgtaaccaggtcccggaatgggggcaagggcaagggcaagaaaagcaaagttgaagtagacgaactggggatgggcttccgtcctggagatggggctgcagcagctgctgcagcctctgctaatggcggacaggctttcctggcagaggtccctgattctgaggaaggggagtccgggtggactgacacagagtcagattcagactctgagcccgagacccagcgcagagggaggggaagaagacccgttgccatgcagaagcgcccctttccttatgaaattgatgagattctgggtgtccgcgatctcaggaaggtccttgccttgcttcagaaatctgatgatcctttcatccaacaggtagctttgctcactctgagcaacaatgccaattattcatgcaatcaagagacaatccgcaaattgggaggcctcccaattattgcaaacatgatcaacaaaactgatccacacattaaggaaaaagccttaatggccatgaataacctgagtgagaattatgaaaatcagggccggcttcaggtgtacatgaataaagtgatggatgatatcatggcctctaacctgaactcagcagttcaagtagttggactaaaatttctaacaaacatgactattactaatgactaccaacacctgcttgtcaattccattgcaaactttttccgtttgctatctcagggaggtggaaaaatcaaggttgagattttgaaaatcctttcgaattttgctgaaaatccagatatgttgaagaaacttctcagtacccaagtgccagcatcatttagttccctctataattcttacgtggaatcagaaatccttattaatgcccttactctatttgagattatctatgacaatctcagagcagaagtgtttaactatagagaattcaataaaggttcccttttttacttatgcactacatctggagtgtgtgttaagaaaattagagccttagcaaatcaccatgacctcttagtgaaagtgaaagttataaaactagtgaacaaattctgattggttatgtaccgtcaaaagacttgaagaaatttcatgattttgcagtgtggaagcgttgaaaattgaaagttactgcttttccacttgctcatatagtaaagggatcctttcagctgccagtgttgaataatgtatcatccagagtgatgttatctgtgacagtcaccagctttaagctgaaccattttatgaataccaaataaatagacctcttgtactgaaaacatatttgtgactttaatcgtgctgcttggatagaaatatttttactggttcttctgaattgacagtaaacctgtccattatgaatggcctactgttctattatttgttttgacttgaatttatccaccaaagacttcatttgtgtatcatcaataaagttgtatgtttcaactgacaaaaa

SEQ ID NO: 455697 - DNA, 2780 bp, Homo sapiens
cgtgggcaaaggtacttaaagccctgaccgtcgttctccgtcctcctctgggtaccaactctattgcgcagctcgctgccgtgcgtttaacccaggcgaggaggaggaggagaaaattcccccagattcgggcaggcccgcaccccacattccgtcctgttttgagaggaggagggaagagaaataaacgtggcagcgcatagaaggccagcagggagactgctttccagacacctccggcccacacagccgttcaccccccgtcttttcagtcctggaaaaggaattcggtctgtccttaggatgaagctctaactgaactgaagtaaggagaaacagccttgaatctttggagggtctgtcttccttttgggctctgtgcaactgcagctacagtggaaaaaagcaaactgctcttgatcccaggccctgcctaagcctcagcagaacttgtaagcctaaactgaagagcctcacccggacgagcaggcatcccttaaccttaagcaatccagttccacgccctggatcagtgaataaccccagctgcaccatgagccgcgttcgggatgctggctgtgtagcggcggggatagtgataggggctggtgcctggtactgtgtctacaaatacaccgggctgtggctgggactggagccagggctagagctgggattcagtcccccaaccccagtccgtgctgaagcagaggacagggcccaggatgaagcctctgctctggacacagttggagctgaggcagtggccccagctgcatccagcgctgaggctcagagtggggcaggcagtcaggcccaagaggcagatggagccggggttgggcctaaggccgaatcagtagttggggctgcaatggcttctgcaatagcaccacctcccggggtgacagaggcccttggggctgcagaagcccctgcaatggcaggggctcccaaagtggcagaagctcccagagaagcggagacttccagggcagcggtgcctcctgggacagtggtgcctaccgaagcggcagcacccactgaggtgaccgagggtcctggggtagcagcacctaccaaggtagctgaagctcccggggtggcatcgcctaccgaggcagctgaggctcctgtgcccgcaacgcctactggggctgcagcacctactggggctgcagagtctcctggaacttctggttcccctagaacagcggtggttcctggaacatcagctgccaagaaagcaacccctggggctcacactggggctataccgaaagccacatcagcgactggagcggtacccaaaggtggaggcaagggtgtaaccaggtcccggaatgggggcaagggcaagggcaagaaaagcaaagttgaagtagacgaactggggatgggcttccgtcctggagatggggctgcagcagctgctgcagcctctgctaatggcggacaggctttcctggcagaggtccctgattctgaggaaggggagtccgggtggactgacacagagtcagattcagactctgagcccgagacccagcgcagagggaggggaagaagacccgttgccatgcagaagcgcccctttccttatgaaattgatgagattctgggtgtccgcgatctcaggaaggtccttgccttgcttcagaaatctgatgatcctttcatccaacaggtagctttgctcactctgagcaacaatgccaattattcatgcaatcaagagacaatccgcaaattgggaggcctcccaattattgcaaacatgatcaacaaaactgatccacacattaaggaaaaagccttaatggccatgaataacctgagtgagaattatgaaaatcagggccggcttcaggtgtacatgaataaagtgatggatgatatcatggcctctaacctgaactcagcagttcaagtagttggactaaaatttctaacaaacatgactattactaatgactaccaacacctgcttgtcaattccattgcaaactttttccgtttgctatctcagggaggtggaaaaatcaaggttgagattttgaaaatcctttcgaattttgctgaaaatccagatatgttgaagaaacttctcagtacccaagtgccagcatcatttagttccctctataattcttacgtggaatcagaaatccttattaatgcccttactctatttgagattatctatgacaatctcagagcagaagtgtttaactatagagaattcaataaaggttcccttttttacttatgcactacatctggagtgtgtgttaagaaaattagagccttagcaaatcaccatgacctcttagtgaaagtgaaagttataaaactagtgaacaaattctgattggttatgtaccgtcaaaagacttgaagaaatttcatgattttgcagtgtggaagcgttgaaaattgaaagttactgcttttccacttgctcatatagtaaagggatcctttcagctgccagtgttgaataatgtatcatccagagtgatgttatctgtgacagtcaccagctttaagctgaaccattttatgaataccaaataaatagacctcttgtactgaaaacatatttgtgactttaatcgtgctgcttggatagaaatatttttactggttcttctgaattgacagtaaacctgtccattatgaatggcctactgttctattatttgttttgacttgaatttatccaccaaagacttcatttgtgtatcatcaataaagttgtatgtttcaactgacaaaaa

SEQ ID NO: 455698 - DNA, 2674 bp, Homo sapiens
tggtattaaaccgccttgttaactcgcagacactgctttccagacacctccggcccacacagccgttcaccccccgtcttttcagtcctggaaaaggaattcggtctgtccttaggatgaagctctaactgaactgaagtaaggagaaacagccttgaatctttggagggtctgtcttccttttgggctctgtgcaactgcagctacagtggaaaaaagcaaactgctcttgatcccaggccctgcctaagcctcagcagaacttgtaagcctaaactgaagagcctcacccggacgagcaggcatcccttaaccttaagcaatccagttccacgccctggatcagtgaataaccccagctgcaccatgagccgcgttcgggatgctggctgtgtagcggcggggatagtgataggggctggtgcctggtactgtgtctacaaatacaccagggggagagaccagaccaagaagagaatggccaagcccaaaaaccgggctgtggctgggactggagccagggctagagctgggctaagagccggattcacaatcgaccttgggtcaggattcagtcccccaaccccagtccgtgctgaagcagaggacagggcccaggatgaagcctctgctctggacacagttggagctgaggcagtggccccagctgcatccagcgctgaggctcagagtggggcaggcagtcaggcccaagaggcagatggagccggggttgggcctaaggccgaatcagtagttggggctgcaatggcttctgcaatagcaccacctcccggggtgacagaggcccttggggctgcagaagcccctgcaatggcaggggctcccaaagtggcagaagctcccagagaagcggagacttccagggcagcggtgcctcctgggacagtggtgcctaccgaagcggcagcacccactgaggtgaccgagggtcctggggtagcagcacctaccaaggtagctgaagctcccggggtggcatcgcctaccgaggcagctgaggctcctgtgcccgcaacgcctactggggctgcagcacctactggggctgcagagtctcctggaacttctggttcccctagaacagcggtggttcctggaacatcagctgccaagaaagcaacccctggggctcacactggggctataccgaaagccacatcagcgactggagcggtacccaaaggtggaggcaagggtgtaaccaggtcccggaatgggggcaagggcaagggcaagaaaagcaaagttgaagtagacgaactggggatgggcttccgtcctggagatggggctgcagcagctgctgcagcctctgctaatggcggacaggctttcctggcagaggtccctgattctgaggaaggggagtccgggtggactgacacagagtcagattcagactctgagcccgagacccagcgcagagggaggggaagaagacccgttgccatgcagaagcgcccctttccttatgaaattgatgagattctgggtgtccgcgatctcaggaaggtccttgccttgcttcagaaatctgatgatcctttcatccaacaggtagctttgctcactctgagcaacaatgccaattattcatgcaatcaagagacaatccgcaaattgggaggcctcccaattattgcaaacatgatcaacaaaactgatccacacattaaggaaaaagccttaatggccatgaataacctgagtgagaattatgaaaatcagggccggcttcaggtgtacatgaataaagtgatggatgatatcatggcctctaacctgaactcagcagttcaagtagttggactaaaatttctaacaaacatgactattactaatgactaccaacacctgcttgtcaattccattgcaaactttttccgtttgctatctcagggaggtggaaaaatcaaggttgagattttgaaaatcctttcgaattttgctgaaaatccagatatgttgaagaaacttctcagtacccaagtgccagcatcatttagttccctctataattcttacgtggaatcagaaatccttattaatgcccttactctatttgagattatctatgacaatctcagagcagaagtgtttaactatagagaattcaataaaggttcccttttttacttatgcactacatctggagtgtgtgttaagaaaattagagccttagcaaatcaccatgacctcttagtgaaagtgaaagttataaaactagtgaacaaattctgattggttatgtaccgtcaaaagacttgaagaaatttcatgattttgcagtgtggaagcgttgaaaattgaaagttactgcttttccacttgctcatatagtaaagggatcctttcagctgccagtgttgaataatgtatcatccagagtgatgttatctgtgacagtcaccagctttaagctgaaccattttatgaataccaaataaatagacctcttgtactgaaaacatatttgtgactttaatcgtgctgcttggatagaaatatttttactggttcttctgaattgacagtaaacctgtccattatgaatggcctactgttctattatttgttttgacttgaatttatccaccaaagacttcatttgtgtatcatcaataaagttgtatgtttcaactgacaaaaa

SEQ ID NO: 455699 - DNA, 649 bp, Homo sapiens
agccctacagtacagaggctatttatctggtattcataaaatggttcagcttaaagctggtgactgtcacagataacatcactctggatgcatacagttattcaacactggcagctgaaaggttcccttttttacttatgcactacatctggagtgtgtgttaagaaaattagagccttagcaaatcaccatgacctcttagtgaaagtgaaagttataaaactagtgaacaaattctgattggttatgtaccgtcaaaagacttgaagaaatttcatgattttgcagtgtggaagcgttgaaaattgaaagttactgcttttccacttgctcatatagtaaagggatcctttcagctgccagtgttgaataatgtatcatccagagtgatgttatctgtgacagtcaccagctttaagctgaaccattttatgaataccaaataaatagacctcttgtactgaaaacatatttgtgactttaatcgtgctgcttggatagaaatatttttactggttcttctgaattgacagtaaacctgtccattatgaatggcctactgttctattatttgttttgacttgaatttatccaccaaagacttcatttgtgtatcatcaataaagttgtatgtttcaactgacaaaaa

SEQ ID NO: 455700 - DNA, 428 bp, Homo sapiens
gcctctcgtccttccatttagatgctggaagttgtaggcattggcagagcaggctaaggttgaagatgtagaaaacgttaaactaggtctgtgaatcagcaaacacaggccttgacacctgtgtctgggtgctagcccgccaacgaagcattgtgtccctaaactcttctctaagtagaactggttagacacgaagtgagccagagccctaagcctcatttttatcctttacccctaggccctgcctaagcctcagcagaacttgtaagcctaaactgaagagcctcacccggacgagcaggcatcccttaaccttaagcaatccagttccacgccctggatcagtgaataaccccagctgcaccatgagccgcgttcgggatgctggctgtgtagcggcggggatagtgataggggctggtgcctgg

SEQ ID NO: 455701 - DNA, 396 bp, Homo sapiens
gtgcctcggtctcccccactcctggccggctttccagacctgaggtgctcaaacgcggctcattttggtgggcggtggggaaagggggagggggaaacgaaaagacttttgatagactttacgaagaatccgcttacttcctttccagccagtgttttttggttttgtttataatattcaggcccgcaccccacattccgtcctgttttgagaggaggagggaagagaaataaacgtggcagcgcatagaaggccagcagggaggttgggaaagggtaaccaggaggcgggggtggggcatgcaatttggtaacaatctgggcggcacactcccaccctgactttccccaccaccgccccggcaccctcccatcccccagccgaccctctgtgatt

SEQ ID NO: 455702 - DNA, 2663 bp, Homo sapiens
gaatcatttgacattctgatgtgcaaacacgaaaaggcagttactgagacccttgtcctggatgctgatccatccaccaggctttcattgtctaacgtcgacagtctatatttctgctcttcagtctgtccttaggatgaagctctaactgaactgaagtctgtcttccttttgggctctgtgcaactgcagctacagtggaaaaaagcaaactgctcttgatcccaggccctgcctaagcctcagcagaacttgtaagcctaaactgaagagcctcacccggacgagcaggcatcccttaaccttaagcaatccagttccacgccctggatcagtgaataaccccagctgcaccatgagccgcgttcgggatgctggctgtgtagcggcggggatagtgataggggctggtgcctggtactgtgtctacaaatacaccagggggagagaccagaccaagaagagaatggccaagcccaaaaaccgggctgtggctgggactggagccagggctagagctgggctaagagccggattcacaatcgaccttgggtcaggattcagtcccccaaccccagtccgtgctgaagcagaggacagggcccaggatgaagcctctgctctggacacagttggagctgaggcagtggccccagctgcatccagcgctgaggctcagagtggggcaggcagtcaggcccaagaggcagatggagccggggttgggcctaaggccgaatcagtagttggggctgcaatggcttctgcaatagcaccacctcccggggtgacagaggcccttggggctgcagaagcccctgcaatggcaggggctcccaaagtggcagaagctcccagagaagcggagacttccagggcagcggtgcctcctgggacagtggtgcctaccgaagcggcagcacccactgaggtgaccgagggtcctggggtagcagcacctaccaaggtagctgaagctcccggggtggcatcgcctaccgaggcagctgaggctcctgtgcccgcaacgcctactggggctgcagcacctactggggctgcagagtctcctggaacttctggttcccctagaacagcggtggttcctggaacatcagctgccaagaaagcaacccctggggctcacactggggctataccgaaagccacatcagcgactggagcggtacccaaaggtggaggcaagggtgtaaccaggtcccggaatgggggcaagggcaagggcaagaaaagcaaagttgaagtagacgaactggggatgggcttccgtcctggagatggggctgcagcagctgctgcagcctctgctaatggcggacaggctttcctggcagaggtccctgattctgaggaaggggagtccgggtggactgacacagagtcagattcagactctgagcccgagacccagcgcagagggaggggaagaagacccgttgccatgcagaagcgcccctttccttatgaaattgatgagattctgggtgtccgcgatctcaggaaggtccttgccttgcttcagaaatctgatgatcctttcatccaacaggtagctttgctcactctgagcaacaatgccaattattcatgcaatcaagagacaatccgcaaattgggaggcctcccaattattgcaaacatgatcaacaaaactgatccacacattaaggaaaaagccttaatggccatgaataacctgagtgagaattatgaaaatcagggccggcttcaggtgtacatgaataaagtgatggatgatatcatggcctctaacctgaactcagcagttcaagtagttggactaaaatttctaacaaacatgactattactaatgactaccaacacctgcttgtcaattccattgcaaactttttccgtttgctatctcagggaggtggaaaaatcaaggttgagattttgaaaatcctttcgaattttgctgaaaatccagatatgttgaagaaacttctcagtacccaagtgccagcatcatttagttccctctataattcttacgtggaatcagaaatccttattaatgcccttactctatttgagattatctatgacaatctcagagcagaagtgtttaactatagagaattcaataaaggttcccttttttacttatgcactacatctggagtgtgtgttaagaaaattagagccttagcaaatcaccatgacctcttagtgaaagtgaaagttataaaactagtgaacaaattctgattggttatgtaccgtcaaaagacttgaagaaatttcatgattttgcagtgtggaagcgttgaaaattgaaagttactgcttttccacttgctcatatagtaaagggatcctttcagctgccagtgttgaataatgtatcatccagagtgatgttatctgtgacagtcaccagctttaagctgaaccattttatgaataccaaataaatagacctcttgtactgaaaacatatttgtgactttaatcgtgctgcttggatagaaatatttttactggttcttctgaattgacagtaaacctgtccattatgaatggcctactgttctattatttgttttgacttgaatttatccaccaaagacttcatttgtgtatcatcaataaagttgtatgtttcaactgacaaaaa

SEQ ID NO: 455703 - DNA, 3320 bp, Homo sapiens
cgtgggcaaaggtacttaaagccctgaccgtcgttctccgtcctcctctgggtaccaactctattgcgcagctcgctgccgtgcgtttaacccaggcgaggaggaggaggagaaaattcccccagattcgggcaggcccgcaccccacattccgtcctgttttgagaggaggagggaagagaaataaacgtggcagcgcatagaaggccagcagggagactgctttccagacacctccggcccacacagccgttcaccccccgtcttttcagtcctggaaaaggaattcggtctgtccttaggatgaagctctaactgaactgaagtaaggagaaacagccttgaatctttggagggtctgtcttccttttgggctctgtgcaactgcagctacagtggaaaaaagcaaactgctcttgatcccaggccctgcctaagcctcagcagaacttgtaagcctaaactgaagagcctcacccggacgagcaggcatcccttaaccttaagcaatccagttccacgccctggatcagtgaataaccccagctgcaccatgagccgcgttcgggatgctggctgtgtagcggcggggatagtgataggggctggtgcctggtactgtgtctacaaatacaccagggggagagaccagaccaagaagagaatggccaagcccaaaaaccgggctgtggctgggactggagccagggctagagctgggctaagagccggattcacaatcgaccttgggtcaggattcagtcccccaaccccagtccgtgctgaagcagaggacagggcccaggatgaagcctctgctctggacacagttggagctgaggcagtggccccagctgcatccagcgctgaggctcagagtggggcaggcagtcaggcccaagaggcagatggagccggggttgggcctaaggccgaatcagtagttggggctgcaatggcttctgcaatagcaccacctcccggggtgacagaggcccttggggctgcagaagcccctgcaatggcaggggctcccaaagtggcagaagctcccagagaagcggagacttccagggcagcggtgcctcctgggacagtggtgcctaccgaagcggcagcacccactgaggtgaccgagggtcctggggtagcagcacctaccaaggtagctgaagctcccggggtggcatcgcctaccgaggcagctgaggctcctgtgcccgcaacgcctactggggctgcagcacctactggggctgcagagtctcctggaacttctggttcccctagaacagcggtggttcctggaacatcagctgccaagaaagcaacccctggggctcacactggggctataccgaaagccacatcagcgactggagcggtacccaaaggtggaggcaagggtgtaaccaggtcccggaatgggggcaagggcaagggcaagaaaagcaaagttgaagtagacgaactggggatgggcttccgtcctggagatggggctgcagcagctgctgcagcctctgctaatggcggacaggctttcctggcagaggtccctgattctgaggaaggggagtccgggtggactgacacagagtcagattcagactctgagcccgagacccagcgcagagggaggggaagaagacccgttgccatgcagaagcgcccctttccttatgaaattgatgagattctgggtgtccgcgatctcaggaaggtccttgccttgcttcagaaatctgatgatcctttcatccaacaggtagctttgctcactctgagcaacaatgccaattattcatgcaatcaagagacaatccgcaaattgggaggcctcccaattattgcaaacatgatcaacaaaactgatccacacattaaggaaaaagccttaatggccatgaataacctgagtgagaattatgaaaatcagggccggcttcaggtgtacatgaataaagtgatggatgatatcatggcctctaacctgaactcagcagttcaagtagttggactaaaatttctaacaaacatgactattactaatgactaccaacacctgcttgtcaattccattgcaaactttttccgtttgctatctcagggaggtggaaaaatcaaggttgagattttgaaaatcctttcgaattttgctgaaaatccagatatgttgaagaaacttctcagtacccaagtgccagcatcatttagttccctctataattcttacgtggaatcagaaatccttattaatgcccttactctatttgagattatctatgacaatctcagagcagaagtgtttaactatagagaattcaataaaggttcccttttttacttatgcactacatctggagtgtgtgttaagaaaattagagccttagcaaatcaccatgacctcttagtgaaagtgaaagttataaaactagtgaacaaattctgattggttatgtaccgtcaaaagacttgaagaaatttcatgattttgcagtgtggaagcgttgaaaattgaaagttactgcttttccacttgctcatatagtaaagggatcctttcagctgccagtgttgaataatgtatcatccagagtgatgttatctgtgacagtcaccagctttaagctgaaccattttatgaataccaaataaatagacctcttgtactgaaaacatatttgtgactttaatcgtgctgcttggatagaaatatttttactggttcttctgaattgacagtaaacctgtccattatgaatggcctactgttctattatttgttttgacttgaatttatccaccaaagacttcatttgtgtatcatcaataaagttgtatgtttcaactgacaaaaaaaaaaaaaaaaaaacaaaaaaaaaaaacaaaaataaaacaacaaaacaacaaaaaaacaaaaaaaacaaacacaacaaaacaaacaccctcaaaacacaccaacaaatccacaacacaagcgcgcttctatatcgaacgcgccggccgcccaatcatattgaacagctgtcttgtttctgtagcaagacaggagacgcttcgaatcttgaggtagatgaaacacattcaatggaggaggatgcgggctcattccaatcagccggacaggagacagatgacactatactgttcatcgtctaggaaaggaccccacactgatggatggttgagaataaaagcaccatcctgcatgtacagaattgtttaccgactgaacttacaaagttgggtgtagatatggtaaacaccagacagctgggcaggtaagatgcctgcctgtattttatcaatttcgcagc

SEQ ID NO: 455704 - DNA, 2905 bp, Homo sapiens
cgtgggcaaaggtacttaaagccctgaccgtcgttctccgtcctcctctgggtaccaactctattgcgcagctcgctgccgtgcgtttaacccaggcgaggaggaggaggagaaaattcccccagattcgggcaggcccgcaccccacattccgtcctgttttgagaggaggagggaagagaaataaacgtggcagcgcatagaaggccagcagggagactgctttccagacacctccggcccacacagccgttcaccccccgtcttttcagtcctggaaaaggaattcgggctttcattgtctaacgtcgacagtctatatttctgctcttcagtctgtccttaggatgaagctctaactgaactgaagtaaggagaaacagccttgaatctttggagggtctgtcttccttttgggctctgtgcaactgcagctacagtggaaaaaagcaaactgctcttgatcccaggccctgcctaagcctcagcagaacttgtaagcctaaactgaagagcctcacccggacgagcaggcatcccttaaccttaagcaatccagttccacgccctggatcagtgaataaccccagctgcaccatgagccgcgttcgggatgctggctgtgtagcggcggggatagtgataggggctggtgcctggtactgtgtctacaaatacaccagggggagagaccagaccaagaagagaatggccaagcccaaaaaccgggctgtggctgggactggagccagggctagagctgggctaagagccggattcacaatcgaccttgggtcaggattcagtcccccaaccccagtccgtgctgaagcagaggacagggcccaggatgaagcctctgctctggacacagttggagctgaggcagtggccccagctgcatccagcgctgaggctcagagtggggcaggcagtcaggcccaagaggcagatggagccggggttgggcctaaggccgaatcagtagttggggctgcaatggcttctgcaatagcaccacctcccggggtgacagaggcccttggggctgcagaagcccctgcaatggcaggggctcccaaagtggcagaagctcccagagaagcggagacttccagggcagcggtgcctcctgggacagtggtgcctaccgaagcggcagcacccactgaggtgaccgagggtcctggggtagcagcacctaccaaggtagctgaagctcccggggtggcatcgcctaccgaggcagctgaggctcctgtgcccgcaacgcctactggggctgcagcacctactggggctgcagagtctcctggaacttctggttcccctagaacagcggtggttcctggaacatcagctgccaagaaagcaacccctggggctcacactggggctataccgaaagccacatcagcgactggagcggtacccaaaggtggaggcaagggtgtaaccaggtcccggaatgggggcaagggcaagggcaagaaaagcaaagttgaagtagacgaactggggatgggcttccgtcctggagatggggctgcagcagctgctgcagcctctgctaatggcggacaggctttcctggcagaggtccctgattctgaggaaggggagtccgggtggactgacacagagtcagattcagactctgagcccgagacccagcgcagagggaggggaagaagacccgttgccatgcagaagcgcccctttccttatgaaattgatgagattctgggtgtccgcgatctcaggaaggtccttgccttgcttcagaaatctgatgatcctttcatccaacaggtagctttgctcactctgagcaacaatgccaattattcatgcaatcaagagacaatccgcaaattgggaggcctcccaattattgcaaacatgatcaacaaaactgatccacacattaaggaaaaagccttaatggccatgaataacctgagtgagaattatgaaaatcagggccggcttcaggtgtacatgaataaagtgatggatgatatcatggcctctaacctgaactcagcagttcaagtagttggactaaaatttctaacaaacatgactattactaatgactaccaacacctgcttgtcaattccattgcaaactttttccgtttgctatctcagggaggtggaaaaatcaaggttgagattttgaaaatcctttcgaattttgctgaaaatccagatatgttgaagaaacttctcagtacccaagtgccagcatcatttagttccctctataattcttacgtggaatcagaaatccttattaatgcccttactctatttgagattatctatgacaatctcagagcagaagtgtttaactatagagaattcaataaaggttcccttttttacttatgcactacatctggagtgtgtgttaagaaaattagagccttagcaaatcaccatgacctcttagtgaaagtgaaagttataaaactagtgaacaaattctgattggttatgtaccgtcaaaagacttgaagaaatttcatgattttgcagtgtggaagcgttgaaaattgaaagttactgcttttccacttgctcatatagtaaagggatcctttcagctgccagtgttgaataatgtatcatccagagtgatgttatctgtgacagtcaccagctttaagctgaaccattttatgaataccaaataaatagacctcttgtactgaaaacatatttgtgactttaatcgtgctgcttggatagaaatatttttactggttcttctgaattgacagtaaacctgtccattatgaatggcctactgttctattatttgttttgacttgaatttatccaccaaagacttcatttgtgtatcatcaataaagttgtatgtttcaactgacaaaaa

SEQ ID NO: 455705 - DNA, 2796 bp, Homo sapiens
cgtgggcaaaggtacttaaagccctgaccgtcgttctccgtcctcctctgggtaccaactctattgcgcagctcgctgccgtgcgtttaacccaggcgaggaggaggaggagaaaattcccccagattcgggcaggcccgcaccccacattccgtcctgttttgagaggaggagggaagagaaataaacgtggcagcgcatagaaggccagcagggagactgctttccagacacctccggcccacacagccgttcaccccccgtcttttcagtcctggaaaaggaattcgggtctgtcttccttttgggctctgtgcaactgcagctacagtggaaaaaagcaaactgctcttgatcccaggccctgcctaagcctcagcagaacttgtaagcctaaactgaagagcctcacccggacgagcaggcatcccttaaccttaagcaatccagttccacgccctggatcagtgaataaccccagctgcaccatgagccgcgttcgggatgctggctgtgtagcggcggggatagtgataggggctggtgcctggtactgtgtctacaaatacaccagggggagagaccagaccaagaagagaatggccaagcccaaaaaccgggctgtggctgggactggagccagggctagagctgggctaagagccggattcacaatcgaccttgggtcaggattcagtcccccaaccccagtccgtgctgaagcagaggacagggcccaggatgaagcctctgctctggacacagttggagctgaggcagtggccccagctgcatccagcgctgaggctcagagtggggcaggcagtcaggcccaagaggcagatggagccggggttgggcctaaggccgaatcagtagttggggctgcaatggcttctgcaatagcaccacctcccggggtgacagaggcccttggggctgcagaagcccctgcaatggcaggggctcccaaagtggcagaagctcccagagaagcggagacttccagggcagcggtgcctcctgggacagtggtgcctaccgaagcggcagcacccactgaggtgaccgagggtcctggggtagcagcacctaccaaggtagctgaagctcccggggtggcatcgcctaccgaggcagctgaggctcctgtgcccgcaacgcctactggggctgcagcacctactggggctgcagagtctcctggaacttctggttcccctagaacagcggtggttcctggaacatcagctgccaagaaagcaacccctggggctcacactggggctataccgaaagccacatcagcgactggagcggtacccaaaggtggaggcaagggtgtaaccaggtcccggaatgggggcaagggcaagggcaagaaaagcaaagttgaagtagacgaactggggatgggcttccgtcctggagatggggctgcagcagctgctgcagcctctgctaatggcggacaggctttcctggcagaggtccctgattctgaggaaggggagtccgggtggactgacacagagtcagattcagactctgagcccgagacccagcgcagagggaggggaagaagacccgttgccatgcagaagcgcccctttccttatgaaattgatgagattctgggtgtccgcgatctcaggaaggtccttgccttgcttcagaaatctgatgatcctttcatccaacaggtagctttgctcactctgagcaacaatgccaattattcatgcaatcaagagacaatccgcaaattgggaggcctcccaattattgcaaacatgatcaacaaaactgatccacacattaaggaaaaagccttaatggccatgaataacctgagtgagaattatgaaaatcagggccggcttcaggtgtacatgaataaagtgatggatgatatcatggcctctaacctgaactcagcagttcaagtagttggactaaaatttctaacaaacatgactattactaatgactaccaacacctgcttgtcaattccattgcaaactttttccgtttgctatctcagggaggtggaaaaatcaaggttgagattttgaaaatcctttcgaattttgctgaaaatccagatatgttgaagaaacttctcagtacccaagtgccagcatcatttagttccctctataattcttacgtggaatcagaaatccttattaatgcccttactctatttgagattatctatgacaatctcagagcagaagtgtttaactatagagaattcaataaaggttcccttttttacttatgcactacatctggagtgtgtgttaagaaaattagagccttagcaaatcaccatgacctcttagtgaaagtgaaagttataaaactagtgaacaaattctgattggttatgtaccgtcaaaagacttgaagaaatttcatgattttgcagtgtggaagcgttgaaaattgaaagttactgcttttccacttgctcatatagtaaagggatcctttcagctgccagtgttgaataatgtatcatccagagtgatgttatctgtgacagtcaccagctttaagctgaaccattttatgaataccaaataaatagacctcttgtactgaaaacatatttgtgactttaatcgtgctgcttggatagaaatatttttactggttcttctgaattgacagtaaacctgtccattatgaatggcctactgttctattatttgttttgacttgaatttatccaccaaagacttcatttgtgtatcatcaataaagttgtatgtttcaactgacaaaaa

SEQ ID NO: 455706 - DNA, 2536 bp, Homo sapiens
tacaagttctgctgaggcttaggcagggcctgggatcaagagcagtttgcttttttccactgtagctgcagttgcacagagcccaaaaggaagacagaccctccaaagattcaaggctgtttctccttacttcagttcagttagagcctcacccggacgagcaggcatcccttaaccttaagcaatccagttccacgccctggatcagtgaataaccccagctgcaccatgagccgcgttcgggatgctggctgtgtagcggcggggatagtgataggggctggtgcctggtactgtgtctacaaatacaccagggggagagaccagaccaagaagagaatggccaagcccaaaaaccgggctgtggctgggactggagccagggctagagctgggctaagagccggattcacaatcgaccttgggtcaggattcagtcccccaaccccagtccgtgctgaagcagaggacagggcccaggatgaagcctctgctctggacacagttggagctgaggcagtggccccagctgcatccagcgctgaggctcagagtggggcaggcagtcaggcccaagaggcagatggagccggggttgggcctaaggccgaatcagtagttggggctgcaatggcttctgcaatagcaccacctcccggggtgacagaggcccttggggctgcagaagcccctgcaatggcaggggctcccaaagtggcagaagctcccagagaagcggagacttccagggcagcggtgcctcctgggacagtggtgcctaccgaagcggcagcacccactgaggtgaccgagggtcctggggtagcagcacctaccaaggtagctgaagctcccggggtggcatcgcctaccgaggcagctgaggctcctgtgcccgcaacgcctactggggctgcagcacctactggggctgcagagtctcctggaacttctggttcccctagaacagcggtggttcctggaacatcagctgccaagaaagcaacccctggggctcacactggggctataccgaaagccacatcagcgactggagcggtacccaaaggtggaggcaagggtgtaaccaggtcccggaatgggggcaagggcaagggcaagaaaagcaaagttgaagtagacgaactggggatgggcttccgtcctggagatggggctgcagcagctgctgcagcctctgctaatggcggacaggctttcctggcagaggtccctgattctgaggaaggggagtccgggtggactgacacagagtcagattcagactctgagcccgagacccagcgcagagggaggggaagaagacccgttgccatgcagaagcgcccctttccttatgaaattgatgagattctgggtgtccgcgatctcaggaaggtccttgccttgcttcagaaatctgatgatcctttcatccaacaggtagctttgctcactctgagcaacaatgccaattattcatgcaatcaagagacaatccgcaaattgggaggcctcccaattattgcaaacatgatcaacaaaactgatccacacattaaggaaaaagccttaatggccatgaataacctgagtgagaattatgaaaatcagggccggcttcaggtgtacatgaataaagtgatggatgatatcatggcctctaacctgaactcagcagttcaagtagttggactaaaatttctaacaaacatgactattactaatgactaccaacacctgcttgtcaattccattgcaaactttttccgtttgctatctcagggaggtggaaaaatcaaggttgagattttgaaaatcctttcgaattttgctgaaaatccagatatgttgaagaaacttctcagtacccaagtgccagcatcatttagttccctctataattcttacgtggaatcagaaatccttattaatgcccttactctatttgagattatctatgacaatctcagagcagaagtgtttaactatagagaattcaataaaggttcccttttttacttatgcactacatctggagtgtgtgttaagaaaattagagccttagcaaatcaccatgacctcttagtgaaagtgaaagttataaaactagtgaacaaattctgattggttatgtaccgtcaaaagacttgaagaaatttcatgattttgcagtgtggaagcgttgaaaattgaaagttactgcttttccacttgctcatatagtaaagggatcctttcagctgccagtgttgaataatgtatcatccagagtgatgttatctgtgacagtcaccagctttaagctgaaccattttatgaataccaaataaatagacctcttgtactgaaaacatatttgtgactttaatcgtgctgcttggatagaaatatttttactggttcttctgaattgacagtaaacctgtccattatgaatggcctactgttctattatttgttttgacttgaatttatccaccaaagacttcatttgtgtatcatcaataaagttgtatgtttcaactgacaaaaa

SEQ ID NO: 455707 - DNA, 799 bp, Homo sapiens
cgatctctgtttctctggaggaagccaaggacaagagcagttgctgtggctgggactctgccttttaggggagcccgtgtatctctttgggatcctgaaagggggcaggaaaggctggggtcccagtccaccctaatggtatctgagtgtcctagggcttcagttttcccacctgtccaatgggaccctttctgtcctcaccctacaaggggcacaaagggatgacaccaaacctggcaggaacttttcacgcaatcaagggaaggaaaggcattcctggcagagggaacagcatgccaagcgtgagaaggctcagagtaaggaggttaagagcccaagtattggagcctacagttttgccccttccatgcagtgtgacagtgggcaagttcctttccctctctgggtctcagttctgtcccctgcaaaatggtcagagcttaccccttggctgtgcagggtcaactttctgactggtgagagggattctcatgcaggttaagcttctgctgctcctcctcacctgcaaagcttttctgccacttttgcctccttggaaaactcttatccatctctcaaaactccagctaccacatccttgcagccttccctcatatacccccactactactgtagccctgtccttccctccagccccactctggccctggggctggggaagtgtctgtgtccagctgtctcccctgacctcagggttccttgggggctgggctgaggcctcagtacagagggggctctggaaatgtttgttgactgaataaaggaattcagtggaaaa

SEQ ID NO: 455708 - DNA, 4365 bp, Homo sapiens
gactgaggggctttttctctctgtgccccaggcaagttgcactcattatggaattccggcggcccgctaggcaagttgcactcatggcacctccaagtgaagagacgcccctgatccctcagcgttcatgcagcctcttgtccacggaggctggtgccctgcatgtgctgctgcccgctcggggccccggggcccccccagcgcctatctttctcctttggggaccacttggctgaggacctgtgcgtgcaggctgccaaggccagcggcatcctgcctgtgtaccactccctctttgctctggccacggaggacctgtcctgctggttccccccgagccacatcttctccgtggaggatgccagcacccaagtcctgctgtacaggattcgcttttacttccccaattggtttgggctggagaagtgccaccgcttcgggctacgcaaggatttggccagtgctatccttgacctgccagtcctggagcacctctttgcccagcaccgcagtgacctggtgagtgggcgcctccccgtgggcctcagtctcaaggagcagggtgagtgtctcagcctggccgtgttggacctggcccggatggcgcgagagcaggcccagcggccgggagagctgctgaagactgtcagctacaaggcctgcctacccccaagcctgcgcgacctgatccagggcctgagcttcgtgacgcggaggcgtattcggaggacggtgcgcagagccctgcgccgcgtggccgcctgccaggcagaccggcactcgctcatggccaagtacatcatggacctggagcggctggatccagccggggccgccgagaccttccacgtgggcctccctggggcccttggtggccacgacgggctggggctgctccgcgtggctggtgacggcggcatcgcctggacccagggagaacaggaggtcctccagcccttctgcgactttccagaaatcgtagacattagcatcaagcaggccccgcgcgttggcccggccggagagcaccgcctggtcactgttaccaggacagacaaccagattttagaggccgagttcccagggctgcccgaggctctgtcgttcgtggcgctcgtggacggctacttccggctgaccacggactcccagcacttcttctgcaaggaggtggcaccgccgaggctgctggaggaagtggccgagcagtgccacggccccatcactctggactttgccatcaacaagctcaagactgggggctcacgtcctggctcctatgttctccgccgcagcccccaggactttgacagcttcctcctcactgtctgtgtccagaacccccttggtcctgattataagggctgcctcatccggcgcagccccacaggaaccttccttctggttggcctcagccgaccccacagcagtcttcgagagctcctggcaacctgctgggatggggggctgcacgtagatggggtggcagtgaccctcacttcctgctgtatccccagacccaaagaaaagtccaacctgatcgtggtccagagaggtcacagcccacccacatcatccttggttcagccccaatcccaataccagctgagtcagatgacatttcacaagatccctgctgacagcctggagtggcatgagaacctgggccatgggtccttcaccaagatttaccggggctgtcgccatgaggtggtggatggggaggcccgaaagacagaggtgctgctgaaggtcatggatgccaagcacaagaactgcatggagtcattcctggaagcagcgagcttgatgagccaagtgtcgtaccggcatctcgtgctgctccacggcgtgtgcatggctggagacagcaccatggtgcaggaatttgtacacctgggggccatagacatgtatctgcgaaaacgtggccacctggtgccagccagctggaagctgcaggtggtcaaacagctggcctacgccctcaactatctggaggacaaaggcctgccccatggcaatgtctctgcccggaaggtgctcctggctcgggagggggctgatgggagcccgcccttcatcaagctgagtgaccctggggtcagccccgctgtgttaagcctggagatgctcaccgacaggatcccctgggtggcccccgagtgtctccgggaggcgcagacacttagcttggaagctgacaagtggggcttcggcgccacggtctgggaagtgtttagtggcgtcaccatgcccatcagtgccctggatcctgctaagaaactccaattttatgaggaccggcagcagctgccggcccccaagtggacagagctggccctgctgattcaacagtgcatggcctatgagccggtccagaggccctccttccgagccgtcattcgtgacctcaatagcctcatctcttcagactatgagctcctctcagaccccacacctggtgccctggcacctcgtgatgggctgtggaatggtgcccagctctatgcctgccaagaccccacgatcttcgaggagagacacctcaagtacatctcacagctgggcaagggcaactttggcagcgtggagctgtgccgctatgacccgctaggcgacaatacaggtgccctggtggccgtgaaacagctgcagcacagcgggccagaccagcagagggactttcagcgggagattcagatcctcaaagcactgcacagtgatttcattgtcaagtatcgtggtgtcagctatggcccgggccgccagagcctgcggctggtcatggagtacctgcccagcggctgcttgcgcgacttcctgcagcggcaccgcgcgcgcctcgatgccagccgcctccttctctattcctcgcagatctgcaagggcatggagtacctgggctcccgccgctgcgtgcaccgcgacctggccgcccgaaacatcctcgtggagagcgaggcacacgtcaagatcgctgacttcggcctagctaagctgctgccgcttgacaaagactactacgtggtccgcgagccaggccagagccccattttctggtatgcccccgaatccctctcggacaacatcttctctcgccagtcagacgtctggagcttcggggtcgtcctgtacgagctcttcacctactgcgacaaaagctgcagcccctcggccgagttcctgcggatgatgggatgtgagcgggatgtccccgccctctgccgcctcttggaactgctggaggagggccagaggctgccggcgcctcctgcctgccctgctgaggttcacgagctcatgaagctgtgctgggcccctagcccacaggaccggccatcattcagcgccctgggcccccagctggacatgctgtggagcggaagccgggggtgtgagactcatgccttcactgctcacccagagggcaaacaccactccctgtccttttcatagctcctgcccgcagacctctggattaggtctctgttgactggctgtgtgaccttaggcccggagctgcccctctctgggcctcagaggccttatgagggtcctctacttcaggaacacccccatgacattgcatttgggggggctcccgtggcctgtagaatagcctgtggcctttgcaatttgttaaggttcaagacagatgggcatatgtgtcagtggggctctctgagtcctggcccaaagaagcaaggaaccaaatttaagactctcgcatcttcccaaccccttaagccctggccccctgagtttccttttctcgtctctctctttttattttttttatttttatttttatttttgagacagagcctcgctctgttacccagggtggagtgcagtggtagcgatctcggctcacagtgcaacctctgcttcccaggttcaagcgattctcctgcctcagcctcccgagtagctgggattacaggtgtgcaccaccacacccggctaattttttttatttttaatagagatgaggtttcaccatgatggccaggctgatctcgaactcctaacctcaagtgatcctcccacctcagcctcccaaagtgttggaataataggcatgagccactgcacccaggcttttttttttttaaatttattattattatttttaagagacaggatcttgctacgttgcccaggctggtcttgaactcctgggctacagtgatcctcctgccttatcctcctaaatagctgggactacagcacctagttttgagtttcctgtcttatttccaatggggacattcatgtagctttttttttttttttttttttgagacggagtctcgctctgtcgcccaggctggagtacagtggcgcaatctaggctcactg

SEQ ID NO: 455709 - DNA, 3620 bp, Homo sapiens
  misc_feature (3)..(5): n is a, c, g, or t
  misc_feature (3549)..(3550): n is a, c, g, or t
aannngccgagtgggactttcctctcgctgcctcccggctctgcccgcccttcgaaagtccagggtccctgcccgctagaggcaagttgcactcatggcacctccaagtgaagagacgcccctgatccctcagcgttcatgcagcctcttgtccacggaggctggtgccctgcatgtgctgctgcccgctcggggccccggggcccccccagcgcctatctttctcctttggggaccacttggctgaggacctgtgcgtgcaggctgccaaggccagcggcatcctgcctgtgtaccactccctctttgctctggccacggaggacctgtcctgctggttccccccgagccacatcttctccgtggaggatgccagcacccaagtcctgctgtacaggattcgcttttacttccccaattggtttgggctggagaagtgccaccgcttcgggctacgcaaggatttggccagtgctatccttgacctgccagtcctggagcacctctttgcccagcaccgcagtgacctggtgagtgggcgcctccccgtgggcctcagtctcaaggagcagggtgagtgtctcagcctggccgtgttggacctggcccggatggcgcgagagcaggcccagcggccgggagagctgctgaagactgtcagctacaaggcctgcctacccccaagcctgcgcgacctgatccagggcctgagcttcgtgacgcggaggcgtattcggaggacggtgcgcagagccctgcgccgcgtggccgcctgccaggcagaccggcactcgctcatggccaagtacatcatggacctggagcggctggatccagccggggccgccgagaccttccacgtgggcctccctggggcccttggtggccacgacgggctggggctgctccgcgtggctggtgacggcggcatcgcctggacccagggagaacaggaggtcctccagcccttctgcgactttccagaaatcgtagacattagcatcaagcaggccccgcgcgttggcccggccggagagcaccgcctggtcactgttaccaggacagacaaccagattttagaggccgagttcccagggctgcccgaggctctgtcgttcgtggcgctcgtggacggctacttccggctgaccacggactcccagcacttcttctgcaaggaggtggcaccgccgaggctgctggaggaagtggccgagcagtgccacggccccatcactctggactttgccatcaacaagctcaagactgggggctcacgtcctggctcctatgttctccgccgcagcccccaggactttgacagcttcctcctcactgtctgtgtccagaacccccttggtcctgattataagggctgcctcatccggcgcagccccacaggaaccttccttctggttggcctcagccgaccccacagcagtcttcgagagctcctggcaacctgctgggatggggggctgcacgtagatggggtggcagtgaccctcacttcctgctgtatccccagacccaaagaaaagtccaacctgatcgtggtccagagaggtcacagcccacccacatcatccttggttcagccccaatcccaataccagctgagtcagatgacatttcacaagatccctgctgacagcctggagtggcatgagaacctgggccatgggtccttcaccaagatttaccggggctgtcgccatgaggtggtggatggggaggcccgaaagacagaggtgctgctgaaggtcatggatgccaagcacaagaactgcatggagtcattcctggaagcagcgagcttgatgagccaagtgtcgtaccggcatctcgtgctgctccacggcgtgtgcatggctggagacagcaccatggtgcaggaatttgtacacctgggggccatagacatgtatctgcgaaaacgtggccacctggtgccagccagctggaagctgcaggtggtcaaacagctggcctacgccctcaactatctggaggacaaaggcctgccccatggcaatgtctctgcccggaaggtgctcctggctcgggagggggctgatgggagcccgcccttcatcaagctgagtgaccctggggtcagccccgctgtgttaagcctggagatgctcaccgacaggatcccctgggtggcccccgagtgtctccgggaggcgcagacacttagcttggaagctgacaagtggggcttcggcgccacggtctgggaagtgtttagtggcgtcaccatgcccatcagtgccctggatcctgctaagaaactccaattttatgaggaccggcagcagctgccggcccccaagtggacagagctggccctgctgattcaacagtgcatggcctatgagccggtccagaggccctccttccgagccgtcattcgtgacctcaatagcctcatctcttcagactatgagctcctctcagaccccacacctggtgccctggcacctcgtgatgggctgtggaatggtgcccagctctatgcctgccaagaccccacgatcttcgaggagagacacctcaagtacatctcacagctgggcaagggcaactttggcagcgtggagctgtgccgctatgacccgctaggcgacaatacaggtgccctggtggccgtgaaacagctgcagcacagcgggccagaccagcagagggactttcagcgggagattcagatcctcaaagcactgcacagtgatttcattgtcaagtatcgtggtgtcagctatggcccgggccgccagagcctgcggctggtcatggagtacctgcccagcggctgcttgcgcgacttcctgcagcggcaccgcgcgcgcctcgatgccagccgcctccttctctattcctcgcagatctgcaagggcatggagtacctgggctcccgccgctgcgtgcaccgcgacctggccgcccgaaacatcctcgtggagagcgaggcacacgtcaagatcgctgacttcggcctagctaagctgctgccgcttgacaaagactactacgtggtccgcgagccaggccagagccccattttctggtatgcccccgaatccctctcggacaacatcttctctcgccagtcagacgtctggagcttcggggtcgtcctgtacgagctcttcacctactgcgacaaaagctgcagcccctcggccgagttcctgcggatgatgggatgtgagcgggatgtccccgccctctgccgcctcttggaactgctggaggagggccagaggctgccggcgcctcctgcctgccctgctgaggtgagcgccgcagggctagcctcagtttcccagtctgtagattgggccggggtctcgggcaagccagctggcgcctgagtctctgtactgagaagaaaggctagagtgtgaggccgatgaggatcctggcccccacttggctactctctcactgtggcaagtcagagcactttcagagcctcagtttacccttttccaaaatgagaatagtaatgccttatagggtgagggaagattagactcctgnncacctgtgcctatgagggctcagctcaaagccgagcacacagtcgatgctccataaatggtggtgacgtt

SEQ ID NO: 455710 - DNA, 913 bp, Homo sapiens
cgatctctgtttctctggaggaagccaaggacaagagcagttgctgtggctgggactctgccttttaggggagcccgtgtatctctttgggatcctgaaagggggcaggaaaggctggggtcccagtccaccctaatggtatctgagtgtcctagggcttcagttttcccacctgtccaatgggaccctttctgtcctcaccctacaaggggcacaaagggatgacaccaaacctggcaggaacttttcacgcaatcaagggaaggaaaggcattcctggcagagggaacagcatgccaagcgtgagaaggctcagagtaaggaggttaagagcccaagtattggagcctacagttttgccccttccatgcagtgtgacagtgggcaagttcctttccctctctgggtctcagttctgtcccctgcaaaatggtcagagcttaccccttggctgtgcagggtcaactttctgactggtgagagggattctcatgcaggttaagcttctgctgctcctcctcacctgcaaagcttttctgccacttttgcctccttggaaaactcttatccatctctcaaaactccagctaccacatccttgcagccttccctcatatacccccactactactgtagccctgtccttccctccagccccactctggccctggggctggggaagtgtctgtgtccagctgtctcccctgacctcagggttccttgggggctgggctgaggcctcagtacagagggggctctggaaatgtttgttgactgaataaaggaattcagtggaaaaaaaaaaataggaaataaaagatctcggaaaatagcattttgttaaaaccttggggggtaaaaccccggggagttttaacggaaaaattccagggaacacaacttgggggccaaa

SEQ ID NO: 455711 - DNA, 767 bp, Homo sapiens
gactgaggggctttttctctctgtgccccaggcaagttgcactcatggcacctccaagtgaagagacgcccctgatccctcagcgttcatgcagcctcttgtccacggaggctggtgccctgcatgtgctgctgcccgctcggggccccggggcccccccagcgcctatctttctcctttggggaccacttggctgaggacctgtgcgtgcaggctgccaaggccagcggcatcctgcctgtgtaccactccctctttgctctggccacggaggacctgtcctgctggttccccccgagccacatcttctccgtggaggatgccagcacccaagtcctgctgtacaggattcgccttttacttccccaattggaatagggctggcagaagtggcaccggattcggggactacgacaaagggaatttgggccaagtggctaatcccttgaaccatgccaagtacctgggaagccaccctcctaatggcccagacaccggcacgtgaacctgggttgagataggagcgccatcaccccgatgggccctcaaattctccaaagggagcaaggcgtgagtggtctcgagcactgggaccgaagtacggaacctggcccccggaatgggacgcgagaagcaggcacacagaggcccgggaagaagctggctggaaagaaccaggtcaagcaaacaaggggcctgagcctaaccccacaaaggccctgacgcgaaacctggaatcccagggggccctggagccatacagatga

SEQ ID NO: 455712 - DNA, 2204 bp, Homo sapiens
gactgaggggctttttctctctgtgccccaggcaagttgcactcattatggaattccggcggcccgctaggcaagttgcactcatggcacctccaagtgaagagacgcccctgatccctcagcgttcatgcagcctcttgtccacggaggctggtgccctgcatgtgctgctgcccgctcggggccccggggcccccccagcgcctatctttctcctttggggaccacttggctgaggacctgtgcgtgcaggctgccaaggccagcggcatcctgcctgtgtaccactccctctttgctctggccacggaggacctgtcctgctggttccccccgagccacatcttctccgtggaggatgccagcacccaagtcctgctgtacaggattcgcttttacttccccaattggtttgggctggagaagtgccaccgcttcgggctacgcaaggatttggccagtgctatccttgacctgccagtcctggagcacctctttgcccagcaccgcagtgacctggtgagtgggcgcctccccgtgggcctcagtctcaaggagcagggtgagtgtctcagcctggccgtgttggacctggcccggatggcgcgagagcaggcccagcggccgggagagctgctgaagactgtcagctacaaggcctgcctacccccaagcctgcgcgacctgatccagggcctgagcttcgtgacgcggaggcgtattcggaggacggtgcgcagagccctgcgccgcgtggccgcctgccaggcagaccggcactcgctcatggccaagtacatcatggacctggagcggctggatccagccggggccgccgagaccttccacgtgggcctccctggggcccttggtggccacgacgggctggggctgctccgcgtggctggtgacggcggcatcgcctggacccagggagaacaggaggtcctccagcccttctgcgactttccagaaatcgtagacattagcatcaagcaggccccgcgcgttggcccggccggagagcaccgcctggtcactgttaccaggacagacaaccagattttagaggccgagttcccagggctgcccgaggctctgtcgttcgtggcgctcgtggacggctacttccggctgaccacggactcccagcacttcttctgcaaggaggtggcaccgccgaggctgctggaggaagtggccgagcagtgccacggccccatcactctggactttgccatcaacaagctcaagactgggggctcacgtcctggctcctatgttctccgccgcagcccccaggactttgacagcttcctcctcactgtctgtgtccagaacccccttggtcctgattataagggctgcctcatccggcgcagccccacaggaaccttccttctggttggcctcagccgaccccacagcagtcttcgagagctcctggcaacctgctgggatggggggctgcacgtagatggggtggcagtgaccctcacttcctgctgtatccccagacccaaaggtgagccccttcctcccctggaatgagtggctgatctgggaccctggctttctatgtctgtgacagctcctgtgtgggtggcaagtggcagaaactgcaggtcaaggtgggttagggaagaaaaggtgatttgttggctcaggaagttagagatatataacctttaggtctggcttgatctaggcacagctagatgtgagccatgtcatctgcacctagtctctctccagctctcagctcttcctctgggtgaatttcactcctggacaaacccctctgatgggacaattctgagatgtgagttcttctgagtctcccagaatccctggtagaaccgatccctggttgtccacagtgccacttgctcattaaagccccctgcagggctccttccttccttgtcgctcatcccaaatccctatgggggctttctggatctcctttcaaataaaccatgtgccagccaggcacagtggctcacgtctgtaataccagcacttcgggaggctgaggcagatggatcacctgaggtcaggagtttgagaccagcgtggccaacatggcgaaactccatctctactaaaaatacaaaaattagctgggtgtgctggcacactcctgtagtcccagctacttgggaggctgaggcaggagaattacttgaacccagagagccgga

SEQ ID NO: 455713 - DNA, 314 bp, Homo sapiens
gactgaggggctttttctctctgtgccccaggcaagttgcactcatggcacctccaagtgaagagacgcccctgatccctcagcgttcatgcagcctcttgtccacggaggctggtgccctgcatgtgctgctgcccgctcggggccccggggcccccccagcgcctatctttctcctgtggggtccctgtccgacctgtgggcgccaatggccctcccctgacctcagggttccttgggggctgggctgaggcctcagtacagagggggctctggaaatgtttgttgactgaataaaggaattcagtggaaaa

SEQ ID NO: 455714 - DNA, 297 bp, Homo sapiens
gagattcagatcctcaaagcactgcacagtgatttcattgtcaagtatcgtggtgtcagctatggcccgggtgagccagctcccggatgagtgaaccaagacgtatgggtgcttttcaaagtgcacattcttaccctcctgccaggccactttaggtaggctgggaacgtgattattgatccagattcacatgggttacaggtttgaatcctgactctaccccttaccagttgtgaaaccttaacttttctgagcctcagtttctccagctgaaaaatgggccattgtgatatttac

SEQ ID NO: 455715 - DNA, 775 bp, Homo sapiens
gctgagatcgcaccactgcccacccagcctggatgacagagtgagactccgtctcaacagcagcagcaacaacaaaacaaaaacaacaacaaaaagccatgtgccctgaagtcttcatctcagggtcggcttctagagggtacctcaaactaaggcatgagttagctaacccttggggacttttcacctctgatttctggtttttctccctcatcctctccccatagaaaagtccaacctgatcgtggtccagagaggtcacagcccacccacatcatccttggttcagccccaatcccaataccagctgagtcagatgacatttcacaagatccctgctgacagcctggagtggcatgagaacctgggccatgggtccttcaccaagatttaccggggctgtcgccatgaggtggtggatggggaggcccgaaagacagaggtgctgctgaaggtcatggatgccaagcacaagaactgcatggagtcattcctggaagcagcgagcttgatgagccaagtgtcgtaccggcatctcgtgctgctccacggcgtgtgcatggctggagacagtgagaagccccacgaaaagacaaaaacacacaacacataacgcaaccacagattctgtcgtcacgagatactgttatgacatgtaatactaacgagaaggcaataatagaaccacagagagaaacgggcagaggccagtgtacataaagaattacacaaacacaatcaacaggacataacaatagaacagaaataacgcaca

SEQ ID NO: 455716 - DNA, 4649 bp, Homo sapiens
gactgaggggctttttctctctgtgccccaggcaagttgcactcattatggaattccggcggcccgctaggcaagttgcactcatggcacctccaagtgaagagacgcccctgatccctcagcgttcatgcagcctcttgtccacggaggctggtgccctgcatgtgctgctgcccgctcggggccccggggcccccccagcgcctatctttctcctttggggaccacttggctgaggacctgtgcgtgcaggctgccaaggccagcggcatcctgcctgtgtaccactccctctttgctctggccacggaggacctgtcctgctggttccccccgagccacatcttctccgtggaggatgccagcacccaagtcctgctgtacaggattcgcttttacttccccaattggtttgggctggagaagtgccaccgcttcgggctacgcaaggatttggccagtgctatccttgacctgccagtcctggagcacctctttgcccagcaccgcagtgacctggtgagtgggcgcctccccgtgggcctcagtctcaaggagcagggtgagtgtctcagcctggccgtgttggacctggcccggatggcgcgagagcaggcccagcggccgggagagctgctgaagactgtcagctacaaggcctgcctacccccaagcctgcgcgacctgatccagggcctgagcttcgtgacgcggaggcgtattcggaggacggtgcgcagagccctgcgccgcgtggccgcctgccaggcagaccggcactcgctcatggccaagtacatcatggacctggagcggctggatccagccggggccgccgagaccttccacgtgggcctccctggggcccttggtggccacgacgggctggggctgctccgcgtggctggtgacggcggcatcgcctggacccagggagaacaggaggtcctccagcccttctgcgactttccagaaatcgtagacattagcatcaagcaggccccgcgcgttggcccggccggagagcaccgcctggtcactgttaccaggacagacaaccagattttagaggccgagttcccagggctgcccgaggctctgtcgttcgtggcgctcgtggacggctacttccggctgaccacggactcccagcacttcttctgcaaggaggtggcaccgccgaggctgctggaggaagtggccgagcagtgccacggccccatcactctggactttgccatcaacaagctcaagactgggggctcacgtcctggctcctatgttctccgccgcagcccccaggactttgacagcttcctcctcactgtctgtgtccagaacccccttggtcctgattataagggctgcctcatccggcgcagccccacaggaaccttccttctggttggcctcagccgaccccacagcagtcttcgagagctcctggcaacctgctgggatggggggctgcacgtagatggggtggcagtgaccctcacttcctgctgtatccccagacccaaagaaaagtccaacctgatcgtggtccagagaggtcacagcccacccacatcatccttggttcagccccaatcccaataccagctgagtcagatgacatttcacaagatccctgctgacagcctggagtggcatgagaacctgggccatgggtccttcaccaagatttaccggggctgtcgccatgaggtggtggatggggaggcccgaaagacagaggtgctgctgaaggtcatggatgccaagcacaagaactgcatggagtcattcctggaagcagcgagcttgatgagccaagtgtcgtaccggcatctcgtgctgctccacggcgtgtgcatggctggagacagcaccatggtgcaggaatttgtacacctgggggccatagacatgtatctgcgaaaacgtggccacctggtgccagccagctggaagctgcaggtggtcaaacagctggcctacgccctcaactatctggaggacaaaggcctgccccatggcaatgtctctgcccggaaggtgctcctggctcgggagggggctgatgggagcccgcccttcatcaagctgagtgaccctggggtcagccccgctgtgttaagcctggagatgctcaccgacaggatcccctgggtggcccccgagtgtctccgggaggcgcagacacttagcttggaagctgacaagtggggcttcggcgccacggtctgggaagtgtttagtggcgtcaccatgcccatcagtgccctggatcctgctaagaaactccaattttatgaggaccggcagcagctgccggcccccaagtggacagagctggccctgctgattcaacagtgcatggcctatgagccggtccagaggccctccttccgagccgtcattcgtgacctcaatagcctcatctcttcagactatgagctcctctcagaccccacacctggtgccctggcacctcgtgatgggctgtggaatggtgcccagctctatgcctgccaagaccccacgatcttcgaggagagacacctcaagtacatctcacagctgggcaagggcaactttggcagcgtggagctgtgccgctatgacccgctaggcgacaatacaggtgccctggtggccgtgaaacagctgcagcacagcgggccagaccagcagagggactttcagcgggagattcagatcctcaaagcactgcacagtgatttcattgtcaagtatcgtggtgtcagctatggcccgggccgccagagcctgcggctggtcatggagtacctgcccagcggctgcttgcgcgacttcctgcagcggcaccgcgcgcgcctcgatgccagccgcctccttctctattcctcgcagatctgcaagggcatggagtacctgggctcccgccgctgcgtgcaccgcgacctggccgcccgaaacatcctcgtggagagcgaggcacacgtcaagatcgctgacttcggcctagctaagctgctgccgcttgacaaagactactacgtggtccgcgagccaggccagagccccattttctggtatgcccccgaatccctctcggacaacatcttctctcgccagtcagacgtctggagcttcggggtcgtcctgtacgagctcttcacctactgcgacaaaagctgcagcccctcggccgtgagtcggcttcccagagcccccagccttcttctccctccacgcccctcgtggccagtctccaacctgtctgcgcctgcgtccctctttagcatggggtcacctggtcccagcatcataggccccagtggggaggacgcttcctcacctttctgaccccttcacggttcaggcagcccctccccgctccatcacagatggcccctacccccaccacgggtggcccctccccctccacccacggaggctcctcccccaccacatgcgctcctccttggctccaggagttcctgcggatgatgggatgtgagcgggatgtccccgccctctgccgcctcttggaactgctggaggagggccagaggctgccggcgcctcctgcctgccctgctgaggttcacgagctcatgaagctgtgctgggcccctagcccacaggaccggccatcattcagcgccctgggcccccagctggacatgctgtggagcggaagccgggggtgtgagactcatgccttcactgctcacccagagggcaaacaccactccctgtccttttcatagctcctgcccgcagacctctggattaggtctctgttgactggctgtgtgaccttaggcccggagctgcccctctctgggcctcagaggccttatgagggtcctctacttcaggaacacccccatgacattgcatttgggggggctcccgtggcctgtagaatagcctgtggcctttgcaatttgttaaggttcaagacagatgggcatatgtgtcagtggggctctctgagtcctggcccaaagaagcaaggaaccaaatttaagactctcgcatcttcccaaccccttaagccctggccccctgagtttccttttctcgtctctctctttttattttttttatttttatttttatttttgagacagagcctcgctctgttacccagggtggagtgcagtggtagcgatctcggctcacagtgcaacctctgcttcccaggttcaagcgattctcctgcctcagcctcccgagtagctgggattacaggtgtgcaccaccacacccggctaattttttttatttttaatagagatgaggtttcaccatgatggccaggctgatctcgaactcctaacctcaagtgatcctcccacctcagcctcccaaagtgttggaataataggcatgagccactgcacccaggcttttttttttttaaatttattattattatttttaagagacaggatcttgctacgttgcccaggctggtcttgaactcctgggctacagtgatcctcctgccttatcctcctaaatagctgggactacagcacctagttttgagtttcctgtcttatttccaatggggacattcatgtagctttttttttttttttttttttgagacggagtctcgctctgtcgcccaggctggagtacagtggcgcaatctaggctcactg

SEQ ID NO: 455717 - DNA, 172 bp, Homo sapiens
aaaaaaaggaagaaggactgagaaggagagtgtctgtcgctcagtcccactcaggggccactcttctttgcagaacccccttggtcctgattataagggctgcctcatccggcgcagccccacaggaaccttccttctggttggcctcagccgaccccacagcagtcttcga

SEQ ID NO: 455718 - DNA, 1143 bp, Homo sapiens
agcgggccttccctccgcccacccgggaaaccggaagccgcctcccacttggttgctcgtacgcggctagtgggtcctcagtggatgtaggctgggcgccgcgatgttcgacgggacaccggcggagagcgacctcggggttaaggggtggggctgacgtcaggagccaagatggcggcggtggtcgcactctccttgaggcgccggttgccggccacaacccttggcggagcctgcctgcaggcctcccgaggagcccagacagctgcagccacagctccccgtatcaagaaatttgccatctatcgatgggacccagacaaggctggagacaaacctcatatgcagacttatgaagttgaccttaataaatgtggccccatggtattggatgctttaatcaagattaagaatgaagttgactctactttgaccttccgaagatcatgcagagaaggcatctgtggctcttgtgcaatgaacatcaatggaggcaacactctagcttgcacccgaaggattgacaccaacctcaataaggtctcaaaaatctaccctcttccacacatgtatgtgataaaggatcttgttcccgatttgagcaacttctatgcacagtacaaatccattgagccttatttgaagaagaaggatgaatctcaggaaggcaagcagcagtatctgcagtccatagaagagcgtgagaaactggacgggctctacgagtgcattctctgtgcctgctgtagcaccagctgccccagctactggtggaacggagacaaatatctggggcctgcagttcttatgcaggcctatcgctggatgattgactccagagatgacttcacagaggagcgcctggccaagctgcaggacccattctctctataccgctgccacaccatcatgaactgcacaaggacctgtcctaagggtctgaatccagggaaagctattgcagagatcaagaaaatgatggcaacctataaggagaagaaagcttcagtttaactgtttccatgctaaacatgatttataaccagctcagagctgaacataatttatatctaatttgagttcctttaaagatcttggttttccatgaatacagcatgtataataaaaattttaagaaataaa

SEQ ID NO: 455719 - DNA, 760 bp, Homo sapiens
gtgcctcctgcaaagcagatgttaacagctgtaggggcaaactgcagctaataccaatggtattggccagttgaaatcatcatggttttacaaagggttaatagagagggtagtttcttccacatacttttgagagctggtatatgctgatttctgctgctgcctatttaataatgatgatgtaaaagatttagagatgtctggctgattttgacattggcctgtagtcctagaagagacactaccctgagtgtctttgagcagtcagagagtgcacctctgccctgggcctgtttacctgttagagtgagccacacaagaaggaattcaacgtggcagagctcttgccagagggagctgaccatcttcaaatgttaaaaaaggtagacagaagagagcccttagcccaacccctatggttttgagggacttgatttgcattcaccttgcttggacactgaaccagctgaggaaggagtttcacccaagattgtgggttttccctttcagtttcagttatcatttgttattgattcttttctcttttttcaagggtctgaatccagggaaagctattgcagagatcaagaaaatgatggcaacctataaggagaagaaagcttcagtttaactgtttccatgctaaacatgatttataaccagctcagagctgaacataatttatatctaatttgagttcctttaaagatcttggttttccatgaatacagcatgtataataaaaattttaagaaataaa

SEQ ID NO: 455720 - DNA, 1785 bp, Homo sapiens
agcgggccttccctccgcccacccgggaaaccggaagccgcctcccacttggttgctcgtacgcggctagtgggtcctcagtggatgtaggctgggcgccgcgatgttcgacgggacaccggcggagagcgacctcggggttaaggggtggggctgacgtcaggagccaagatggcggcggtggtcgcactctccttgaggcgccggttgccggccacaacccttggcggagcctgcctgcaggcctcccgaggagcccagacagctgcagccacagctccccgtatcaagaaatttgccatctatcgatgggacccagacaaggctggagacaaacctcatatgcagacttatgaagttgaccttaataaatgtggccccatggtattggatgctttaatcaagattaagaatgaagttgactctactttgaccttccgaagatcatgcagagaaggcatctgtggctcttgtgcaatgaacatcaatggaggcaacactctagcttgcacccgaaggattgacaccaacctcaataaggtctcaaaaatctaccctcttccacacatgtatgtgataaaggatcttgttcccgatttgagcaacttctatgcacagtacaaatccattgagccttatttgaagaagaaggatgaatctcaggaaggcaagcagcagtatctgcagtccatagaagagcgtgagaaactggacgggctctacgagtgcattctctgtgcctgctgtagcaccagctgccccagctactggtggaacggagacaaatatctggggcctgcagttcttatgcaggcctatcgctggatgattgactccagagatgacttcacagaggagcgcctggccaagctgcaggacccattctctctataccgctgccacaccatcatgaactgcacaaggacctgtcctaagggtctgaatccagggaaagctattgcagagatcaagaaaatgatggcaacctataaggagaagaaagcttcagtttaactgtttccatgctaaacatgatttataaccagctcagagctgaacataatttatatctaatttgagttcctttaaagatcttggttttccatgaatacagcatgtataataaaaattttaagaaataaaaaaaaaaaaaaaagaaaaaaaaaaaaaaaaaaaaaaaaaaaaaaaaaaaaaaaaaaaagaacagaaaaaaagaaaaaaaaaaaacaaaaaaaaaaaaaaaaaaagaaaaaaaaaacaaaaaaaaaaaaagaagaggaggcgggcgcggcggcgcgccacctacactactcatcgacgcgcggggcgggaacataagcgacccgccccagttttttgtgatagagcgcggcgccctagtactgtggattttttataatagcgagagcggcggcgcgagctatacaaaacaaagcacgaagggaggggggaaagccaccgcgacagcgacggtcgacacatcagaagaaaagaaacaaaccacatcctggggggggcaatgaaagaagagaggaggggacaacacaaccacaacacaataagaaactgtctggcggagataatcaaacaaacctgacagctcaggagaatcagaacgaaatacacccgcaacagatatcgtcgggtaagagaaaaaaacaagtcaggaacacgcgaatcaaagaaagacaaaaaaatatatagaaggaggaggacaaaaaataaagaaacaagaggtgagcgacaccgagagaaagcgggagcggtatcctgcagggagtagaa

SEQ ID NO: 455721 - DNA, 1226 bp, Homo sapiens
atttcataggtcatttttgtaattccaggcaaggtctttgcagggcctcctgagggcaacagaaaatagaagagccccaaggcctccccttccttgtgggaatgtacatgtatacccacaaaagccacctcaaaagaattcagtaatgagcttggtgtgttacctgtgggtaacattcaggttcaggttctgaattctttttatgcttatagtctgaccactgaaccacaattctgcctgcctcccgaggagcccagacagctgcagccacagctccccgtatcaagaaatttgccatctatcgatgggacccagacaaggctggagacaaacctcatatgcagacttatgaagttgaccttaataaatgtggccccatggtattggatgctttaatcaagattaagaatgaagttgactctactttgaccttccgaagatcatgcagagaaggcatctgtggctcttgtgcaatgaacatcaatggaggcaacactctagcttgcacccgaaggattgacaccaacctcaataaggtctcaaaaatctaccctcttccacacatgtatgtgataaaggatcttgttcccgatttgagcaacttctatgcacagtacaaatccattgagccttatttgaagaagaaggatgaatctcaggaaggcaagcagcagtatctgcagtccatagaagagcgtgagaaactggacgggctctacgagtgcattctctgtgcctgctgtagcaccagctgccccagctactggtggaacggagacaaatatctggggcctgcagttcttatgcaggcctatcgctggatgattgactccagagatgacttcacagaggagcgcctggccaagctgcaggacccattctctctataccgctgccacaccatcatgaactgcacaaggacctgtcctaagggtctgaatccagggaaagctattgcagagatcaagaaaatgatggcaacctataaggagaagaaagcttcagtttaactgtttccatgctaaacatgatttataaccagctcagagctgaacataatttatatctaatttgagttcctttaaagatcttggttttccatgaatacagcatgtataataaaaattttaagaaataaatgttattctactttattaacaaaaaaacctaataaaaatctttcaggggggggcccggttccccaaattccgccttttggggagtca

SEQ ID NO: 455722 - DNA, 1092 bp, Homo sapiens
tatttcttaaaatttttattatacatgctgtattcatggaaaaccaagatctttaaaggaactcaaattagatataaattatgttcagctctgagctggttataaatcatgtttagcatggaaacagttaaactgaagctttcttctccttataaatttgccatctatcgatgggacccagacaaggctggagacaaacctcatatgcagacttatgaagttgaccttaataaatgtggccccatggtattggatgctttaatcaagattaagaatgaagttgactctactttgaccttccgaagatcatgcagagaaggcatctgtggctcttgtgcaatgaacatcaatggaggcaacactctagcttgcacccgaaggattgacaccaacctcaataaggtctcaaaaatctaccctcttccacacatgtatgtgataaaggatcttgttcccgatttgagcaacttctatgcacagtacaaatccattgagccttatttgaagaagaaggatgaatctcaggaaggcaagcagcagtatctgcagtccatagaagagcgtgagaaactggacgggctctacgagtgcattctctgtgcctgctgtagcaccagctgccccagctactggtggaacggagacaaatatctggggcctgcagttcttatgcaggcctatcgctggatgattgactccagagatgacttcacagaggagcgcctggccaagctgcaggacccattctctctataccgctgccacaccatcatgaactgcacaaggacctgtcctaagggtctgaatccagggaaagctattgcagagatcaagaaaatgatggcaacctataaggagaagaaagcttcagtttaactgtttccatgctaaacatgatttataaccagctcagagctgaacataatttatatctaatttgagttcctttaaagatcttggttttccatgaatacagcatgtataataaaaattttaagaaataaatgttattctactttattaacaaaaaaacctaataaaaatctttcaggggggggcccggttccccaaattccgccttttggggagtca

SEQ ID NO: 455723 - DNA, 954 bp, Homo sapiens
agcgggccttccctccgcccacccgggaaaccggaagccgcctcccacttggttgctcgtacgcggctagtgggtcctcagtggatgtaggctgggcgccgcgatgttcgacgggacaccggcggagagcgacctcggggttaaggggtggggctgacgtcaggagccaagatggcggcggtggtcgcactctccttgaggcgccggttgccggccacaacccttggcggagcctgcctgcaggcctcccgaggagcccagacagctgcagccacagctccccgtatcaagaaatttgccatctatcgatgggacccagacaaggctggagacaaacctcatatgcagacttatgaagttgaccttaataaatgtggccccatggtattggatgctttaatcaagattaagaatgaagttgactctactttgaccttccgaagatcatgcagagaaggtgagcatttcattcctgttgggctccagatacttgtggtcttccaaagaggcttgggctggccaaagctgatagagacatctggaaaacagctgcagctctctgctgggtgaacttgctgtgcaacctaattccttttcttgggtaaatgcatccaaaattctaaccgtggtgcaagttctggtttctgagtttactttccttcaggagcattctatcctgtggttactgcatctggcggtccctgtgagctgctccacgcttcaaggcctagctaggacctgctggctggcaccttccatgctgctgagctcttttattaagggagcagtggagagtttctgtctggcacttatgcttgtccagcaggggagatgtgtgagtctccctcagctcccagcatgacatgtccttggtagctgtgttctggattggctggtacagtgtctccctcagcatgtggttacttgtgctgctggtgccacatgagcccattt

SEQ ID NO: 455724 - DNA, 847 bp, Homo sapiens
gtgcctcctgcaaagcagatgttaacagctgtaggggcaaactgcagctaataccaatggtattggccagttgaaatcatcatggttttacaaagggttaatagagagggtagtttcttccacatacttttgagagctggtatatgctgatttctgctgctgcctatttaataatgatgatgtaaaagatttagagatgtctggctgattttgacattggcctgtagtcctagaagagacactaccctgagtgtctttgagcagtcagagagtgcacctctgccctgggcctgtttacctgttagagtgagccacacaagaaggaattcaacgtggcagagctcttgccagagggagctgaccatcttcaaatgttaaaaaaggtagacagaagagagcccttagcccaacccctatggttttgagggacttgatttgcattcaccttgcttggacactgaaccagctgaggaaggagtttcacccaagattgtgggttttccctttcagtttcagttatcatttgttattgattcttttctcttttttcaagggtctgaatccagggaaagctattgcagagatcaagaaaatgatggcaacctataaggagaagaaagcttcagtttaactgtttccatgctaaacatgatttataaccagctcagagctgaacataatttatatctaatttgagttcctttaaagatcttggttttccatgaatacagcatgtataataaaaattttaagaaataaatgttattctactttattaacaaaaaaacctaataaaaatctttcaggggggggcccggttccccaaattccgccttttggggagtca

SEQ ID NO: 455725 - DNA, 286 bp, Homo sapiens
cactgtgatcatcaaaatagaactgtgcagtacttaaaatgtaagaatctgcaaaaacaaaactacagaacaaattccgaaggtgacctgagaagaccaaatggataagctaatacatccaggtgtctccgattatattatgataaagtgtagggaggttgaacgttacataaataccactggatatttttctttgttagatgtggccccatggtattggatgctttaatcaagattaagaatgaagttgactctactttgaccttccgaagatcatgcagagaag

SEQ ID NO: 455726 - DNA, 1230 bp, Homo sapiens
agcgggccttccctccgcccacccgggaaaccggaagccgcctcccacttggttgctcgtacgcggctagtgggtcctcagtggatgtaggctgggcgccgcgatgttcgacgggacaccggcggagagcgacctcggggttaaggggtggggctgacgtcaggagccaagatggcggcggtggtcgcactctccttgaggcgccggttgccggccacaacccttggcggagcctgcctgcaggcctcccgaggagcccagacagctgcagccacagctccccgtatcaagaaatttgccatctatcgatgggacccagacaaggctggagacaaacctcatatgcagacttatgaagttgaccttaataaatgtggccccatggtattggatgctttaatcaagattaagaatgaagttgactctactttgaccttccgaagatcatgcagagaaggcatctgtggctcttgtgcaatgaacatcaatggaggcaacactctagcttgcacccgaaggattgacaccaacctcaataaggtctcaaaaatctaccctcttccacacatgtatgtgataaaggatcttgttcccgatttgagcaacttctatgcacagtacaaatccattgagccttatttgaagaagaaggatgaatctcaggaaggcaagcagcagtatctgcagtccatagaagagcgtgagaaactggacgggctctacgagtgcattctctgtgcctgctgtagcaccagctgccccagctactggtggaacggagacaaatatctggggcctgcagttcttatgcaggcctatcgctggatgattgactccagagatgacttcacagaggagcgcctggccaagctgcaggacccattctctctataccgctgccacaccatcatgaactgcacaaggacctgtcctaagggtctgaatccagggaaagctattgcagagatcaagaaaatgatggcaacctataaggagaagaaagcttcagtttaactgtttccatgctaaacatgatttataaccagctcagagctgaacataatttatatctaatttgagttcctttaaagatcttggttttccatgaatacagcatgtataataaaaattttaagaaataaatgttattctactttattaacaaaaaaacctaataaaaatctttcaggggggggcccggttccccaaattccgccttttggggagtca

SEQ ID NO: 455727 - DNA, 1326 bp, Homo sapiens
agcgggccttccctccgcccacccgggaaaccggaagccgcctcccacttggttgctcgtacgcggctagtgggtcctcagtggatgtaggctgggcgccgcgatgttcgacgggacaccggcggagagcgacctcggggttaaggggtggggctgacgtcaggagccaagatggcggcggtggtcgcactctccttgaggcgccggttgccggccacaacccttggcggagcctgcctgcagtagggacggggtttcaccatgttggctgggctggtcttgaatccctgatctcaggtgatttcccaacctcagcctcccaaagtgctgggattacaggcctcccgaggagcccagacagctgcagccacagctccccgtatcaagaaatttgccatctatcgatgggacccagacaaggctggagacaaacctcatatgcagacttatgaagttgaccttaataaatgtggccccatggtattggatgctttaatcaagattaagaatgaagttgactctactttgaccttccgaagatcatgcagagaaggcatctgtggctcttgtgcaatgaacatcaatggaggcaacactctagcttgcacccgaaggattgacaccaacctcaataaggtctcaaaaatctaccctcttccacacatgtatgtgataaaggatcttgttcccgatttgagcaacttctatgcacagtacaaatccattgagccttatttgaagaagaaggatgaatctcaggaaggcaagcagcagtatctgcagtccatagaagagcgtgagaaactggacgggctctacgagtgcattctctgtgcctgctgtagcaccagctgccccagctactggtggaacggagacaaatatctggggcctgcagttcttatgcaggcctatcgctggatgattgactccagagatgacttcacagaggagcgcctggccaagctgcaggacccattctctctataccgctgccacaccatcatgaactgcacaaggacctgtcctaagggtctgaatccagggaaagctattgcagagatcaagaaaatgatggcaacctataaggagaagaaagcttcagtttaactgtttccatgctaaacatgatttataaccagctcagagctgaacataatttatatctaatttgagttcctttaaagatcttggttttccatgaatacagcatgtataataaaaattttaagaaataaatgttattctactttattaacaaaaaaacctaataaaaatctttcaggggggggcccggttccccaaattccgccttttggggagtca

SEQ ID NO: 455728 - DNA, 1097 bp, Homo sapiens
agcgggccttccctccgcccacccgggaaaccggaagccgcctcccacttggttgctcgtacgcggctagtgggtcctcagtggatgtaggctgggcgccgcgatgttcgacgggacaccggcggagagcgacctcggggttaaggggtggggctgacgtcaggagccaagatggcggcggtggtcgcactctccttgaggcgccggttgccggccacaacccttggcggagcctgcctgcaggcctcccgaggagcccagacagctgcagccacagctccccgtatcaagaaatttgccatctatcgatgggacccagacaaggctggagacaaacctcatatgcagacttatgaagttgaccttaataaatgtggccccatggtattggatgctttaatcaagattaagaatgaagttgactctactttgaccttccgaagatcatgcagagaaggcatctgtggctcttgtgcaatgaacatcaatggaggcaacactctagcttgcacccgaaggattgacaccaacctcaataaggtctcaaagatttgagcaacttctatgcacagtacaaatccattgagccttatttgaagaagaaggatgaatctcaggaaggcaagcagcagtatctgcagtccatagaagagcgtgagaaactggacgggctctacgagtgcattctctgtgcctgctgtagcaccagctgccccagctactggtggaacggagacaaatatctggggcctgcagttcttatgcaggcctatcgctggatgattgactccagagatgacttcacagaggagcgcctggccaagctgcaggacccattctctctataccgctgccacaccatcatgaactgcacaaggacctgtcctaagggtctgaatccagggaaagctattgcagagatcaagaaaatgatggcaacctataaggagaagaaagcttcagtttaactgtttccatgctaaacatgatttataaccagctcagagctgaacataatttatatctaatttgagttcctttaaagatcttggttttccatgaatacagcatgtataataaaaattttaagaaataaa

SEQ ID NO: 455729 - DNA, 502 bp, Homo sapiens
agccggcgccattttgaaagtggagtcgcctgcccctgccgctgccgccgccgccgtcgctgtcgtagtcgccgccgccgctgccggagaaagagcacgagcggggaagccccagagtgaaatctagcatcctgccggctggtctgcccgcccctccttcctttttccggccttcgtgaaacgcgcttcatcgttgatctgccatccccatctggcttatactggcgagtatggcatatggatcttatgtcagtctgctgcttttgctaatatctgtgcatgaccctagtaaggcacatacttggtagcccttttgccctacatagaagtgttgaaattgtgcttctcaactcaccccacagtacggctacagcaccgcaggcgagcgatgcttgttttcccaaaggaaagttgacctcgggctagcctttcctggcaagctggataaataagaaacacgaatgctcctccgggccatcggcgcacacgatgccacggaatc

SEQ ID NO: 455730 - DNA, 2368 bp, Homo sapiens
agccggcgccattttgaaagtggagtcgcctgcccctgccgctgccgccgccgccgtcgctgtcgtagtcgccgccgccgctgccggagaaagagcacgagcggggaagccccagagtgaaatctagcatcctgccggctggtctgcccgcccctccttccttttccccccggcccccgtcccctccccccgcaggtgccatccgccgccatccgccctctctacccccccatccccaggtgaggggggtgagttcaggaagcggagaccccgaggaacccagcagggtcaccatttgcagcgcaacatggcaggagctggaggagggaatgatattcagtggtgtttttctcaggtgaaaggagcagtagatgatgatgtagcagaagcagatataatttctacagtagaatttaatcattctggagaattactagcaacaggagataaaggtggtagagttgtcatctttcaacaggagcaggagaacaaaatccagtctcatagcagaggagaatataatgtttacagcaccttccagagccatgaaccagagtttgactacttgaaaagtttagaaatagaagaaaagatcaacaaaattaggtggttaccccagaaaaatgctgctcagtttttattgtctaccaatgataaaacaataaaattatggaaaatcagtgaaagggacaaaagaccagaagggtataacttgaaagaggaggatggaaggtatagagatcctactacagttactacactacgagtgccagtctttaggcctatggatctaatggttgaggccagtccacgaagaatatttgccaatgctcatacatatcacatcaactcaatttctattaatagtgattatgaaacatatttatctgcagatgatttgcggattaatctttggcatctggaaattacagacaggagttttaacattgtggatatcaagcctgccaatatggaagagctaacagaggtgattacagcagcagaatttcatccaaacagctgtaacacatttgtatacagcagcagtaaaggaactattcggctatgtgacatgagggcatctgccctctgtgatagacattctaaattgtttgaagaacctgaagatcccagtaacaggtcatttttttccgaaatcatctcctctatttcggatgtaaaattcagccatagtggtcgatatatgatgactagagactatttgtcagtcaaaatttgggacttaaatatggaaaacaggcctgtggaaacataccaggtgcatgaatacctcagaagtaaactctgttcactgtatgaaaatgactgcatatttgacaaatttgaatgttgttggaatggatctgacagtgttgtcatgactggatcttacaataatttcttcagaatgtttgacagaaacacaaagcgagacataaccctagaagcatcgcgggaaaacaataagcctcgcacagttctgaagcctcgcaaagtctgtgcaagtggcaagcgaaagaaagatgaaataagtgttgacagcctagacttcaataagaaaatccttcacacagcctggcaccccaaggaaaatatcattgccgtagctactacaaacaatctgtatatatttcaagacaaagtgaattagggttggcattcctagcagaagaacccacttcctgcttagttgagatagttgaatctagcattcgttcctataaaagagagaggtccattgtggcgcccctttccagtgtttgacagtgtgccattcgacaacacattgttatagctacatggagaaagctctgtggattcatcactgtggtgttctccatgtctgctagccatttaggtaagggtagggcacttttaatttaaatgacttcttgcaccatcttgcctaatggactagattggactgtatcaacattgatttactccactttttatgccttccattgtgatgacgtcaaacacagtgaaagccttcagtcatgctatgggatttaattgtgtatcctcattactgtatcatttgtggggtacaccccttccccctttttttaaattaaatacagctcattcttactgtggcttgtagcattcctcctcttctggcctcctggactgctccccttcatctcttacccttgccccctccacccggtcttggtggtggtatattaaaaaaagaaagaatgaaagcacacaaaatgagtcagtttggggtcagtggtataaagggggtatatgttgcaaacaaatgttttagtaacagttggctgtaatcactcctcgccgtgtctggcactgaaaataaggaaaaaaaacctactactgaataaaagtgacaaagaatgga

SEQ ID NO: 455731 - DNA, 2384 bp, Homo sapiens
tgcgtgcagatttgtccctcccgctcgggagcctggtggatcttctcccacctccccaccttgccccccgcctttatttttttttcctgcaggtcttcatttaatttctatttttccccctgctgcaagccttcttgggtgtatatacacatttattttgcctcgagaaggaagagcgccttataagttaaaatacagtgggggcatatgtgtattttttccccactgtagatgccaatatttttgagactggaagcctaaattttttgtttcgaaccatttcgtttccgtttcttcccttttaccgccgaagagtgcaaggcctttcatgagctggaggagggaatgatattcagtggtgtttttctcaggtgaaaggagcagtagatgatgatgtagcagaagcagatataatttctacagtagaatttaatcattctggagaattactagcaacaggagataaaggtggtagagttgtcatctttcaacaggagcaggagaacaaaatccagtctcatagcagaggagaatataatgtttacagcaccttccagagccatgaaccagagtttgactacttgaaaagtttagaaatagaagaaaagatcaacaaaattaggtggttaccccagaaaaatgctgctcagtttttattgtctaccaatgataaaacaataaaattatggaaaatcagtgaaagggacaaaagaccagaagggtataacttgaaagaggaggatggaaggtatagagatcctactacagttactacactacgagtgccagtctttaggcctatggatctaatggttgaggccagtccacgaagaatatttgccaatgctcatacatatcacatcaactcaatttctattaatagtgattatgaaacatatttatctgcagatgatttgcggattaatctttggcatctggaaattacagacaggagttttaacattgtggatatcaagcctgccaatatggaagagctaacagaggtgattacagcagcagaatttcatccaaacagctgtaacacatttgtatacagcagcagtaaaggaactattcggctatgtgacatgagggcatctgccctctgtgatagacattctaaattgtttgaagaacctgaagatcccagtaacaggtcatttttttccgaaatcatctcctctatttcggatgtaaaattcagccatagtggtcgatatatgatgactagagactatttgtcagtcaaaatttgggacttaaatatggaaaacaggcctgtggaaacataccaggtgcatgaatacctcagaagtaaactctgttcactgtatgaaaatgactgcatatttgacaaatttgaatgttgttggaatggatctgacagtgttgtcatgactggatcttacaataatttcttcagaatgtttgacagaaacacaaagcgagacataaccctagaagcatcgcgggaaaacaataagcctcgcacagttctgaagcctcgcaaagtctgtgcaagtggcaagcgaaagaaagatgaaataagtgttgacagcctagacttcaataagaaaatccttcacacagcctggcaccccaaggaaaatatcattgccgtagctactacaaacaatctgtatatatttcaagacaaagtgaattagggttggcattcctagcagaagaacccacttcctgcttagttgagatagttgaatctagcattcgttcctataaaagagagaggtccattgtggcgcccctttccagtgtttgacagtgtgccattcgacaacacattgttatagctacatggagaaagctctgtggattcatcactgtggtgttctccatgtctgctagccatttaggtaagggtagggcacttttaatttaaatgacttcttgcaccatcttgcctaatggactagattggactgtatcaacattgatttactccactttttatgccttccattgtgatgacgtcaaacacagtgaaagccttcagtcatgctatgggatttaattgtgtatcctcattactgtatcatttgtggggtacaccccttccccctttttttaaattaaatacagctcattcttactgtggcttgtagcattcctcctcttctggcctcctggactgctccccttcatctcttacccttgccccctccacccggtcttggtggtggtatattaaaaaaagaaagaatgaaagcacacaaaatgagtcagtttggggtcagtggtataaagggggtatatgttgcaaacaaatgttttagtaacagttggctgtaatcactcctcgccgtgtctggcactgaaaataaggaaaaaaaacctactactgaataaaagtgacaaagaatgga

SEQ ID NO: 455732 - DNA, 2348 bp, Homo sapiens
aggaaaaggacaatacatcatattaaataacagatcggggagttgaccctaaagtgggcataggaagaaggtgtgcctcacctagctctttctgggcaagactttatcattatttttagatgaacttccttattatgggtgctcagttttttttcatcagtttttttcatagactataccatcaaatacataagagtaaattagcaatcaaattgatccatatttaacgtcattatttccctaatgaattgagcttatttattcagctttatttagccttttcccccgttaagttttctcatttaatccttgaaggcctttagaaatataaaaaacagaatgtaattgtataaagacacaactaatggggtattgagaatgtgcagggtcctttggaattgattacatatttgattattttgaaatatttttcaacaatggtccatatatttttgttttcattttagaacaaaatccagtctcatagcagaggagaatataatgtttacagcaccttccagagccatgaaccagagtttgactacttgaaaagtttagaaatagaagaaaagatcaacaaaattaggtggttaccccagaaaaatgctgctcagtttttattgtctaccaatgataaaacaataaaattatggaaaatcagtgaaagggacaaaagaccagaagggtataacttgaaagaggaggatggaaggtatagagatcctactacagttactacactacgagtgccagtctttaggcctatggatctaatggttgaggccagtccacgaagaatatttgccaatgctcatacatatcacatcaactcaatttctattaatagtgattatgaaacatatttatctgcagatgatttgcggattaatctttggcatctggaaattacagacaggagttttaacattgtggatatcaagcctgccaatatggaagagctaacagaggtgattacagcagcagaatttcatccaaacagctgtaacacatttgtatacagcagcagtaaaggaactattcggctatgtgacatgagggcatctgccctctgtgatagacattctaaattgtttgaagaacctgaagatcccagtaacaggtcatttttttccgaaatcatctcctctatttcggatgtaaaattcagccatagtggtcgatatatgatgactagagactatttgtcagtcaaaatttgggacttaaatatggaaaacaggcctgtggaaacataccaggtgcatgaatacctcagaagtaaactctgttcactgtatgaaaatgactgcatatttgacaaatttgaatgttgttggaatggatctgacagtgttgtcatgactggatcttacaataatttcttcagaatgtttgacagaaacacaaagcgagacataaccctagaagcatcgcgggaaaacaataagcctcgcacagttctgaagcctcgcaaagtctgtgcaagtggcaagcgaaagaaagatgaaataagtgttgacagcctagacttcaataagaaaatccttcacacagcctggcaccccaaggaaaatatcattgccgtagctactacaaacaatctgtatatatttcaagacaaagtgaattagggttggcattcctagcagaagaacccacttcctgcttagttgagatagttgaatctagcattcgttcctataaaagagagaggtccattgtggcgcccctttccagtgtttgacagtgtgccattcgacaacacattgttatagctacatggagaaagctctgtggattcatcactgtggtgttctccatgtctgctagccatttaggtaagggtagggcacttttaatttaaatgacttcttgcaccatcttgcctaatggactagattggactgtatcaacattgatttactccactttttatgccttccattgtgatgacgtcaaacacagtgaaagccttcagtcatgctatgggatttaattgtgtatcctcattactgtatcatttgtggggtacaccccttccccctttttttaaattaaatacagctcattcttactgtggcttgtagcattcctcctcttctggcctcctggactgctccccttcatctcttacccttgccccctccacccggtcttggtggtggtatattaaaaaaagaaagaatgaaagcacacaaaatgagtcagtttggggtcagtggtataaagggggtatatgttgcaaacaaatgttttagtaacagttggctgtaatcactcctcgccgtgtctggcactgaaaataaggaaaaaaaacctactactgaataaaagtgacaaagaatgga

SEQ ID NO: 455733 - DNA, 2307 bp, Homo sapiens
agccggcgccattttgaaagtggagtcgcctgcccctgccgctgccgccgccgccgtcgctgtcgtagtcgccgccgccgctgccggagaaagagcacgagcggggaagccccagagtgaaatctagcatcctgccggctggtctgcccgcccctccttccttttccccccggcccccgtcccctccccccgcaggtgccatccgccgccatccgccctctctacccccccatccccaggtgaggggggtgagttcaggaagcggagaccccgaggaacccagcagggtcaccatttgcagcgcaacatggcaggagctggaggagggaatgatattcagtggtgtttttctcaggtgaaaggagcagtagatgatgatgtagcagaagcagatataatttctacagtagaatttaatcattctggagaattactagcaacaggagataaaggtggtagagttgtcatctttcaacaggagcaggagaacaaaatccagtctcatagcagaggagaatataatgtttacagcaccttccagagccatgaaccagagtttgactacttgaaaagtttagaaatagaagaaaagatcaacaaaattaggtggttaccccagaaaaatgctgctcagtttttattgtctaccaatgataaaacaataaaattatggaaaatcagtgaaagggacaaaagaccagaagggtgccagtctttaggcctatggatctaatggttgaggccagtccacgaagaatatttgccaatgctcatacatatcacatcaactcaatttctattaatagtgattatgaaacatatttatctgcagatgatttgcggattaatctttggcatctggaaattacagacaggagttttaacattgtggatatcaagcctgccaatatggaagagctaacagaggtgattacagcagcagaatttcatccaaacagctgtaacacatttgtatacagcagcagtaaaggaactattcggctatgtgacatgagggcatctgccctctgtgatagacattctaaattgtttgaagaacctgaagatcccagtaacaggtcatttttttccgaaatcatctcctctatttcggatgtaaaattcagccatagtggtcgatatatgatgactagagactatttgtcagtcaaaatttgggacttaaatatggaaaacaggcctgtggaaacataccaggtgcatgaatacctcagaagtaaactctgttcactgtatgaaaatgactgcatatttgacaaatttgaatgttgttggaatggatctgacagtgttgtcatgactggatcttacaataatttcttcagaatgtttgacagaaacacaaagcgagacataaccctagaagcatcgcgggaaaacaataagcctcgcacagttctgaagcctcgcaaagtctgtgcaagtggcaagcgaaagaaagatgaaataagtgttgacagcctagacttcaataagaaaatccttcacacagcctggcaccccaaggaaaatatcattgccgtagctactacaaacaatctgtatatatttcaagacaaagtgaattagggttggcattcctagcagaagaacccacttcctgcttagttgagatagttgaatctagcattcgttcctataaaagagagaggtccattgtggcgcccctttccagtgtttgacagtgtgccattcgacaacacattgttatagctacatggagaaagctctgtggattcatcactgtggtgttctccatgtctgctagccatttaggtaagggtagggcacttttaatttaaatgacttcttgcaccatcttgcctaatggactagattggactgtatcaacattgatttactccactttttatgccttccattgtgatgacgtcaaacacagtgaaagccttcagtcatgctatgggatttaattgtgtatcctcattactgtatcatttgtggggtacaccccttccccctttttttaaattaaatacagctcattcttactgtggcttgtagcattcctcctcttctggcctcctggactgctccccttcatctcttacccttgccccctccacccggtcttggtggtggtatattaaaaaaagaaagaatgaaagcacacaaaatgagtcagtttggggtcagtggtataaagggggtatatgttgcaaacaaatgttttagtaacagttggctgtaatcactcctcgccgtgtctggcactgaaaataaggaaaaaaaacctactactgaataaaagtgacaaagaatgga

SEQ ID NO: 455734 - DNA, 1332 bp, Homo sapiens
  misc_feature (10)..(10): n is a, c, g, or t
  misc_feature (13)..(13): n is a, c, g, or t
attagagganccnattgccacgctcggttatgtgacatgagggcatctgccctctgtgatagacattctaaattgtttgaagaacctgaagatcccagtaacaggtcatttttttccgaaatcatctcctctatttcggatgtaaaattcagccatagtggtcgatatatgatgactagagactatttgtcagtcaaaatttgggacttaaatatggaaaacaggcctgtggaaacataccaggtgcatgaatacctcagaagtaaactctgttcactgtatgaaaatgactgcatatttgacaaatttgaatgttgttggaatggatctgacagtgttgtcatgactggatcttacaataatttcttcagaatgtttgacagaaacacaaagcgagacataaccctagaagcatcgcgggaaaacaataagcctcgcacagttctgaagcctcgcaaagtctgtgcaagtggcaagcgaaagaaagatgaaataagtgttgacagcctagacttcaataagaaaatccttcacacagcctggcaccccaaggaaaatatcattgccgtagctactacaaacaatctgtatatatttcaagacaaagtgaattagggttggcattcctagcagaagaacccacttcctgcttagttgagatagttgaatctagcattcgttcctataaaagagagaggtccattgtggcgcccctttccagtgtttgacagtgtgccattcgacaacacattgttatagctacatggagaaagctctgtggattcatcactgtggtgttctccatgtctgctagccatttaggtaagggtagggcacttttaatttaaatgacttcttgcaccatcttgcctaatggactagattggactgtatcaacattgatttactccactttttatgccttccattgtgatgacgtcaaacacagtgaaagccttcagtcatgctatgggatttaattgtgtatcctcattactgtatcatttgtggggtacaccccttccccctttttttaaattaaatacagctcattcttactgtggcttgtagcattcctcctcttctggcctcctggactgctccccttcatctcttacccttgccccctccacccggtcttggtggtggtatattaaaaaaagaaagaatgaaagcacacaaaatgagtcagtttggggtcagtggtataaagggggtatatgttgcaaacaaatgttttagtaacagttggctgtaatcactcctcgccgtgtctggcactgaaaataaggaaaaaaaacctactactgaataaaagtgacaaagaatgga

SEQ ID NO: 455735 - DNA, 1471 bp, Homo sapiens
gggattacaggcgtgagccactgcgcccggcccaaaaaatgtaaatcataagataaagcattggtttcttgtgaacagctacagctacttcatgcggggttcttttgttttagaacctgtgagttccacagatagttgctcctttgagaagctggctggcctggttgatcacatagcctgtagttgcaaaaatacttaacaacgataattctgcactcctaagaagttttacttgaggatgctgtcaactttgctgatagttttggtagccataaaaagaataagcagaaaacccagttaattagtaccgtatttctggtttattctagtgattgagttgatgtcaacagcccctgtcccttagtttaaatctgcttttgaagtagcttcctatggtttaattgccgaatcattttacttgaaaacaatttcttgttctgcttgtttgactgagtgtactgtctattttcacagtgttgtcatgactggatcttacaataatttcttcagaatgtttgacagaaacacaaagcgagacataaccctagaagcatcgcgggaaaacaataagcctcgcacagttctgaagcctcgcaaagtctgtgcaagtggcaagcgaaagaaagatgaaataagtgttgacagcctagacttcaataagaaaatccttcacacagcctggcaccccaaggaaaatatcattgccgtagctactacaaacaatctgtatatatttcaagacaaagtgaattagggttggcattcctagcagaagaacccacttcctgcttagttgagatagttgaatctagcattcgttcctataaaagagagaggtccattgtggcgcccctttccagtgtttgacagtgtgccattcgacaacacattgttatagctacatggagaaagctctgtggattcatcactgtggtgttctccatgtctgctagccatttaggtaagggtagggcacttttaatttaaatgacttcttgcaccatcttgcctaatggactagattggactgtatcaacattgatttactccactttttatgccttccattgtgatgacgtcaaacacagtgaaagccttcagtcatgctatgggatttaattgtgtatcctcattactgtatcatttgtggggtacaccccttccccctttttttaaattaaatacagctcattcttactgtggcttgtagcattcctcctcttctggcctcctggactgctccccttcatctcttacccttgccccctccacccggtcttggtggtggtatattaaaaaaagaaagaatgaaagcacacaaaatgagtcagtttggggtcagtggtataaagggggtatatgttgcaaacaaatgttttagtaacagttggctgtaatcactcctcgccgtgtctggcactgaaaataaggaaaaaaaacctactactgaataaaagtgacaaagaatgga

SEQ ID NO: 455736 - DNA, 1909 bp, Homo sapiens
  misc_feature (1883)..(1883): n is a, c, g, or t
  misc_feature (1897)..(1897): n is a, c, g, or t
agccggcgccattttgaaagtggagtcgcctgcccctgccgctgccgccgccgccgtcgctgtcgtagtcgccgccgccgctgccggagaaagagcacgagcggggaagccccagagtgaaatctagcatcctgccggctggtctgcccgcccctccttccttttccccccggcccccgtcccctccccccgcaggtgccatccgccgccatccgccctctctacccccccatccccaggtgaggggggtgagttcaggaagcggagaccccgaggaacccagcagggtcaccatttgcagcgcaacatggcaggagctggaggagggaatgatattcagtggtgtttttctcaggtgaaaggagcagtagatgatgatgtagcagaagcagatataatttctacagtagaatttaatcattctggagaattactagcaacaggagataaaggtggtagagttgtcatctttcaacaggagcaggagaacaaaatccagtctcatagcagaggagaatataatgtttacagcaccttccagagccatgaaccagagtttgactacttgaaaagtttagaaatagaagaaaagatcaacaaaattaggtggttaccccagaaaaatgctgctcagtttttattgtctaccaatgataaaacaataaaattatggaaaatcagtgaaagggacaaaagaccagaagggtataacttgaaagaggaggatggaaggtatagagatcctactacagttactacactacgagtgccagtctttaggcctatggatctaatggttgaggccagtccacgaagaatatttgccaatgctcatacatatcacatcaactcaatttctattaatagtgattatgaaacatatttatctgcagatgatttgcggattaatctttggcatctggaaattacagacaggagttttaacattgtggatatcaagcctgccaatatggaagagctaacagaggtgattacagcagcagaatttcatccaaacagctgtaacacatttgtatacagcagcagtaaaggaactattcggctatgtgacatgagggcatctgccctctgtgatagacattctaaattgtttgaagaacctgaagatcccagtaacaggtcatttttttccgaaatcatctcctctatttcggatgtaaaattcagccatagtggtcgatatatgatgactagagactatttgtcagtcaaaatttgggacttaaatatggaaaacaggcctgtggaaacataccaggtgcatgaatacctcagaagtaaactctgttcactgtatgaaaatgactgcatatttgacaaatttgaatgttgttggaatggatctgacagtgttgtcatgactggatcttacaataatttcttcagaatgtttgacagaaacacaaagcgagacataaccctagaagcatcgcgggaaaacaataagcctcgcacagttctgaagcctcgcaaagtctgtgcaagtggcaagcgaaagaaagatgaaataagtgttgacagcctagacttcaataagaaaatccttcacacagcctggcaccccaaggaaaatatcattgccgtagctactacaaacaatctgtatatatttcaagacaaagtgaattagggttggcattcctagcagaagaacccacttcctgcttagttgagatagttgaatctagcattcgttcctataaaagagagaggtccattgtggcgcccctttccagtgtttgacagtgtgccattcgacaacacattgttatagctacatggagaaagctctgtggattcatcactgttgatacagtccaatctagtccattaggcaagatgtgcagagtcatttaaattanaagtgccctacccntacctaaaagct

SEQ ID NO: 455737 - DNA, 1675 bp, Homo sapiens
agccggcgccattttgaaagtggagtcgcctgcccctgccgctgccgccgccgccgtcgctgtcgtagtcgccgccgccgctgccggagaaagagcacgagcggggaagccccagagtgaaatctagcatcctgccggctggtctgcccgcccctccttccttttccccccggcccccgtcccctccccccgcaggtgccatccgccgccatccgccctctctacccccccatccccaggtgaggggggtgagttcaggaagcggagaccccgaggaacccagcagggtcaccatttgcagcgcaacatggcaggagctggaggagggaatgatattcagtggtgtttttctcaggtgaaaggagcagtagatgatgatgtagcagaagcagatataatttctacagtagaatttaatcattctggagaattactagcaacaggagataaaggtggtagagttgtcatctttcaacaggagcaggagaacaaaatccagtctcatagcagaggagaatataatgtttacagcaccttccagagccatgaaccagagtttgactacttgaaaagtttagaaatagaagaaaagatcaacaaaattaggtggttaccccagaaaaatgctgctcagtttttattgtctaccaatgataaaacaataaaattatggaaaatcagtgaaagggacaaaagaccagaagggtataacttgaaagaggaggatggaaggtatagagatcctactacagttactacactacgagtgccagtctttaggcctatggatctaatggttgaggccagtccacgaagaatatttgccaatgctcatacatatcacatcaactcaatttctattaatagtgattatgaaacatatttatctgcagatgatttgcggattaatctttggcatctggaaattacagacaggagttttaacattgtggatatcaagcctgccaatatggaagagctaacagaggtgattacagcagcagaatttcatccaaacagctgtaacacatttgtatacagcagcagtaaaggaactattcggctatgtgacatgagggcatctgccctctgtgatagacattctaaatgtaagtttattgtatctttccttaaaatgattacatattctgtttgtctgaaataagcctcagacatgataagtacaattacagaggttcaaagtcttaaacccgtgtgtccagagccacttgtacccttggtaatctgcctacctcctcatgaggcattccaggttattcctggaagctctcttggggggcatgtctattgattgccaaggaatatatctctcatggaatgctgttgttctttggtaacttgcggttgggctctgtaaccttgtattgaagtagagctgttcctttctttcccatcctcccttcctactttgagcttcctaggaagatttcttctgaggtttccttggcttaaaaaaaaaaaaaaaaaaacaactttggtttaaaaacttcaggatacaatattcttgtcttgttgaatattaactcatgaaaattgatacatgcctgttaccaaaataattttacctggctactagaaaataagatcctggtatgaatttgggatgggcgaggatggtgtgtttctcatggtgatgatacaggcagtcagtgag

SEQ ID NO: 455738 - DNA, 2104 bp, Homo sapiens
tacccaggcagtaatgttcccgaagttttctcttcgttctatgtttcatggagctggaggagggaatgatattcagtggtgtttttctcaggtgaaaggagcagtagatgatgatgtagcagaagcagatataatttctacagtagaatttaatcattctggagaattactagcaacaggagataaaggtggtagagttgtcatctttcaacaggagcaggagaacaaaatccagtctcatagcagaggagaatataatgtttacagcaccttccagagccatgaaccagagtttgactacttgaaaagtttagaaatagaagaaaagatcaacaaaattaggtggttaccccagaaaaatgctgctcagtttttattgtctaccaatgataaaacaataaaattatggaaaatcagtgaaagggacaaaagaccagaagggtataacttgaaagaggaggatggaaggtatagagatcctactacagttactacactacgagtgccagtctttaggcctatggatctaatggttgaggccagtccacgaagaatatttgccaatgctcatacatatcacatcaactcaatttctattaatagtgattatgaaacatatttatctgcagatgatttgcggattaatctttggcatctggaaattacagacaggagttttaacattgtggatatcaagcctgccaatatggaagagctaacagaggtgattacagcagcagaatttcatccaaacagctgtaacacatttgtatacagcagcagtaaaggaactattcggctatgtgacatgagggcatctgccctctgtgatagacattctaaattgtttgaagaacctgaagatcccagtaacaggtcatttttttccgaaatcatctcctctatttcggatgtaaaattcagccatagtggtcgatatatgatgactagagactatttgtcagtcaaaatttgggacttaaatatggaaaacaggcctgtggaaacataccaggtgcatgaatacctcagaagtaaactctgttcactgtatgaaaatgactgcatatttgacaaatttgaatgttgttggaatggatctgacagtgttgtcatgactggatcttacaataatttcttcagaatgtttgacagaaacacaaagcgagacataaccctagaagcatcgcgggaaaacaataagcctcgcacagttctgaagcctcgcaaagtctgtgcaagtggcaagcgaaagaaagatgaaataagtgttgacagcctagacttcaataagaaaatccttcacacagcctggcaccccaaggaaaatatcattgccgtagctactacaaacaatctgtatatatttcaagacaaagtgaattagggttggcattcctagcagaagaacccacttcctgcttagttgagatagttgaatctagcattcgttcctataaaagagagaggtccattgtggcgcccctttccagtgtttgacagtgtgccattcgacaacacattgttatagctacatggagaaagctctgtggattcatcactgtggtgttctccatgtctgctagccatttaggtaagggtagggcacttttaatttaaatgacttcttgcaccatcttgcctaatggactagattggactgtatcaacattgatttactccactttttatgccttccattgtgatgacgtcaaacacagtgaaagccttcagtcatgctatgggatttaattgtgtatcctcattactgtatcatttgtggggtacaccccttccccctttttttaaattaaatacagctcattcttactgtggcttgtagcattcctcctcttctggcctcctggactgctccccttcatctcttacccttgccccctccacccggtcttggtggtggtatattaaaaaaagaaagaatgaaagcacacaaaatgagtcagtttggggtcagtggtataaagggggtatatgttgcaaacaaatgttttagtaacagttggctgtaatcactcctcgccgtgtctggcactgaaaataaggaaaaaaaacctactactgaataaaagtgacaaagaatgga

SEQ ID NO: 455739 - DNA, 2559 bp, Homo sapiens
agccggcgccattttgaaagtggagtcgcctgcccctgccgctgccgccgccgccgtcgctgtcgtagtcgccgccgccgctgccggagaaagagcacgagcggggaagccccagagtgaaatctagcatcctgccggctggtctgcccgcccctccttccttttccccccggcccccgtcccctccccccgcaggtgccatccgccgccatccgccctctctacccccccatccccaggtgaggggggtgagttcaggaagcggagaccccgaggaacccagcagggtcaccatttgcagcgcaacatggcaggagctggaggagggaatgatattcagtggtgtttttctcaggtgaaaggagcagtagatgatgatgtagcagaagcagatataatttctacagtagaatttaatcattctggagaattactagcaacaggagataaaggtggtagagttgtcatctttcaacaggagcaggagaacaaaatccagtctcatagcagaggagaatataatgtttacagcaccttccagagccatgaaccagagtttgactacttgaaaagtttagaaatagaagaaaagatcaacaaaattaggtggttaccccagaaaaatgctgctcagtttttattgtctaccaatgataaaacaataaaattatggaaaatcagtgaaagggacaaaagaccagaagggtataacttgaaagaggaggatggaaggtatagagatcctactacagttactacactacgagtgccagtctttaggcctatggatctaatggttgaggccagtccacgaagaatatttgccaatgctcatacatatcacatcaactcaatttctattaatagtgattatgaaacatatttatctgcagatgatttgcggattaatctttggcatctggaaattacagacaggagttttaacattgtggatatcaagcctgccaatatggaagagctaacagaggtgattacagcagcagaatttcatccaaacagctgtaacacatttgtatacagcagcagtaaaggaactattcggctatgtgacatgagggcatctgccctctgtgatagacattctaaattgtttgaagaacctgaagatcccagtaacaggtcatttttttccgaaatcatctcctctatttcggatgtaaaattcagccatagtggtcgatatatgatgactagagactatttgtcagtcaaaatttgggacttaaatatggaaaacaggcctgtggaaacataccaggtgcatgaatacctcagaagtaaactctgttcactgtatgaaaatgactgcatatttgacaaatttgaatgttgttggaatggatctgacagtgttgtcatgactggatcttacaataatttcttcagaatgtttgacagaaacacaaagcgagacataaccctagaagcatcgcgggaaaacaataagcctcgcacagttctgaagcctcgcaaagtctgtgcaagtggcaagcgaaagaaagatgaaataagtgttgacagcctagacttcaataagaaaatccttcacacagcctggcaccccaaggaaaatatcattgccgtagctactacaaacaatctgtatatatttcaagacaaagtgaattagggttggcattcctagcagaagaacccacttcctgcttagttgagatagttgaatctagcattcgttcctataaaagagagaggtccattgtggcgcccctttccagtgtttgacagtgtgccattcgacaacacattgttatagctacatggagaaagctctgtggattcatcactgtggtgttctccatgtctgctagccatttaggtaagggtagggcacttttaatttaaatgacttcttgcaccatcttgcctaatggactagattggactgtatcaacattgatttactccactttttatgccttccattgtgatgacgtcaaacacagtgaaagccttcagtcatgctatgggatttaattgtgtatcctcattactgtatcatttgtggggtacaccccttccccctttttttaaattaaatacagctcattcttactgtggcttgtagcattcctcctcttctggcctcctggactgctccccttcatctcttacccttgccccctccacccggtcttggtggtggtatattaaaaaaagaaagaatgaaagcacacaaaatgagtcagtttggggtcagtggtataaagggggtatatgttgcaaacaaatgttttagtaacagttggctgtaatcactcctcgccgtgtctggcactgaaaataaggaaaaaaaacctactactgaataaaagtgacaaagaatggagaatctggttttctttttctttttaacctacctcttgtagccaatattttgtgtcatacctttgggcacagtgaaacaaaatgggttttcattgtttattggtatttgttgttaattatttttaacaagtgttcttttacatgcaggaggagaggtattggttctctatgaacatattttgaatataggtt

SEQ ID NO: 455740 - DNA, 2094 bp, Homo sapiens
agccggcgccattttgaaagtggagtcgcctgcccctgccgctgccgccgccgccgtcgctgtcgtagtcgccgccgccgctgccggagaaagagcacgagcggggaagccccagagtgaaatctagcatcctgccggctggtctgcccgcccctccttccttttccccccggcccccgtcccctccccccgcaggtgccatccgccgccatccgccctctctacccccccatccccaggtgaggggggtgagttcaggaagcggagaccccgaggaacccagcagggtcaccatttgcagcgcaacatggcaggagctggaggagggaatgatattcagtggtgtttttctcaggtgaaaggagcagtagatgatgatgtagcagaagcagatataatttctacagtagaatttaatcattctggagaattactagcaacaggagataaaggtggtagagttgtcatctttcaacaggagcaggagaacaaaatccagtctcatagcagaggagaatataatgtttacagcaccttccagagccatgaaccagagtttgactacttgaaaagtttagaaatagaagaaaagatcaacaaaattaggtggttaccccagaaaaatgctgctcagtttttattgtctaccaatgataaaacaataaaattatggaaaatcagtgaaagggacaaaagaccagaagggtataacttgaaagaggaggatggaaggtatagagatcctactacagttactacactacgagtgccagtctttaggcctatggatctaatggttgaggccagtccacgaagaatatttgccaatgctcatacatatcacatcaactcaatttctattaatagtgattatgaaacatatttatctgcagatgatttgcggattaatctttggcatctggaaattacagacaggagttttaacattgtggatatcaagcctgccaatatggaagagctaacagaggtgattacagcagcagaatttcatccaaacagctgtaacacatttgtatacagcagcagtaaaggaactattcggctatgtgacatgagggcatctgccctctgtgatagacattctaaattgtttgaagaacctgaagatcccagtaacaggtcatttttttccgaaatcatctcctctatttcggatgtaaaattcagccatagtggtcgatatatgatgactagagactatttgtcagtcaaaatttgggacttaaatatggaaaacaggcctgtggaaacataccaggtgcatgaatacctcagaagtaaactctgttcactgtatgaaaatgactgcatatttgacaaatttgaatgttgttggaatggatctgacagtgttgtcatgactggatcttacaataatttcttcagaatgtttgacagaaacacaaagcgagacataaccctagaagcatcgcgggaaaacaataagcctcgcacagttctgaagcctcgcaaagtctgtgcaagtggcaagcgaaagaaagatgaaataagtgttgacagcctagacttcaataagaaaatccttcacacagcctggcaccccaaggaaaatatcattgccgtagctactacaaacaatctgtatatatttcaagacaaagtgaattagggttggcattcctagcagaagaacccacttcctgcttagttgagatagttgaatctagcattcgttcctataaaagagagaggtccattgtggcgcccctttccagtgtttgacagtgtgccattcgacaacacattgttatagctacatggagaaagctctgtggattcatcactgtggtgttctccatgtctgctagccatttaggtaagggtagggcacttttaatttaaatgacttcttgcaccatcttgcctaatggactagattggactgtatcaacattgatttactccactttttatgccttccattgtgatgacgtcaaacacagtgaaagccttcagtcatgctatgggatttaattgtgtatcctcattactgtatcatttgtggggtacaccccttccccctttttttaaattaaatacagctcattctta

SEQ ID NO: 455741 - DNA, 1614 bp, Homo sapiens
agccggcgccattttgaaagtggagtcgcctgcccctgccgctgccgccgccgccgtcgctgtcgtagtcgccgccgccgctgccggagaaagagcacgagcggggaagccccagagtgaaatctagcatcctgccggctggtctgcccgcccctccttccttttccccccggcccccgtcccctccccccgcaggtgccatccgccgccatccgccctctctacccccccatccccaggtgaggggggtgagttcaggaagcggagaccccgaggaacccagcagggtcaccatttgcagcgcaacatggcaggagctggaggagggaatgatattcagtggtgtttttctcaggtgaaaggagcagtagatgatgatgtagcagaagcagatataatttctacagtagaatttaatcattctggagaattactagcaacaggagataaaggtggtagagttgtcatctttcaacaggagcaggagaacaaaatccagtctcatagcagaggagaatataatgtttacagcaccttccagagccatgaaccagagtttgactacttgaaaagtttagaaatagaagaaaagatcaacaaaattaggtggttaccccagaaaaatgctgctcagtttttattgtctaccaatgataaaacaataaaattatggaaaatcagtgaaagggacaaaagaccagaagggtgccagtctttaggcctatggatctaatggttgaggccagtccacgaagaatatttgccaatgctcatacatatcacatcaactcaatttctattaatagtgattatgaaacatatttatctgcagatgatttgcggattaatctttggcatctggaaattacagacaggagttttaacattgtggatatcaagcctgccaatatggaagagctaacagaggtgattacagcagcagaatttcatccaaacagctgtaacacatttgtatacagcagcagtaaaggaactattcggctatgtgacatgagggcatctgccctctgtgatagacattctaaatgtaagtttattgtatctttccttaaaatgattacatattctgtttgtctgaaataagcctcagacatgataagtacaattacagaggttcaaagtcttaaacccgtgtgtccagagccacttgtacccttggtaatctgcctacctcctcatgaggcattccaggttattcctggaagctctcttggggggcatgtctattgattgccaaggaatatatctctcatggaatgctgttgttctttggtaacttgcggttgggctctgtaaccttgtattgaagtagagctgttcctttctttcccatcctcccttcctactttgagcttcctaggaagatttcttctgaggtttccttggcttaaaaaaaaaaaaaaaaaaacaactttggtttaaaaacttcaggatacaatattcttgtcttgttgaatattaactcatgaaaattgatacatgcctgttaccaaaataattttacctggctactagaaaataagatcctggtatgaatttgggatgggcgaggatggtgtgtttctcatggtgatgatacaggcagtcagtgag

SEQ ID NO: 455742 - DNA, 3020 bp, Homo sapiens
ggcccagtgcgtggcagcgggacctgcggccccgtcgcgaagtttccagccctgcgagcgccgccgggtcggccgatcgtcccccatacctcggccatgcggcccctgctgctactggccctgctgggctggctgctgctggccgaagcgaagggcgacgccaagccggaggacaaccttttagtcctcacggtggccactaaggagaccgagggattccgtcgcttcaagcgctcagctcagttcttcaactacaagatccaggcgcttggcctaggggaggactggaatgtggagaaggggacgtcggcaggtggagggcagaaggtccggctgctgaagaaagctctggagaagcacgcagacaaggaggatctggtcattctcttcgcagacagctatgacgtgctgtttgcatcggggccccgggagctcctgaagaagttccggcaggccaggagccaggtggtcttctctgctgaggagctcatctacccagaccgcaggctggagaccaagtatccggtggtgtccgatggcaagaggttcctgggctctggaggcttcatcggttatgcccccaacctcagcaaactggtggccgagtgggagggccaggacagcgacagcgatcagctgttttacaccaagatcttcttggacccggagaagagggagcagatcaatatcaccctggaccaccgctgccgtatcttccagaacctggatggagccttggatgaggtcgtgctcaagtttgaaatgggccatgtgagagcgaggaacctggcctatgacaccctcccggtcctgatccatggcaacgggccaaccaagctgcagttgaactacctgggcaactacatcccgcgcttctggaccttcgaaacaggctgcaccgtgtgtgacgaaggcttgcgcagcctcaagggcattggggatgaagctctgcccacggtcctggtcggcgtgttcatcgaacagcccacgccgtttgtgtccctgttcttccagcggctcctgcggctccactacccccagaaacacatgcgacttttcatccacaaccacgagcagcaccacaaggctcaggtggaagagttcctggcacagcatggcagcgagtaccagtctgtgaagctggtgggccctgaggtgcggatggcgaatgcagatgccaggaacatgggcgcagacctgtgccggcaggaccgcagctgcacctactacttcagcgtggatgctgacgtggccctgaccgagcccaacagcctgcggctgctgatccaacagaacaagaacgtcattgccccgctgatgacccggcatgggaggctgtggtcgaacttctggggggctctcagtgcagatggctactatgcccgttccgaggactacgtggacattgtgcaggggcggcgtgttggtgtctggaatgtgccctatatttcaaacatctacttgatcaagggcagtgccctgcggggtgagctgcagtcctcagatctcttccaccacagcaagctggaccccgacatggccttctgtgccaacatccggcagcaggatgtgttcatgttcctgaccaaccggcacacccttggccatctgctctccctagacagctaccgcaccacccacctgcacaacgacctctgggaggtgttcagcaaccccgaggactggaaggagaagtacatccaccagaactacaccaaagccctggcagggaagctggtggagacgccctgcccggatgtctattggttccccatcttcacggaggtggcctgtgatgagctggtggaggagatggagcactttggccagtggtctctgggcaacaacaaggacaaccgcatccagggtggctacgagaacgtgccgactattgacatccacatgaaccagatcggctttgagcgggagtggcacaaattcctgctggagtacattgcgcccatgacggagaagctctaccccggctactacaccagggcccagtttgacctggcctttgtcgtccgctacaagcctgatgagcagccctcactgatgccacaccatgatgcctccaccttcaccatcaacatcgccctgaaccgagtcggggtggattacgagggcgggggctgtcggttcctgcgctacaactgttccatccgagccccaaggaagggctggaccctcatgcaccctggacgactcacgcattaccatgaggggctccccaccaccaggggcacccgctacatcgcagtctccttcgtcgatccctaattggccaggcctgaccctcttggacctttcttctttgccgacaaccactgcccagcagcctctgggacctcggggtcccagggaacccagtccagcctcctggctgttgacttcccattgctcttggagccaccaatcaaagagattcaaagagattcctgcaggccagaggcggaacacacctttatggctggggctctccgtggtgttctggacccagcccctggagacaccattcacttttactgctttgtagtgactcgtgctctccaacctgtcttcctgaaaaaccaaggcccccttcccccacctcttccatggggtgagacttgagcagaacaggggcttccccaagttgcccagaaagactgtctgggtgagaagccatggccagagcttctccccaggcacaggtgttgcaccagggacttctgcttcaagttttggggtaaagacacctggatcagactccaagggctgccctgagtctgggacttctgcctccatggctggtcatgagagcaaaccgtagtcccctggagacagcgactccagagaacctcttgggagacagaagaggcatctgtgcacagctcgatcttctacttgcctgtggggaggggagtgacaggtccacacaccacactgggtcaccctgtcctggatgcctctgaagagagggacagaccgtcagaaactggagagtttctattaaaggtcatttaaaccactgaagggaa

SEQ ID NO: 455743 - DNA, 2967 bp, Homo sapiens
ggcccagtgcgtggcagcgggacctgcggccccgtcgcgaagtttccagccctgcgagcgccgccgggtcggccgatcgtcccccatacctcggccatgcggcccctgctgctactggccctgctgggctggctgctgctggccgaagcgaagggcgacgccaagccggaggacaaccttttagtcctcacggtggccactaaggagaccgagggattccgtcgcttcaagcgctcagctcagttcttcaactacaagatccaggcgcttggcctaggggaggactggaatgtggagaaggggacgtcggcaggtggagggcagaaggtccggctgctgaagaaagctctggagaagcacgcagacaaggaggatctggtcattctcttcgcagacagctatgacgtgctgtttgcatcggggccccgggagctcctgaagaagttccggcaggccaggagccaggtggtcttctctgctgaggagctcatctacccagaccgcaggctggagaccaagtatccggtggtgtccgatggcaagaggttcctgggctctggaggcttcatcggttatgcccccaacctcagcaaactggtggccgagtgggagggccaggacagcgacagcgatcagctgttttacaccaagatcttcttggacccggagaagagggagcagatcaatatcaccctggaccaccgctgccgtatcttccagaacctggatggagccttggatgaggtcgtgctcaagtttgaaatgggccatgtgagagcgaggaacctggcctatgacaccctcccggtcctgatccatggcaacgggccaaccaagctgcagttgaactacctgggcaactacatcccgcgcttctggaccttcgaaacaggctgcaccgtgtgtgacgaaggcttgcgcagcctcaagggcattggggatgaagctctgcccacggtcctggtcggcgtgttcatcgaacagcccacgccgtttgtgtccctgttcttccagcggctcctgcggctccactacccccagaaacacatgcgacttttcatccacaaccacgagcagcaccacaaggctcaggtggaagagttcctggcacagcatggcagcgagtaccagtctgtgaagctggtgggccctgaggtgcggatggcgaatgcagatgccaggaacatgggcgcagacctgtgccggcaggaccgcagctgcacctactacttcagcgtggatgctgacgtggccctgaccgagcccaacagcctgcggctgctgatccaacagaacaagaacgtcattgccccgctgatgacccggcatgggaggctgtggtcgaacttctggggggctctcagtgcagatggctactatgcccgttccgaggactacgtggacattgtgcaggggcggcgtgttggtgtctggaatgtgccctatatttcaaacatctacttgatcaagggcagtgccctgcggggtgagctgcagtcctcagatctcttccaccacagcaagctggaccccgacatggccttctgtgccaacatccggcagcaggatgtgttcatgttcctgaccaaccggcacacccttggccatctgctctccctagacagctaccgcaccacccacctgcacaacgacctctgggaggtgttcagcaaccccgaggactggaaggagaagtacatccaccagaactacaccaaagccctggcagggaagctggtggagacgccctgcccggatgtctattggttccccatcttcacggaggtggcctgtgatgagctggtggaggagatggagcactttggccagtggtctctgggcaacaacaaggacaaccgcatccagggtggctacgagaacgtgccgactattgacatccacatgaaccagatcggctttgagcgggagtggcacaaattcctgctggagtacattgcgcccatgacggagaagctctaccccggctactacaccagggcccagtttgacctggcctttgtcgtccgctacaagcctgatgagcagccctcactgatgccacaccatgatgcctccaccttcaccatcaacatcgccctgaaccgagtcggggtggattacgagggcgggggctgtcggttcctgcgctacaactgttccatccgagccccaaggaagggctggaccctcatgcaccctggacgactcacgcattaccatgaggggctccccaccaccaggggcacccgctacatcgcagtctccttcgtcgatccctaattggccaggcctgaccctcttggacctttcttctttgccgacaaccactgcccagcagcctctgggacctcggggtcccagggaacccagtccagcctcctggctgttgacttcccattgctcttggagccaccaatcaaagagattcaaagagattcctgcaggccagaggcggaacacacctttatggctggggctctccgtggtgttctggacccagcccctggagacaccattcacttttactgctttgtagtgactcgtgctctccaacctgtcttcagaacaggggcttccccaagttgcccagaaagactgtctgggtgagaagccatggccagagcttctccccaggcacaggtgttgcaccagggacttctgcttcaagttttggggtaaagacacctggatcagactccaagggctgccctgagtctgggacttctgcctccatggctggtcatgagagcaaaccgtagtcccctggagacagcgactccagagaacctcttgggagacagaagaggcatctgtgcacagctcgatcttctacttgcctgtggggaggggagtgacaggtccacacaccacactgggtcaccctgtcctggatgcctctgaagagagggacagaccgtcagaaactggagagtttctattaaaggtcatttaaaccactgaagggaa

SEQ ID NO: 455744 - DNA, 2951 bp, Homo sapiens
  misc_feature (2910)..(2910): n is a, c, g, or t
ggcccagtgcgtggcagcgggacctgcggccccgtcgcgaagtttccagccctgcgagcgccgccgggtcggccgatcgtcccccatacctcggccatgcggcccctgctgctactggccctgctgggctggctgctgctggccgaagcgaagggcgacgccaagccggaggacaaccttttagtcctcacggtggccactaaggagaccgagggattccgtcgcttcaagcgctcagctcagttcttcaactacaagatccaggcgcttggcctaggggaggactggaatgtggagaaggggacgtcggcaggtggagggcagaaggtccggctgctgaagaaagctctggagaagcacgcagacaaggaggatctggtcattctcttcgcagacagctatgacgtgctgtttgcatcggggccccgggagctcctgaagaagttccggcaggccaggagccaggtggtcttctctgctgaggagctcatctacccagaccgcaggctggagaccaagtatccggtggtgtccgatggcaagaggttcctgggctctggaggcttcatcggttatgcccccaacctcagcaaactggtggccgagtgggagggccaggacagcgacagcgatcagctgttttacaccaagatcttcttggacccggagaagagggagcagatcaatatcaccctggaccaccgctgccgtatcttccagaacctggatggagccttggatgaggtcgtgctcaagtttgaaatgggccatgtgagagcgaggaacctggcctatgacaccctcccggtcctgatccatggcaacgggccaaccaagctgcagttgaactacctgggcaactacatcccgcgcttctggaccttcgaaacaggctgcaccgtgtgtgacgaaggcttgcgcagcctcaagggcattggggatgaagctctgcccacggtcctggtcggcgtgttcatcgaacagcccacgccgtttgtgtccctgttcttccagcggctcctgcggctccactacccccagaaacacatgcgacttttcatccacaaccacgagcagcaccacaaggctcaggtggaagagttcctggcacagcatggcagcgagtaccagtctgtgaagctggtgggccctgaggtgcggatggcgaatgcagatgccaggaacatgggcgcagacctgtgccggcaggaccgcagctgcacctactacttcagcgtggatgctgacgtggccctgaccgagcccaacagcctgcggctgctgatccaacagaacaagaacgtcattgccccgctgatgacccggcatgggaggctgtggtcgaacttctggggggctctcagtgcagatggctactatgcccgttccgaggactacgtggacattgtgcaggggcggcgtgttggtgtctggaatgtgccctatatttcaaacatctacttgatcaagggcagtgccctgcggggtgagctgcagtcctcagatctcttccaccacagcaagctggaccccgacatggccttctgtgccaacatccggcagcaggatgtgttcatgttcctgaccaaccggcacacccttggccatctgctctccctagacagctaccgcaccacccacctgcacaacgacctctgggaggtgttcagcaaccccgaggactggaaggagaagtacatccaccagaactacaccaaagccctggcagggaagctggtggagacgccctgcccggatgtctattggttccccatcttcacggaggtggcctgtgatgagctggtggaggagatggagcactttggccagtggtctctgggcaacaacaaggacaaccgcatccagggtggctacgagaacgtgccgactattgacatccacatgaaccagatcggctttgagcgggagtggcacaaattcctgctggagtacattgcgcccatgacggagaagctctaccccggctactacaccagggcccagtttgacctggcctttgtcgtccgctacaagcctgatgagcagccctcactgatgccacaccatgatgcctccaccttcaccatcaacatcgccctgaaccgagtcggggtggattacgagggcgggggctgtcggttcctgcgctacaactgttccatccgagccccaaggaagggctggaccctcatgcaccctggacgactcacgcattaccatgaggggctccccaccaccaggggcacccgctacatcgcagtctccttcgtcgatccctaattggccaggcctgaccctcttggacctttcttctttgccgacaaccactgcccagcagcctctgggacctcggggtcccagggaacccagtccagcctcctggctgttgacttcccattgctcttggagccaccaatcaaagagattcaaagagattcctgcaggccagaggcggaacacacctttatggctggggctctccgtggtgttctggacccagcccctggagacaccattcacttttactgctttgtagtgactcgtgctctccaacctgtcttcctgaaaaaccaaggcccccttcccccacctcttccatggggtgagacttgagcagaacaggggcttccccaagttgcccagaaagactgtctgggtgagaagccatggccagagcttctccccaggcacaggtgttgcaccagggacttctgcttcaagttttggggtaaagacacctggatcagactccaagggctgccctgagtctgggacttctgcctccatggctggtccatttggggaaaaagggggcaaaaaaaagggggggggccccccaaaaaaaataacccccggtaggggttttcccccccccccctttttggggggggcaagggaaccaggcgtacnttcccagagaacctcttgggagacagaagaggcatctgtgc

SEQ ID NO: 455745 - DNA, 1107 bp, Homo sapiens
ccaccatatcggtcccgtatttcacattgataaggtcctgtttcatttctcgtgacattgggtagaatgaggatcctgttttcaatgggtcgctttaccctgggactgacagggaggctctgaccatttagccaccaaatgtaggtgtagttctcactcttaggttcaccccggggtcggccgatcgtcccccatacctcggccatgcggcccctgctgctactggccctgctgggctggctgctgctggccgaagcgaagggcgacgccaagccggaggacaaccttttagtcctcacggtggccactaaggagaccgagggattccgtcgcttcaagcgctcagctcagttcttcaactacaagatccagcaggcctgaccctcttggacctttcttctttgccgacaaccactgcccagcagcctctgggacctcggggtcccagggaacccagtccagcctcctggctgttgacttcccattgctcttggagccaccaatcaaagagattcaaagagattcctgcaggccagaggcggaacacacctttatggctggggctctccgtggtgttctggacccagcccctggagacaccattcacttttactgctttgtagtgactcgtgctctccaacctgtcttcctgaaaaaccaaggcccccttcccccacctcttccatggggtgagacttgagcagaacaggggcttccccaagttgcccagaaagactgtctgggtgagaagccatggccagagcttctccccaggcacaggtgttgcaccagggacttctgcttcaagttttggggtaaagacacctggatcagactccaagggctgccctgagtctgggacttctgcctccatggctggtcatgagagcaaaccgtagtcccctggagacagcgactccagagaacctcttgggagacagaagaggcatctgtgcacagctcgatcttctacttgcctgtggggaggggagtgacaggtccacacaccacactgggtcaccctgtcctggatgcctctgaagagagggacagaccgtcagaaactggagagtttctattaaaggtcatttaaaccactgaagggaa

SEQ ID NO: 455746 - DNA, 2045 bp, Homo sapiens
ggcccagtgcgtggcagcgggacctgcggccccgtcgcgaagtttccagccctgcgagcgccgccgggtcggccgatcgtcccccatacctcggccatgcggcccctgctgctactggccctgctgggctggctgctgctggccgaagcgaagggcgacgccaagccggaggacaaccttttagtcctcacggtggccactaaggagaccgagggattccgtcgcttcaagcgctcagctcagttcttcaactacaagatccaggcgcttggcctaggggaggactggaatgtggagaaggggacgtcggcaggtggagggcagaaggtccggctgctgaagaaagctctggagaagcacgcagacaaggaggatctggtcattctcttcgcagacagctatgacgtgctgtttgcatcggggccccgggagctcctgaagaagttccggcaggccaggagccaggtggtcttctctgctgaggagctcatctacccagaccgcaggctggagaccaagtatccggtggtgtccgatggcaagaggttcctgggctctggaggcttcatcggttatgcccccaacctcagcaaactggtggccgagtgggagggccaggacagcgacagcgatcagctgttttacaccaagatcttcttggacccggagaagagggagcagatcaatatcaccctggaccaccgctgccgtatcttccagaacctggatggagccttggatgaggtcgtgctcaagtttgaaatgggccatgtgagagcgaggaacctggcctatgacaccctcccggtcctgatccatggcaacgggccaaccaagctgcagttgaactacctgggcaactacatcccgcgcttctggaccttcgaaacaggctgcaccgtgtgtgacgaaggcttgcgcagcctcaagggcattggggatgaagctctgcccacggtcctggtcggcgtgttcatcgaacagcccacgccgtttgtgtccctgttcttccagcggctcctgcggctccactacccccagaaacacatgcgacttttcatccacaaccacgagcagcaccacaaggctcaggtggaagagttcctggcacagcatggcagcgagtaccagtctgtgaagctggtgggccctgaggtgcggatggcgaatgcagatgccaggaacatgggcgcagacctgtgccggcaggaccgcagctgcacctactacttcagcgtggatgctgacgtggccctgaccgagcccaacagcctgcggctgctgatccaacagaacaagaacgtcattgccccgctgatgacccggcatgggaggctgtggtcgaacttctggggggctctcagtgcagatggctactatgcccgttccgaggactacgtggacattgtgcaggggcggcgtgttggtgtctggaatgtgccctatatttcaaacatctacttgatcaagggcagtgccctgcggggtgagctgcagtcctcagatctcttccaccacagcaagctggaccccgacatggccttctgtgccaacatccggcagcaggatgtgttcatgttcctgaccaaccggcacacccttggccatctgctctccctagacagctaccgcaccacccacctgcacaacgacctctgggaggtgttcagcaaccccgaggactggaaggagaagtacatccaccagaactacaccaaagccctggcagggaagctggtggagacgccctgcccggatgtctattggttccccatcttcacggaggtggcctgtgatgagctggtggaggagatggagcactttggccagtggtctctgggcaacaacaagcgactccagagaacctcttgggagacagaagaggcatctgtgcacagctcgatcttctacttgcctgtggggaggggagtgacaggtccacacaccacactgggtcaccctgtcctggatgcctctgaagagagggacagaccgtcagaaactggagagtttctattaaaggtcatttaaaccactgaagggaa

SEQ ID NO: 455747 - DNA, 1855 bp, Homo sapiens
ggcccagtgcgtggcagcgggacctgcggccccgtcgcgaagtttccagccctgcgagcgccgccgggtcggccgatcgtcccccatacctcggccatgcggcccctgctgctactggccctgctgggctggctgctgctggccgaagcgaagggcgacgccaagccggaggacaaccttttagtcctcacggtggccactaaggagaccgagggattccgtcgcttcaagcgctcagctcagttcttcaactacaagatccaggcgcttggcctaggggaggactggaatgtggagaaggggacgtcggcaggtggagggcagaaggtccggctgctgaagaaagctctggagaagcacgcagacaaggaggatctggtcattctcttcgcagacagctatgacgtgctgtttgcatcggggccccgggagctcctgaagaagttccggcaggccaggagccaggtggtcttctctgctgaggagctcatctacccagaccgcaggctggagaccaagtatccggtggtgtccgatggcaagaggttcctgggctctggaggcttcatcggttatgcccccaacctcagcaaactggtggccgagtgggagggccaggacagcgacagcgatcagctgttttacaccaagatcttcttggacccggagaagagggagcagatcaatatcaccctggaccaccgctgccgtatcttccagaacctggatggagccttggatgaggtcgtgctcaagtttgaaatgggccatgtgagagcgaggaacctggcctatgacaccctcccggtcctgatccatggcaacgggccaaccaagctgcagttgaactacctgggcaactacatcccgcgcttctggaccttcgaaacaggctgcaccgtgtgtgacgaaggcttgcgcagcctcaagggcattggggatgaagctctgcccacggtcctggtcggcgtgttcatcgaacagcccacgccgtttgtgtccctgttcttccagcggctcctgcggctccactacccccagaaacacatgcgacttttcatccacaaccacgagcagcaccacaaggctcaggtggaagagttcctggcacagcatggcagcgagtaccagtctgtgaagctggtgggccctgaggtgcggatggcgaatgcagatgccaggaacatgggcgcagacctgtgccggcaggaccgcagctgcacctactacttcagcgtggatgctgacgtggccctgaccgagcccaacagcctgcggctgctgatccaacagaacaagaacgtcattgccccgctgatgacccggcatgggaggctgtggtcgaacttctggggggctctcagtgcagatggctactatgcccgttccgaggactacgtggacattgtgcaggggcggcgtgttggtgtctggaatgtgccctatatttcaaacatctacttgatcaagggcagtgccctgcggggtgagctgcagtcctcagatctcttccaccacagcaagctggaccccgacatggccttctgtgccaacatccggcagcaggatgtgttcatgttcctgaccaaccggcacacccttggccatctgctctccctagacagctaccgcaccacccacctgcacaacgacctctgggaggtgttcagcaaccccgaggactggaaggagaagtacatccaccagaactacaccaaagccctggcagggaagctggtggagacggtaagggccatggacaccctcttggaccagccttgcctgctgcagggggcagggcacagaagggaaactgcttgccctggggagtgggggacagcaggatgggagttgg

SEQ ID NO: 455748 - DNA, 830 bp, Homo sapiens
ggcccagtgcgtggcagcgggacctgcggccccgtcgcgaagtttccagccctgcgagcgccgccgggtcggccgatcgtcccccatacctcggccatgcggcccctgctgctactggccctgctgggctggctgctgctggccgaagcgaagggcgacgccaagccggaggacaaccttttagtcctcacggtggccactaaggagaccgagggattccgtcgcttcaagcgctcagctcagttcttcaactacaagatccaggcgcttggcctaggggaggactggaatgtggagaaggggacgtcggcaggtggagggcagaaggtccggctgctgaagaaagctctggagaagcacgcagacaaggaggatctggtcattctcttcgcagacagctatgacgtgctgtttgcatcggggccccgggagctcctgaagaagttccggcaggccaggagccaggtggtcttctctgctgaggagctcatctacccagaccgcaggctggagaccaagtatccggtggtgtccgatggcaagaggttcctgggctctggaggcttcatcggttatgcccccaacctcagcaaactggtggccgagtgggagggccaggacagcgacagcgatcagctgttttacaccaagatcttcttggacccggagaagagggagcagatcaatatcaccctggaccaccgctgccgtatcttccagaacctggatggagccttggcccaaggacctgccagtgggtggctggtgatggagatgctgcaacgtgaccatggaatgctagtgatgaatgatgcaaactcacttcatcc

SEQ ID NO: 455749 - DNA, 715 bp, Homo sapiens
ccaccatatcggtcccgtatttcacattgataaggtcctgtttcatttctcgtgacattgggtagaatgaggatcctgttttcaatgggtcgctttaccctgggactgacagggaggctctgaccatttagccaccaaatgtaggtgtagttctcactcttaggttcaccccggggtcggccgatcgtcccccatacctcggccatgcggcccctgctgctactggccctgctgggctggctgctgctggccgaagcgaagggcgacgccaagccggaggacaaccttttagtcctcacggtggccactaaggagaccgagggattccgtcgcttcaagcgctcagctcagttcttcaactacaagatccaggcgcttggcctaggggaggactggaatgtggagaaggggacgtcggcaggtggagggcagaaggtccggctgctgaagaaagctctggagtctgggacttctgcctccatggctggtcatgagagcaaaccgtagtcccctggagacagcgactccagagaacctcttgggagacagaagaggcatctgtgcacagctcgatcttctacttgcctgtggggaggggagtgacaggtccacacaccacactgggtcaccctgtcctggatgcctctgaagagagggacagaccgtcagaaactggagagtttctattaaaggtcatttaaaccactgaagggaa

SEQ ID NO: 455750 - DNA, 3128 bp, Homo sapiens
ccaccatatcggtcccgtatttcacattgataaggtcctgtttcatttctcgtgacattgggtagaatgaggatcctgttttcaatgggtcgctttaccctgggactgacagggaggctctgaccatttagccaccaaatgtaggtgtagttctcactcttaggttcaccccggggtcggccgatcgtcccccatacctcggccatgcggcccctgctgctactggccctgctgggctggctgctgctggccgaagcgaagggcgacgccaagccggaggacaaccttttagtcctcacggtggccactaaggagaccgagggattccgtcgcttcaagcgctcagctcagttcttcaactacaagatccaggcgcttggcctaggggaggactggaatgtggagaaggggacgtcggcaggtggagggcagaaggtccggctgctgaagaaagctctggagaagcacgcagacaaggaggatctggtcattctcttcgcagacagctatgacgtgctgtttgcatcggggccccgggagctcctgaagaagttccggcaggccaggagccaggtggtcttctctgctgaggagctcatctacccagaccgcaggctggagaccaagtatccggtggtgtccgatggcaagaggttcctgggctctggaggcttcatcggttatgcccccaacctcagcaaactggtggccgagtgggagggccaggacagcgacagcgatcagctgttttacaccaagatcttcttggacccggagaagagggagcagatcaatatcaccctggaccaccgctgccgtatcttccagaacctggatggagccttggatgaggtcgtgctcaagtttgaaatgggccatgtgagagcgaggaacctggcctatgacaccctcccggtcctgatccatggcaacgggccaaccaagctgcagttgaactacctgggcaactacatcccgcgcttctggaccttcgaaacaggctgcaccgtgtgtgacgaaggcttgcgcagcctcaagggcattggggatgaagctctgcccacggtcctggtcggcgtgttcatcgaacagcccacgccgtttgtgtccctgttcttccagcggctcctgcggctccactacccccagaaacacatgcgacttttcatccacaaccacgagcagcaccacaaggctcaggtggaagagttcctggcacagcatggcagcgagtaccagtctgtgaagctggtgggccctgaggtgcggatggcgaatgcagatgccaggaacatgggcgcagacctgtgccggcaggaccgcagctgcacctactacttcagcgtggatgctgacgtggccctgaccgagcccaacagcctgcggctgctgatccaacagaacaagaacgtcattgccccgctgatgacccggcatgggaggctgtggtcgaacttctggggggctctcagtgcagatggctactatgcccgttccgaggactacgtggacattgtgcaggggcggcgtgttggtgtctggaatgtgccctatatttcaaacatctacttgatcaagggcagtgccctgcggggtgagctgcagtcctcagatctcttccaccacagcaagctggaccccgacatggccttctgtgccaacatccggcagcaggatgtgttcatgttcctgaccaaccggcacacccttggccatctgctctccctagacagctaccgcaccacccacctgcacaacgacctctgggaggtgttcagcaaccccgaggactggaaggagaagtacatccaccagaactacaccaaagccctggcagggaagctggtggagacgccctgcccggatgtctattggttccccatcttcacggaggtggcctgtgatgagctggtggaggagatggagcactttggccagtggtctctgggcaacaacaaggacaaccgcatccagggtggctacgagaacgtgccgactattgacatccacatgaaccagatcggctttgagcgggagtggcacaaattcctgctggagtacattgcgcccatgacggagaagctctaccccggctactacaccagggcccagtttgacctggcctttgtcgtccgctacaagcctgatgagcagccctcactgatgccacaccatgatgcctccaccttcaccatcaacatcgccctgaaccgagtcggggtggattacgagggcgggggctgtcggttcctgcgctacaactgttccatccgagccccaaggaagggctggaccctcatgcaccctggacgactcacgcattaccatgaggggctccccaccaccaggggcacccgctacatcgcagtctccttcgtcgatccctaattggccaggcctgaccctcttggacctttcttctttgccgacaaccactgcccagcagcctctgggacctcggggtcccagggaacccagtccagcctcctggctgttgacttcccattgctcttggagccaccaatcaaagagattcaaagagattcctgcaggccagaggcggaacacacctttatggctggggctctccgtggtgttctggacccagcccctggagacaccattcacttttactgctttgtagtgactcgtgctctccaacctgtcttcctgaaaaaccaaggcccccttcccccacctcttccatggggtgagacttgagcagaacaggggcttccccaagttgcccagaaagactgtctgggtgagaagccatggccagagcttctccccaggcacaggtgttgcaccagggacttctgcttcaagttttggggtaaagacacctggatcagactccaagggctgccctgagtctgggacttctgcctccatggctggtcatgagagcaaaccgtagtcccctggagacagcgactccagagaacctcttgggagacagaagaggcatctgtgcacagctcgatcttctacttgcctgtggggaggggagtgacaggtccacacaccacactgggtcaccctgtcctggatgcctctgaagagagggacagaccgtcagaaactggagagtttctattaaaggtcatttaaaccactgaagggaa

SEQ ID NO: 455751 - DNA, 2945 bp, Homo sapiens
ggcccagtgcgtggcagcgggacctgcggccccgtcgcgaagtttccagccctgcgagcgccgccgggtcggccgatcgtcccccatacctcggccatgcggcccctgctgctactggccctgctgggctggctgctgctggccgaagcgaagggcgacgccaagccggaggacaaccttttagtcctcacggtggccactaaggagaccgagggattccgtcgcttcaagcgctcagctcagttcttcaactacaagatccaggcgcttggcctaggggaggactggaatgtggagaaggggacgtcggcaggtggagggcagaaggtccggctgctgaagaaagctctggagaagcacgcagacaaggaggatctggtcattctcttcgcagacagctatgacgtgctgtttgcatcggggccccgggagctcctgaagaagttccggcaggccaggagccaggtggtcttctctgctgaggagctcatctacccagaccgcaggctggagaccaagtatccggtggtgtccgatggcaagaggttcctgggctctggaggcttcatcggttatgcccccaacctcagcaaactggtggccgagtgggagggccaggacagcgacagcgatcagctgttttacaccaagatcttcttggacccggagaagagggagcagatcaatatcaccctggaccaccgctgccgtatcttccagaacctggatggagccttggatgaggtcgtgctcaagtttgaaatgggccatgtgagagcgaggaacctggcctatgacaccctcccggtcctgatccatggcaacgggccaaccaagctgcagttgaactacctgggcaactacatcccgcgcttctggaccttcgaaacaggctgcaccgtgtgtgacgaaggcttgcgcagcctcaagggcattgggcggctcctgcggctccactacccccagaaacacatgcgacttttcatccacaaccacgagcagcaccacaaggctcaggtggaagagttcctggcacagcatggcagcgagtaccagtctgtgaagctggtgggccctgaggtgcggatggcgaatgcagatgccaggaacatgggcgcagacctgtgccggcaggaccgcagctgcacctactacttcagcgtggatgctgacgtggccctgaccgagcccaacagcctgcggctgctgatccaacagaacaagaacgtcattgccccgctgatgacccggcatgggaggctgtggtcgaacttctggggggctctcagtgcagatggctactatgcccgttccgaggactacgtggacattgtgcaggggcggcgtgttggtgtctggaatgtgccctatatttcaaacatctacttgatcaagggcagtgccctgcggggtgagctgcagtcctcagatctcttccaccacagcaagctggaccccgacatggccttctgtgccaacatccggcagcaggatgtgttcatgttcctgaccaaccggcacacccttggccatctgctctccctagacagctaccgcaccacccacctgcacaacgacctctgggaggtgttcagcaaccccgaggactggaaggagaagtacatccaccagaactacaccaaagccctggcagggaagctggtggagacgccctgcccggatgtctattggttccccatcttcacggaggtggcctgtgatgagctggtggaggagatggagcactttggccagtggtctctgggcaacaacaaggacaaccgcatccagggtggctacgagaacgtgccgactattgacatccacatgaaccagatcggctttgagcgggagtggcacaaattcctgctggagtacattgcgcccatgacggagaagctctaccccggctactacaccagggcccagtttgacctggcctttgtcgtccgctacaagcctgatgagcagccctcactgatgccacaccatgatgcctccaccttcaccatcaacatcgccctgaaccgagtcggggtggattacgagggcgggggctgtcggttcctgcgctacaactgttccatccgagccccaaggaagggctggaccctcatgcaccctggacgactcacgcattaccatgaggggctccccaccaccaggggcacccgctacatcgcagtctccttcgtcgatccctaattggccaggcctgaccctcttggacctttcttctttgccgacaaccactgcccagcagcctctgggacctcggggtcccagggaacccagtccagcctcctggctgttgacttcccattgctcttggagccaccaatcaaagagattcaaagagattcctgcaggccagaggcggaacacacctttatggctggggctctccgtggtgttctggacccagcccctggagacaccattcacttttactgctttgtagtgactcgtgctctccaacctgtcttcctgaaaaaccaaggcccccttcccccacctcttccatggggtgagacttgagcagaacaggggcttccccaagttgcccagaaagactgtctgggtgagaagccatggccagagcttctccccaggcacaggtgttgcaccagggacttctgcttcaagttttggggtaaagacacctggatcagactccaagggctgccctgagtctgggacttctgcctccatggctggtcatgagagcaaaccgtagtcccctggagacagcgactccagagaacctcttgggagacagaagaggcatctgtgcacagctcgatcttctacttgcctgtggggaggggagtgacaggtccacacaccacactgggtcaccctgtcctggatgcctctgaagagagggacagaccgtcagaaactggagagtttctattaaaggtcatttaaaccactgaagggaa

SEQ ID NO: 455752 - DNA, 2345 bp, Homo sapiens
ggcccagtgcgtggcagcgggacctgcggccccgtcgcgaagtttccagccctgcgagcgccgccgggtcggccgatcgtcccccatacctcggccatgcggcccctgctgctactggccctgctgggctggctgctgctggccgaagcgaagggcgacgccaagccggaggacaaccttttagtcctcacggtggccactaaggagaccgagggattccgtcgcttcaagcgctcagctcagttcttcaactacaagatccaggcgcttggcctaggggaggactggaatgtggagaaggggacgtcggcaggtggagggcagaaggtccggctgctgaagaaagctctggagaagcacgcagacaaggaggatctggtcattctcttcgcagacagctatgacgtgctgtttgcatcggggccccgggagctcctgaagaagttccggcaggccaggagccaggtggtcttctctgctgaggagctcatctacccagaccgcaggctggagaccaagtatccggtggtgtccgatggcaagaggttcctgggctctggaggcttcatcggttatgcccccaacctcagcaaactggtggccgagtgggagggccaggacagcgacagcgatcagctgttttacaccaagatcttcttggacccggagaagagggagcagatcaatatcaccctggaccaccgctgccgtatcttccagaacctggatggagccttggatgaggtcgtgctcaagtttgaaatgggccatgtgagagcgaggaacctggcctatgacaccctcccggtcctgatccatggcaacgggccaaccaagctgcagttgaactacctgggcaactacatcccgcgcttctggaccttcgaaacaggctgcaccgtgtgtgacgaaggcttgcgcagcctcaagggcattggggatgaagctctgcccacggtcctggtcggcgtgttcatcgaacagcccacgccgtttgtgtccctgttcttccagcggctcctgcggctccactacccccagaaacacatgcgacttttcatccacaaccacgagcagcaccacaaggctcaggtggaagagttcctggcacagcatggcagcgagtaccagtctgtgaagctggtgggccctgaggtgcggatggcgaatgcagatgccaggaacatgggcgcagacctgtgccggcaggaccgcagctgcacctactacttcagcgtggatgctgacgtggccctgaccgagcccaacagcctgcggctgctgatccaacagaacaagaacgtcattgccccgctgatgacccggcatgggaggctgtggtcgaacttctggggggctctcagtgcagatggctactatgcccgttccgaggactacgtggacattgtgcaggggcggcgtgttggtgtctggaatgtgccctatatttcaaacatctacttgatcaagggcagtgccctgcggggtgagctgcagtcctcagatctcttccaccacagcaagctggaccccgacatggccttctgtgccaacatccggcagcaggatgtgttcatgttcctgaccaaccggcacacccttggccatctgctctccctagacagctaccgcaccacccacctgcacaacgacctctgggaggtgttcagcaaccccgaggactggaaggagaagtacatccaccagaactacaccaaagccctggcagggaagctggtggagacgccctgcccggatgtctattggttccccatcttcacggaggtggcctgtgatgagctggtggaggagatggagcactttggccagtggtctctgggcaacaacaaggacaaccgcatccagggtggctacgagaacgtgccgactattgacatccacatgaaccagatcggctttgagcgggagtggcacaaattcctgctggagtacattgcgcccatgacggagaagctctaccccggctactacaccagggcccagtttgacctggcctttgtcgtccgctacaagcctgatgagcagccctcactgatgccacaccatgatgcctccaccttcaccatcaacatcgccctgaaccgagtcggggtggattacgagggcgggggctgtcggttcctgcgctacaactgttccatccgagccccaaggaagggctggaccctcatgcaccctggacgactcacgcattaccatgaggggctccccaccaccaggggcacccgctacatcgcagtctccttcgtcgatccctaattggcggacagaccgtcagaaactggagagtttctattaaaggtcatttaaaccactgaagggaa

SEQ ID NO: 455753 - DNA, 1661 bp, Homo sapiens
ggcccagtgcgtggcagcgggacctgcggccccgtcgcgaagtttccagccctgcgagcgccgccgggtcggccgatcgtcccccatacctcggccatgcggcccctgctgctactggccctgctgggctggctgctgctggccgaagcgaagggcgacgccaagccggaggacaaccttttagtcctcacggtggccactaaggagaccgagggattccgtcgcttcaagcgctcagctcagttcttcaactacaagatccaggcgcttggcctaggggaggactggaatgtggagaaggggacgtcggcaggtggagggcagaaggtccggctgctgaagaaagctctggagaagcacgcagacaaggaggatctggtcattctcttcgcagacagctatgacgtgctgtttgcatcggggccccgggagctcctgaagaagttccggcaggccaggagccaggtggtcttctctgctgaggagctcatctacccagaccgcaggctggagaccaagtatccggtggtgtccgatggcaagaggttcctgggctctggaggcttcatcggttatgcccccaacctcagcaaactggtggccgagtgggagggccaggacagcgacagcgatcagctgttttacaccaagatcttcttggacccggagaagagggagcagatcaatatcaccctggaccaccgctgccgtatcttccagaacctggatggagccttggatgaggtcgtgctcaagtttgaaatgggccatgtgagagcgaggaacctggcctatgacaccctcccggtcctgatccatggcaacgggccaaccaagctgcagttgaactacctgggcaactacatcccgcgcttctggaccttcgaaacaggctgcaccgtgtgtgacgaaggcttgcgcagcctcaagggcattggggatgaagctctgcccacggtcctggtcggcgtgttcatcgaacagcccacgccgtttgtgtccctgttcttccagcggctcctgcggctccactacccccagaaacacatgcgacttttcatccacaaccacgagcagcaccacaaggctcaggtggaagagttcctggcacagcatggcagcgagtaccagtctgtgaagctggtgggccctgaggtgcggatggcgaatgcagatgccaggaacatgggcgcagacctgtgccggcaggaccgcagctgcacctactacttcagcgtggatgctgacgtggccctgaccgagcccaacagcctgcggctgctgatccaacagaacaagaacgtcattgccccgctgatgacccggcatgggaggctgtggtcgaacttctggggggctctcagtgcagatggctactatgcccgttccgaggactacgtggacattgtgcaggggcggcgtgttggtgtctggaatgtgccctatatttcaaacatctacttgatcacttcagcgtggatgctgacgtggccctgaccgagcccaacagcctgcggctgctgatccaacagaacaagaacgtcattgccccgctgatgacccggcatgggaggctgtggtcgaacttctggggggctctcagtgcagatggctactatgcccgttccgaggactacgtggacattgtgcaggggcggcgt

SEQ ID NO: 455754 - DNA, 869 bp, Homo sapiens
ggcccagtgcgtggcagcgggacctgcggccccgtcgcgaagtttccagccctgcgagcgccgccgggtcggccgatcgtcccccatacctcggccatgcggcccctgctgctactggccctgctgggctggctgctgctggccgaagcgaagggcgacgccaagccggaggacaaccttttagtcctcacggtggccactaaggagaccgagggattccgtcgcttcaagcgctcagctcagttcttcaactacaagatccaggcgcttggcctaggggaggactggaatgtggagaaggggacgtcggcaggtggagggcagaaggtccggctgctgaagaaagctctggagaagcacgcagacaaggaggatctggtcattctcttcgcagacagctatgacgtgctgtttgcatcggggccccgggagctcctgaagaagttccggcaggccaggagccaggtggtcttctctgctgaggagctcatctacccagaccgcaggctggagaccaagtatccggtggtgtccgatggcaagaggttcctgggctctggaggcttcatcggttatgcccccaacctcagcaaactggtggccgagtgggagggccaggacagcgacagcgatcagctgttttacaccaagatcttcttggacccggagaagagggtgagccggctgcattcttagattccttccagttcagagtccctggttttctgtgagtagagccactagactgtagaccccaggagcttggctgctggccttctctgggcacctagctgccctgatgtgacgtggcagagtcggtgtggggaatgagggctgaacttggggacagattccccacactgggtgag

SEQ ID NO: 455755 - DNA, 608 bp, Homo sapiens
tgcccctgataaggtaagagatggagcaggagatgggaggcagaggaagatgatgaacaggcccctggcacagagggagacacacactaaaggagaaagagtaattcacacagagccggctgtgcgggagaccggagttttattattacttaaatcggttctccccagtcatgtggggatcagagttcttaaatataatttggcaggtaggggcttggaaagtggaaaatgctgattggtcagattggagatggaatcataggaggtggaagttaggtattcttaatgtcttctgttcctgggtgcgatggtagaactggttgggccagattactggtctggctggtgtcagctgatccatcgggtgcagggtctgcagaatatctcaagcactgactttaggttttacaatagtgatgttaccccaggagcaatttggggaggacccaaaggctgcatgacccctaaattgtaatttctaatcttatagctactttgccagtcctgcaaaggcagactggaccccaggcaagaagaagggtctttttgggaaagggctgttataaattttgtttcagagtcaaaccatgaactgaattccttcccaa

SEQ ID NO: 455756 - DNA, 5202 bp, Homo sapiens
gggcagagatgcctccagctgggctttgagggtgtcagtcttccctcaaataggaaagatgaggggcaggggaggatattggggacaagcctctgctcagccctgggtcctcttggaaccgggcttggagccggaggtggggagggtgtccaagctgagctcctggattcccatctgccgaactgcacccagaaccaggagtggggtgcgggcccatcctctggccaggatcctgggctcccttggccacaaagcaggacaggggaccagagatcccccaactcaggagacgtgaagctggcagctgggccgctggcctagaaatggcctcaaatggaagctgccacccgatcctggtggaggctttgagctaggctagagatcaggactccagggttcagtgcgcacgtgctgcccctgcactagggccgaagcaatgcgggtgctggcgaccgacgcaaggaggtgacgcacaggggacttaaggagcggaccgccgcgggaggacgcgcccagctcagggggactccctctgcgccccccacgctgggtctccggcccacgcgtggcccggctggtctgcggagctagcgccagggccgccagagggcgcccggggcggaggatggggcgggagccggggaagcccgggaggtggtggccgagtgggcgccgcccctctgggtctgcggctcaggtcgaagagtcggctgcgtgggccggggaatccggattccgggggttcaacgcccaggggttccatgagcccctactgttctcggacgcccggccggccccgacgcactcgtcctagcacccctcccctgtccggtcctccggcccctccgccgtcgcccctccggggtccagccgggcggggctgctccagggtcgcggctggcgcgggtccccgggccctggccctccggtgccccgggccaaggagagaaaacttgagcatccacgcacaggggtggggagcaggatcccactctgagggtgcactgccccgccctctccgggtctgcctcggccccgcccgggccccaggccccgccccctcccctcggccggcccgagagctccgggggccgctgcagccgcccaagcgcccgccatgcgcgctgcccgcgccgcgccgctgctccagctgctgctcctgctggggccgtggctggaggctgcgggcgttgcggagtcgccgctgcccgccgtggtccttgccatcctggcccgcaatgccgaacactcgctgccccactacctgggcgctctggagcggctggactacccccgggccaggatggccctctggtgagagacccgggcattggcaccgagtgggcacctaacccccagcttcgcagatggcccccgcccccggcggccctgtctgctcgctccctgcccagacaccacctagacaggcccctcccctcacagacggccctgccagcccgagccgccagagaggaccccgagccccctgctgggagacgacagacctctgaggccacaggccgacgcgggacacccacccctccttctggtcccctactccttcctcttggggccttccctgggtgtaggttgggcccagccagcccttttcaccccagccttcagggcccagctcaaccccagtgggacctgtggttggctggatttgaagaggagcagacaggaacctctgaagtccactggggcccaacgtggcagggatcgaccacgctggaggcttccgggcacaggttgggggtgccatcagcactgggctccgggctgtgcaggggagtcagaccggcccccccaccgcccccgtgctggggccagctctcttggtagatcttggtagaggggcgggatcctgtcagccaagggcagtcccccttcctggagcctctcccctctggcatctctgtacccccagggcactgggatcgaaggccacaacccctggtctgtagacaccagaacagggaggagtccctggctgaggttgggggtaaactgagaaaaatgacaagccaccctcttcaacacaccacagttgggctgggggggtggagccctggcctggggaggccgcccacaattaccacagtttgggagtttgttagttcccacccctgtaagacttgacacgtagtcttcatttctggggaattggcttaaaggggcagcatcacccaaaacctgggcacttggctaaacccccacctctgttatgggggccccttccccaggagaggggaggctgtgccccatgacagcagagcttggacccatctgcattcttagggacgcttagagcatggtttggtccttattacaacctgggggtggaggaaagcagcagctcttctgtctagtccccattcagagagggacaggggctggcctgtggtcacacagccacaggtcacataggtaggtatctgcccacctaacgaaggtaaccagggaatgcaccaggtgtgatccttaaagtcgaggtacttttcatctttcaaaatgcattcgttggccaggtgtggtggctcacgcctgtaatttcagcactttgggaggccgaagtgggcagatcacctgaggtgaggagttcaagaccagcctggctaacatggtgaaaccccatctctactaaacaaacaaaaattagccgggcatggtggtgcacacctgtaatcccaggtactcaggaggctgaggcaggagaatcacttgaacccgggaggcggaggttgcagtgagtcgagatcataccactgcactacagcctgggcgacagagcaagattccatctcaaaaaaaatgcattattcttctcttatctttgtccatgacataagcaggacagcttaagttatagagggaggacgtgaagcccagagaaagatgggacttgcctgaggtcacacagcaggtcacagaactgtggtggggacctggctgtgctgcctccagcctctctgctgtagcacacctacccttcactgttccaaggagagctcgacctcaaaggtgttagtgctttggggtcaaggctgccttggggttcaatcctgtggctgtgccccctcagccttttttcttcccgtccccaggtgtgccacggaccacaatgtggacaacaccacagagatgctgcaggagtggctggcggctgtgggcgatgactatgctgctgtggtctggaggcctgagggcgagcccaggttctacccagatgaagagggtcccaagcactggaccaaagaaaggcaccagtttctgatggagctgaagcaggaagccctcacctttgccaggaactggggggccgactatatcctgtttgcagacacagacaacattctgaccaacaatcagactctgcggcttctcatggggcaggggcttccagtggtggccccaatgctggactcccagacctactactccaacttctggtgtgggatcaccccccagggctactaccgccgcacagccgagtacttccccaccaagaaccgccagcgccggggctgcttccgtgtccccatggtccactccaccttccttgcatccctgcgggctgaaggggcagaccagcttgctttctacccgccacatcccaactacacttggcctttcgacgacatcatcgtcttcgcctatgcctgccaggctgctggggtctccgtccacgtgtgcaatgagcaccgttatgggtacatgaatgtgccggtgaaatcccaccaggggctggaagacgagagggtcaacttcatccacctgatcttagaagcactagtggacggcccccgcatgcaggcctcagctcatgtgactcggccctctaagaggcccagcaagatagggtttgacgaggtctttgtcatcagcctggctcgcaggcctgaccgtcgggaacgcatgctcgcctcgctctgggagatggagatctctgggagggtggtggacgctgtggatggctggatgctcaacagcagtgccatcaggaacctcggcgtagacctgctcccgggctaccaggacccttactcgggccgcactctgaccaagggcgaggtgggctgcttcctcagccattactccatctgggaagaggtggttgccaggggcctggcccgggtcctggtgtttgaggatgacgtgcgctttgagagcaacttcagggggcggctggagcggctgatggaggatgtggaggcagagaaactgtcttgggacctgatctacctcggacggaagcaggtgaaccctgagaaggagacggccgtggaggggctgccgggcctggtggtggctgggtactcctactggacgctggcctatgccctgcgtctggcgggtgcccgcaagctgctggcctcacagcctctgcgccgcatgctgcccgtggacgagttcctgcccatcatgttcgaccagcaccccaacgagcagtacaaggcacacttctggccacgggacctggtggccttctccgcccagcccctgctcgctgcccctacccactatgccggggacgccgagtggctcagtgacacggagacatcctctccatgggatgatgacagcggccgcctcatcagctggagcggctcccaaaagaccctgcgcagcccccgcctggacctgactggcagcagcgggcacagcctccaaccccagccccgagatgagctctaggtccaggtgatgactgcaaagcagtgtccaggagcaggccactactgcccagagagcagaggaggaggttgttggcagggactgcagatcctgtcagacctggccaccaccttgggcatggccactctgccctctggacctgtctttcatcgggagaaaccactcagagatggatcccattccctaaaggtctcacagcaaaggagcaggactcccaggcccctgtaccctgcctggcctgatttcagggccttgtggcccccagcttctgtttcaagctgggcagaccccaggatcccttccctccctaaggactcagctgaggggcccctctgcccccttctacctccacctcagcaccctcccccagcttgatgtttgggtctccccagcaccctcctccctggccggtgcaaagtacagggaggtaaagcaggacccttgcagacatgttgcccagcacacagtaggccctcaataaaagccatttgcactttaaatata

SEQ ID NO: 455757 - DNA, 5247 bp, Homo sapiens
gggcagagatgcctccagctgggctttgagggtgtcagtcttccctcaaataggaaagatgaggggcaggggaggatattggggacaagcctctgctcagccctgggtcctcttggaaccgggcttggagccggaggtggggagggtgtccaagctgagctcctggattcccatctgccgaactgcacccagaaccaggagtggggtgcgggcccatcctctggccaggatcctgggctcccttggccacaaagcaggacaggggaccagagatcccccaactcaggagacgtgaagctggcagctgggccgctggcctagaaatggcctcaaatggaagctgccacccgatcctggtggaggctttgagctaggctagagatcaggactccagggttcagtgcgcacgtgctgcccctgcactagggccgaagcaatgcgggtgctggcgaccgacgcaaggaggtgacgcacaggggacttaaggagcggaccgccgcgggaggacgcgcccagctcagggggactccctctgcgccccccacgctgggtctccggcccacgcgtggcccggctggtctgcggagctagcgccagggccgccagagggcgcccggggcggaggatggggcgggagccggggaagcccgggaggtggtggccgagtgggcgccgcccctctgggtctgcggctcaggtcgaagagtcggctgcgtgggccggggaatccggattccgggggttcaacgcccaggggttccatgagcccctactgttctcggacgcccggccggccccgacgcactcgtcctagcacccctcccctgtccggtcctccggcccctccgccgtcgcccctccggggtccagccgggcggggctgctccagggtcgcggctggcgcgggtccccgggccctggccctccggtgccccgggccaaggagagaaaacttgagcatccacgcacaggggtggggagcaggatcccactctgagggtgcactgccccgccctctccgggtctgcctcggccccgcccgggccccaggccccgccccctcccctcggccggcccgagagctccgggggccgctgcagccgcccaagcgcccgccatgcgcgctgcccgcgccgcgccgctgctccagctgctgctcctgctggggccgtggctggaggctgcgggcgttgcggagtcgccgctgcccgccgtggtccttgccatcctggcccgcaatgccgaacactcgctgccccactacctgggcgctctggagcggctggactacccccgggccaggatggccctctggtgagagacccgggcattggcaccgagtgggcacctaacccccagcttcgcagatggcccccgcccccggcggccctgtctgctcgctccctgcccagacaccacctagacaggcccctcccctcacagacggccctgccagcccgagccgccagagaggaccccgagccccctgctgggagacgacagacctctgaggccacaggccgacgcgggacacccacccctccttctggtcccctactccttcctcttggggccttccctgggtgtaggttgggcccagccagcccttttcaccccagccttcagggcccagctcaaccccagtgggacctgtggttggctggatttgaagaggagcagacaggaacctctgaagtccactggggcccaacgtggcagggatcgaccacgctggaggcttccgggcacaggttgggggtgccatcagcactgggctccgggctgtgcaggggagtcagaccggcccccccaccgcccccgtgctggggccagctctcttggtagatcttggtagaggggcgggatcctgtcagccaagggcagtcccccttcctggagcctctcccctctggcatctctgtacccccagggcactgggatcgaaggccacaacccctggtctgtagacaccagaacagggaggagtccctggctgaggttgggggtaaactgagaaaaatgacaagccaccctcttcaacacaccacagttgggctgggggggtggagccctggcctggggaggccgcccacaattaccacagtttgggagtttgttagttcccacccctgtaagacttgacacgtagtcttcatttctggggaattggcttaaaggggcagcatcacccaaaacctgggcacttggctaaacccccacctctgttatgggggccccttccccaggagaggggaggctgtgccccatgacagcagagcttggacccatctgcattcttagggacgcttagagcatggtttggtccttattacaacctgggggtggaggaaagcagcagctcttctgtctagtccccattcagagagggacaggggctggcctgtggtcacacagccacaggtcacataggtaggtatctgcccacctaacgaaggtaaccagggaatgcaccaggtgtgatccttaaagtcgaggtacttttcatctttcaaaatgcattcgttggccaggtgtggtggctcacgcctgtaatttcagcactttgggaggccgaagtgggcagatcacctgaggtgaggagttcaagaccagcctggctaacatggtgaaaccccatctctactaaacaaacaaaaattagccgggcatggtggtgcacacctgtaatcccaggtactcaggaggctgaggcaggagaatcacttgaacccgggaggcggaggttgcagtgagtcgagatcataccactgcactacagcctgggcgacagagcaagattccatctcaaaaaaaatgcattattcttctcttatctttgtccatgacataagcaggacagcttaagttatagagggaggacgtgaagcccagagaaagatgggacttgcctgaggtcacacagcaggtcacagaactgtggtggggacctggctgtgctgcctccagcctctctgctgtagcacacctacccttcactgttccaaggagagctcgacctcaaaggtgttagtgctttggggtcaaggctgccttggggttcaatcctgtggctgtgccccctcagccttttttcttcccgtccccaggtgtgccacggaccacaatgtggacaacaccacagagatgctgcaggagtggctggcggctgtgggcgatgactatgctgctgtggtctggaggcctgagggcgagcccaggttctacccagatgaagagggtcccaagcactggaccaaagaaaggcaccagtttctgatggagctgaagcaggaagccctcacctttgccaggaactggggggccgactatatcctgtttgcagacacagacaacattctgaccaacaatcagactctgcggcttctcatggggcaggggcttccagtggtggccccaatgctggactcccagacctactactccaacttctggtgtgggatcaccccccagggctactaccgccgcacagccgagtacttccccaccaagaaccgccagcgccggggctgcttccgtgtccccatggtccactccaccttccttgcatccctgcgggctgaaggggcagaccagcttgctttctacccgccacatcccaactacacttggcctttcgacgacatcatcgtcttcgcctatgcctgccaggctgctggggtctccgtccacgtgtgcaatgagcaccgttatgggtacatgaatgtgccggtgaaatcccaccaggggctggaagacgagagggtcaacttcatccacctgatcttagaagcactagtggacggcccccgcatgcaggcctcagctcatgtgactcggccctctaagaggcccagcaagatagggtttgacgaggtctttgtcatcagcctggctcgcaggcctgaccgtcgggaacgcatgctcgcctcgctctgggagatggagatctctgggagggtggtggacgctgtggatggctggatgctcaacagcagtgccatcaggaacctcggcgtagacctgctcccgggctaccaggacccttactcgggccgcactctgaccaagggcgaggtgggctgcttcctcagccattactccatctgggaagaggtggttgccaggggcctggcccgggtcctggtgtttgaggatgacgtgcgctttgagagcaacttcagggggcggctggagcggctgatggaggatgtggaggcagagaaactgtcttgggacctgatctacctcggacggaagcaggtgaaccctgagaaggagacggccgtggaggggctgccgggcctggtggtggctgggtactcctactggacgctggcctatgccctgcgtctggcgggtgcccgcaagctgctggcctcacagcctctgcgccgcatgctgcccgtggacgagttcctgcccatcatgttcgaccagcaccccaacgagcagtacaaggcacacttctggccacgggacctggtggccttctccgcccagcccctgctcgctgcccctacccactatgccggggacgccgagtggctcagtgacacggagacatcctctccatgggatgatgacagcggccgcctcatcagctggagcggctcccaaaagaccctgcgcagcccccgcctggacctgactggcagcagcgggcacagcctccaaccccagccccgagatgagctctaggtccaggtgatgactgcaaagcagtgtccaggagcaggccactactgcccagagagcagaggaggaggttgttggcagggactgcagatcctgtcagacctggccaccaccttgggcatggccactctgccctctggacctgtctttcatcgggagaaaccactcagagatggatcccattccctaaaggtctcacagcaaaggagcaggactcccaggcccctgtaccctgcctggcctgatttcagggccttgtggcccccagcttctgtttcaagctgggcagaccccaggatcccttccctccctaaggactcagctgaggggcccctctgcccccttctacctccacctcagcaccctcccccagcttgatgtttgggtctccccagcaccctcctccctggccggtgcaaagtacagggaggtaaagcaggacccttgcagacatgttgcccagcacacagtaggccctcaataaaagccatttgcactttaaatatatatatgtatgtatatatatgtatatatatatatatatatatatgt

SEQ ID NO: 455758 - DNA, 2190 bp, Homo sapiens
  misc_feature (18)..(19): n is a, c, g, or t
  misc_feature (44)..(44): n is a, c, g, or t
cccggatcacagtcaaanntacggctaggtacgaggctgggtgntggtcaatcctgtggctgtgccccctcagccttttttcttcccgtccccaggtgtgccacggaccacaatgtggacaacaccacagagatgctgcaggagtggctggcggctgtgggcgatgactatgctgctgtggtctggaggcctgagggcgagcccaggttctacccagatgaagagggtcccaagcactggaccaaagaaaggcaccagtttctgatggagctgaagcaggaagccctcacctttgccaggaactggggggccgactatatcctgtttgcagacacagacaacattctgaccaacaatcagactctgcggcttctcatggggcaggggcttccagtggtggccccaatgctggactcccagacctactactccaacttctggtgtgggatcaccccccagggctactaccgccgcacagccgagtacttccccaccaagaaccgccagcgccggggctgcttccgtgtccccatggtccactccaccttccttgcatccctgcgggctgaaggggcagaccagcttgctttctacccgccacatcccaactacacttggcctttcgacgacatcatcgtcttcgcctatgcctgccaggctgctggggtctccgtccacgtgtgcaatgagcaccgttatgggtacatgaatgtgccggtgaaatcccaccaggggctggaagacgagagggtcaacttcatccacctgatcttagaagcactagtggacggcccccgcatgcaggcctcagctcatgtgactcggccctctaagaggcccagcaagatagggtttgacgaggtctttgtcatcagcctggctcgcaggcctgaccgtcgggaacgcatgctcgcctcgctctgggagatggagatctctgggagggtggtggacgctgtggatggctggatgctcaacagcagtgccatcaggaacctcggcgtagacctgctcccgggctaccaggacccttactcgggccgcactctgaccaagggcgaggtgggctgcttcctcagccattactccatctgggaagaggtggttgccaggggcctggcccgggtcctggtgtttgaggatgacgtgcgctttgagagcaacttcagggggcggctggagcggctgatggaggatgtggaggcagagaaactgtcttgggacctgatctacctcggacggaagcaggtgaaccctgagaaggagacggccgtggaggggctgccgggcctggtggtggctgggtactcctactggacgctggcctatgccctgcgtctggcgggtgcccgcaagctgctggcctcacagcctctgcgccgcatgctgcccgtggacgagttcctgcccatcatgttcgaccagcaccccaacgagcagtacaaggcacacttctggccacgggacctggtggccttctccgcccagcccctgctcgctgcccctacccactatgccggggacgccgagtggctcagtgacacggagacatcctctccatgggatgatgacagcggccgcctcatcagctggagcggctcccaaaagaccctgcgcagcccccgcctggacctgactggcagcagcgggcacagcctccaaccccagccccgagatgagctctaggtccaggtgatgactgcaaagcagtgtccaggagcaggccactactgcccagagagcagaggaggaggttgttggcagggactgcagatcctgtcagacctggccaccaccttgggcatggccactctgccctctggacctgtctttcatcgggagaaaccactcagagatggatcccattccctaaaggtctcacagcaaaggagcaggactcccaggcccctgtaccctgcctggcctgatttcagggccttgtggcccccagcttctgtttcaagctgggcagaccccaggatcccttccctccctaaggactcagctgaggggcccctctgcccccttctacctccacctcagcaccctcccccagcttgatgtttgggtctccccagcaccctcctccctggccggtgcaaagtacagggaggtaaagcaggacccttgcagacatgttgcccagcacacagtaggccctcaataaaagccatttgcactttaaatata

SEQ ID NO: 455759 - DNA, 5121 bp, Homo sapiens
gggcagagatgcctccagctgggctttgagggtgtcagtcttccctcaaataggaaagatgaggggcaggggaggatattggggacaagcctctgctcagccctgggtcctcttggaaccgggcttggagccggaggtggggagggtgtccaagctgagctcctggattcccatctgccgaactgcacccagaaccaggagtggggtgcgggcccatcctctggccaggatcctgggctcccttggccacaaagcaggacaggggaccagagatcccccaactcaggagacgtgaagctggcagctgggccgctggcctagaaatggcctcaaatggaagctgccacccgatcctggtggaggctttgagctaggctagagatcaggactccagggttcagtgcgcacgtgctgcccctgcactagggccgaagcaatgcgggtgctggcgaccgacgcaaggaggtgacgcacaggggacttaaggagcggaccgccgcgggaggacgcgcccagctcagggggactccctctgcgccccccacgctgggtctccggcccacgcgtggcccggctggtctgcggagctagcgccagggccgccagagggcgcccggggcggaggatggggcgggagccggggaagcccgggaggtggtggccgagtgggcgccgcccctctgggtctgcggctcaggtcgaagagtcggctgcgtgggccggggaatccggattccgggggttcaacgcccaggggttccatgagcccctactgttctcggacgcccggccggccccgacgcactcgtcctagcacccctcccctgtccggtcctccggcccctccgccgtcgcccctccggggtccagccgggcggggctgctccagggtcgcggctggcgcgggtccccgggccctggccctccggtgccccgggccaaggagagaaaacttgagcatccacgcacaggggtggggagcaggatcccactctgagggtgcactgccccgccctctccgggtctgcctcggccccgcccgggccccaggccccgccccctcccctcggccggcccgagagctccgggggccgctgcagccgcccaagcgcccgccatgcgcgctgcccgcgccgcgccgctgctccagctgctgctcctgctggggccgtggctggaggctgcgggcgttgcggagtcgccgctgcccgccgtggtccttgccatcctggcccgcaatgccgaacactcgctgccccactacctgggcgctctggagcggctggactacccccgggccaggatggccctctggtgagagacccgggcattggcaccgagtgggcacctaacccccagcttcgcagatggcccccgcccccggcggccctgtctgctcgctccctgcccagacaccacctagacaggcccctcccctcacagacggccctgccagcccgagccgccagagaggaccccgagccccctgctgggagacgacagacctctgaggccacaggccgacgcgggacacccacccctccttctggtcccctactccttcctcttggggccttccctgggtgtaggttgggcccagccagcccttttcaccccagccttcagggcccagctcaaccccagtgggacctgtggttggctggatttgaagaggagcagacaggaacctctgaagtccactggggcccaacgtggcagggatcgaccacgctggaggcttccgggcacaggttgggggtgccatcagcactgggctccgggctgtgcaggggagtcagaccggcccccccaccgcccccgtgctggggccagctctcttggtagatcttggtagaggggcgggatcctgtcagccaagggcagtcccccttcctggagcctctcccctctggcatctctgtacccccagggcactgggatcgaaggccacaacccctggtctgtagacaccagaacagggaggagtccctggctgaggttgggggtaaactgagaaaaatgacaagccaccctcttcaacacaccacagttgggctgggggggtggagccctggcctggggaggccgcccacaattaccacagtttgggagtttgttagttcccacccctgtaagacttgacacgtagtcttcatttctggggaattggcttaaaggggcagcatcacccaaaacctgggcacttggctaaacccccacctctgttatgggggccccttccccaggagaggggaggctgtgccccatgacagcagagcttggacccatctgcattcttagggacgcttagagcatggtttggtccttattacaacctgggggtggaggaaagcagcagctcttctgtctagtccccattcagagagggacaggggctggcctgtggtcacacagccacaggtcacataggtaggtatctgcccacctaacgaaggtaaccagggaatgcaccaggtgtgatccttaaagtcgaggtacttttcatctttcaaaatgcattcgttggccaggtgtggtggctcacgcctgtaatttcagcactttgggaggccgaagtgggcagatcacctgaggtgaggagttcaagaccagcctggctaacatggtgaaaccccatctctactaaacaaacaaaaattagccgggcatggtggtgcacacctgtaatcccaggtactcaggaggctgaggcaggagaatcacttgaacccgggaggcggaggttgcagtgagtcgagatcataccactgcactacagcctgggcgacagagcaagattccatctcaaaaaaaatgcattattcttctcttatctttgtccatgacataagcaggacagcttaagttatagagggaggacgtgaagcccagagaaagatgggacttgcctgaggtcacacagcaggtcacagaactgtggtggggacctggctgtgctgcctccagcctctctgctgtagcacacctacccttcactgttccaaggagagctcgacctcaaaggtgtgtgccacggaccacaatgtggacaacaccacagagatgctgcaggagtggctggcggctgtgggcgatgactatgctgctgtggtctggaggcctgagggcgagcccaggttctacccagatgaagagggtcccaagcactggaccaaagaaaggcaccagtttctgatggagctgaagcaggaagccctcacctttgccaggaactggggggccgactatatcctgtttgcagacacagacaacattctgaccaacaatcagactctgcggcttctcatggggcaggggcttccagtggtggccccaatgctggactcccagacctactactccaacttctggtgtgggatcaccccccagggctactaccgccgcacagccgagtacttccccaccaagaaccgccagcgccggggctgcttccgtgtccccatggtccactccaccttccttgcatccctgcgggctgaaggggcagaccagcttgctttctacccgccacatcccaactacacttggcctttcgacgacatcatcgtcttcgcctatgcctgccaggctgctggggtctccgtccacgtgtgcaatgagcaccgttatgggtacatgaatgtgccggtgaaatcccaccaggggctggaagacgagagggtcaacttcatccacctgatcttagaagcactagtggacggcccccgcatgcaggcctcagctcatgtgactcggccctctaagaggcccagcaagatagggtttgacgaggtctttgtcatcagcctggctcgcaggcctgaccgtcgggaacgcatgctcgcctcgctctgggagatggagatctctgggagggtggtggacgctgtggatggctggatgctcaacagcagtgccatcaggaacctcggcgtagacctgctcccgggctaccaggacccttactcgggccgcactctgaccaagggcgaggtgggctgcttcctcagccattactccatctgggaagaggtggttgccaggggcctggcccgggtcctggtgtttgaggatgacgtgcgctttgagagcaacttcagggggcggctggagcggctgatggaggatgtggaggcagagaaactgtcttgggacctgatctacctcggacggaagcaggtgaaccctgagaaggagacggccgtggaggggctgccgggcctggtggtggctgggtactcctactggacgctggcctatgccctgcgtctggcgggtgcccgcaagctgctggcctcacagcctctgcgccgcatgctgcccgtggacgagttcctgcccatcatgttcgaccagcaccccaacgagcagtacaaggcacacttctggccacgggacctggtggccttctccgcccagcccctgctcgctgcccctacccactatgccggggacgccgagtggctcagtgacacggagacatcctctccatgggatgatgacagcggccgcctcatcagctggagcggctcccaaaagaccctgcgcagcccccgcctggacctgactggcagcagcgggcacagcctccaaccccagccccgagatgagctctaggtccaggtgatgactgcaaagcagtgtccaggagcaggccactactgcccagagagcagaggaggaggttgttggcagggactgcagatcctgtcagacctggccaccaccttgggcatggccactctgccctctggacctgtctttcatcgggagaaaccactcagagatggatcccattccctaaaggtctcacagcaaaggagcaggactcccaggcccctgtaccctgcctggcctgatttcagggccttgtggcccccagcttctgtttcaagctgggcagaccccaggatcccttccctccctaaggactcagctgaggggcccctctgcccccttctacctccacctcagcaccctcccccagcttgatgtttgggtctccccagcaccctcctccctggccggtgcaaagtacagggaggtaaagcaggacccttgcagacatgttgcccagcacacagtaggccctcaataaaagccatttgcactttaaatata

SEQ ID NO: 455760 - DNA, 2285 bp, Homo sapiens
ggacctgtctgaggttggtgacagacacccagttcgatcccatctgtggtgccgccaggccgctcccttttctgctcctctcccgagaggctgcagagttctttccctcccagcagggtcctaaggaccccggcggtgctccaggggagccaacatcccctgctttggaggacggacgggtcgggtcgcagtgtgccacggaccacaatgtggacaacaccacagagatgctgcaggagtggctggcggctgtgggcgatgactatgctgctgtggtctggaggcctgagggcgagcccaggttctacccagatgaagagggtcccaagcactggaccaaagaaaggcaccagtttctgatggagctgaagcaggaagccctcacctttgccaggaactggggggccgactatatcctgtttgcagacacagacaacattctgaccaacaatcagactctgcggcttctcatggggcaggggcttccagtggtggccccaatgctggactcccagacctactactccaacttctggtgtgggatcaccccccagggctactaccgccgcacagccgagtacttccccaccaagaaccgccagcgccggggctgcttccgtgtccccatggtccactccaccttccttgcatccctgcgggctgaaggggcagaccagcttgctttctacccgccacatcccaactacacttggcctttcgacgacatcatcgtcttcgcctatgcctgccaggctgctggggtctccgtccacgtgtgcaatgagcaccgttatgggtacatgaatgtgccggtgaaatcccaccaggggctggaagacgagagggtcaacttcatccacctgatcttagaagcactagtggacggcccccgcatgcaggcctcagctcatgtgactcggccctctaagaggcccagcaagatagggtttgacgaggtctttgtcatcagcctggctcgcaggcctgaccgtcgggaacgcatgctcgcctcgctctgggagatggagatctctgggagggtggtggacgctgtggatggctggatgctcaacagcagtgccatcaggaacctcggcgtagacctgctcccgggctaccaggacccttactcgggccgcactctgaccaagggcgaggtgggctgcttcctcagccattactccatctgggaagaggtggttgccaggggcctggcccgggtcctggtgtttgaggatgacgtgcgctttgagagcaacttcagggggcggctggagcggctgatggaggatgtggaggcagagaaactgtcttgggacctgatctacctcggacggaagcaggtgaaccctgagaaggagacggccgtggaggggctgccgggcctggtggtggctgggtactcctactggacgctggcctatgccctgcgtctggcgggtgcccgcaagctgctggcctcacagcctctgcgccgcatgctgcccgtggacgagttcctgcccatcatgttcgaccagcaccccaacgagcagtacaaggcacacttctggccacgggacctggtggccttctccgcccagcccctgctcgctgcccctacccactatgccggggacgccgagtggctcagtgacacggagacatcctctccatgggatgatgacagcggccgcctcatcagctggagcggctcccaaaagaccctgcgcagcccccgcctggacctgactggcagcagcgggcacagcctccaaccccagccccgagatgagctctaggtccaggtgatgactgcaaagcagtgtccaggagcaggccactactgcccagagagcagaggaggaggttgttggcagggactgcagatcctgtcagacctggccaccaccttgggcatggccactctgccctctggacctgtctttcatcgggagaaaccactcagagatggatcccattccctaaaggtctcacagcaaaggagcaggactcccaggcccctgtaccctgcctggcctgatttcagggccttgtggcccccagcttctgtttcaagctgggcagaccccaggatcccttccctccctaaggactcagctgaggggcccctctgcccccttctacctccacctcagcaccctcccccagcttgatgtttgggtctccccagcaccctcctccctggccggtgcaaagtacagggaggtaaagcaggacccttgcagacatgttgcccagcacacagtaggccctcaataaaagccatttgcactttaaatata

SEQ ID NO: 455761 - DNA, 5103 bp, Homo sapiens
gggcagagatgcctccagctgggctttgagggtgtcagtcttccctcaaataggaaagatgaggggcaggggaggatattggggacaagcctctgctcagccctgggtcctcttggaaccgggcttggagccggaggtggggagggtgtccaagctgagctcctggattcccatctgccgaactgcacccagaaccaggagtggggtgcgggcccatcctctggccaggatcctgggctcccttggccacaaagcaggacaggggaccagagatcccccaactcaggagacgtgaagctggcagctgggccgctggcctagaaatggcctcaaatggaagctgccacccgatcctggtggaggctttgagctaggctagagatcaggactccagggttcagtgcgcacgtgctgcccctgcactagggccgaagcaatgcgggtgctggcgaccgacgcaaggaggtgacgcacaggggacttaaggagcggaccgccgcgggaggacgcgcccagctcagggggactccctctgcgccccccacgctgggtctccggcccacgcgtggcccggctggtctgcggagctagcgccagggccgccagagggcgcccggggcggaggatggggcgggagccggggaagcccgggaggtggtggccgagtgggcgccgcccctctgggtctgcggctcaggtcgaagagtcggctgcgtgggccggggaatccggattccgggggttcaacgcccaggggttccatgagcccctactgttctcggacgcccggccggccccgacgcactcgtcctagcacccctcccctgtccggtcctccggcccctccgccgtcgcccctccggggtccagccgggcggggctgctccagggtcgcggctggcgcgggtccccgggccctggccctccggtgccccgggccaaggagagaaaacttgagcatccacgcacaggggtggggagcaggatcccactctgagggtgcactgccccgccctctccgggtctgcctcggccccgcccgggccccaggccccgccccctcccctcggccggcccgagagctccgggggccgctgcagccgcccaagcgcccgccatgcgcgctgcccgcgccgcgccgctgctccagctgctgctcctgctggggccgtggctggaggctgcgggcgttgcggagtcgccgctgcccgccgtggtccttgccatcctggcccgcaatgccgaacactcgctgccccactacctgggcgctctggagcggctggactacccccgggccaggatggccctctggtgagagacccgggcattggcaccgagtgggcacctaacccccagcttcgcagatggcccccgcccccggcggccctgtctgctcgctccctgcccagacaccacctagacaggcccctcccctcacagacggccctgccagcccgagccgccagagaggaccccgagccccctgctgggagacgacagacctctgaggccacaggccgacgcgggacacccacccctccttctggtcccctactccttcctcttggggccttccctgggtgtaggttgggcccagccagcccttttcaccccagccttcagggcccagctcaaccccagtgggacctgtggttggctggatttgaagaggagcagacaggaacctctgaagtccactggggcccaacgtggcagggatcgaccacgctggaggcttccgggcacaggttgggggtgccatcagcactgggctccgggctgtgcaggggagtcagaccggcccccccaccgcccccgtgctggggccagctctcttggtagatcttggtagaggggcgggatcctgtcagccaagggcagtcccccttcctggagcctctcccctctggcatctctgtacccccagggcactgggatcgaaggccacaacccctggtctgtagacaccagaacagggaggagtccctggctgaggttgggggtaaactgagaaaaatgacaagccaccctcttcaacacaccacagttgggctgggggggtggagccctggcctggggaggccgcccacaattaccacagtttgggagtttgttagttcccacccctgtaagacttgacacgtagtcttcatttctggggaattggcttaaaggggcagcatcacccaaaacctgggcacttggctaaacccccacctctgttatgggggccccttccccaggagaggggaggctgtgccccatgacagcagagcttggacccatctgcattcttagggacgcttagagcatggtttggtccttattacaacctgggggtggaggaaagcagcagctcttctgtctagtccccattcagagagggacaggggctggcctgtggtcacacagccacaggtcacataggtaggtatctgcccacctaacgaaggtaaccagggaatgcaccaggtgtgatccttaaagtcgaggtacttttcatctttcaaaatgcattcgttggccaggtgtggtggctcacgcctgtaatttcagcactttgggaggccgaagtgggcagatcacctgaggtgaggagttcaagaccagcctggctaacatggtgaaaccccatctctactaaacaaacaaaaattagccgggcatggtggtgcacacctgtaatcccaggtactcaggaggctgaggcaggagaatcacttgaacccgggaggcggaggttgcagtgagtcgagatcataccactgcactacagcctgggcgacagagcaagattccatctcaaaaaaaatgcattattcttctcttatctttgtccatgacataagcaggacagcttaagttatagagggaggacgtgaagcccagagaaagatgggacttgcctgaggtcacacagcaggtcacagaactgtggtggggacctggctgtgctgcctccagcctctctgctgtagcacacctacccttcactgttccaaggagagctcgacctcaaaggtgttagtgctttggggtcaaggctgccttggggttcaatcctgtggctgtgccccctcagccttttttcttcccgtccccaggtgtgccacggaccacaatgtggacaacaccacagagatgctgcaggagtggctggcggctgtgggcgatgactatgctgctgtggtctggaggcctgagggcgagcccaggttctacccagatgaagagggtcccaagcactggaccaaagaaaggcaccagtttctgatggagctgaagcaggaagccctcacctttgccaggaactggggggccgactatatcctgtttgcagacacagacaacattctgaccaacaatcagactctgcggcttctcatggggcaggggcttccagtggtggccccaatgctggactcccagacctactactccaacttctggtgtgggatcaccccccagggctactaccgccgcacagccgagtacttccccaccaagaaccgccagcgccggggctgcttccgtgtccccatggtccactccaccttccttgcatccctgcgggctgaaggggcagaccagcttgctttctacccgccacatcccaactacacttggcctttcgacgacatcatcgtcttcgcctatgcctgccaggctgctggggtctccgtccacgtgtgcaatgagcaccgttatgggtacatgaatgtgccggtgaaatcccaccaggggctggaagacgagagggtcaacttcatccacctgatcttagaagcactagtggacggcccccgcatgcaggcctcagctcatgtgactcggccctctaagaggcccagcaagatagggtttgacgaggtctttgtcatcagcctggctcgcaggcctgaccgtcgggaacgcatgctcgcctcgctctgggagatggagatctctgggagggtggtggacgctgtggatggctggatgctcaacagcagtgccatcaggaacctcggcgtagacctgctcccgggctaccaggacccttactcgggccgcactctgaccaagggcgaggtgggctgcttcctcagccattactccatctgggaagaggtggttgccaggggcctggcccgggtcctggtgtttgaggatgacgtgcgctttgagagcaacttcagggggcggctggagcggctgatggaggatgtggaggcagagaaactgtcttgggacctgatctacctcggacggaagcaggtgaaccctgagaaggagacggccgtggaggggctgccgggcctggtggtggctgggtactcctactggacgctggcctatgccctgcgtctggcgggtgcccgcaagctgctggcctcacagcctctgcgccgcatgctgcccgtggacgagttcctgcccatcatgttcgaccagcaccccaacgagcagtacaaggcacacttctggccacgggacctggtggccttctccgcccagcccctgctcgctgcccctacccactatgccggggacgccgagtggctcagtgacacggagacatcctctccatgggatgatgacagcggccgcctcatcagctggagcggctcccaaaagaccctgcgcagcccccgcctggacctgactggcagcagcgggcacagcctccaaccccagccccgagatgagctctaggtccaggtgatgactgcaaagcagtgtccaggagcaggccactactgcccagagagcagaggaggaggttgttggcagggactgcagatcctgtcagacctggccaccaccttgggcatggccactctgccctctggacctgtctttcatcgggagaaaccactcagagatggatcccattccctaaaggtctcacagcaaaggagcaggactcccaggcccctgtaccctgcctggcctgatttcagggccttgtggcccccagcttctgtttcaagctgggcagaccccagcaccctcctccctggccggtgcaaagtacagggaggtaaagcaggacccttgcagacatgttgcccagcacacagtaggccctcaataaaagccatttgcactttaaatata

SEQ ID NO: 455762 - DNA, 5330 bp, Homo sapiens
gggcagagatgcctccagctgggctttgagggtgtcagtcttccctcaaataggaaagatgaggggcaggggaggatattggggacaagcctctgctcagccctgggtcctcttggaaccgggcttggagccggaggtggggagggtgtccaagctgagctcctggattcccatctgccgaactgcacccagaaccaggagtggggtgcgggcccatcctctggccaggatcctgggctcccttggccacaaagcaggacaggggaccagagatcccccaactcaggagacgtgaagctggcagctgggccgctggcctagaaatggcctcaaatggaagctgccacccgatcctggtggaggctttgagctaggctagagatcaggactccagggttcagtgcgcacgtgctgcccctgcactagggccgaagcaatgcgggtgctggcgaccgacgcaaggaggtgacgcacaggggacttaaggagcggaccgccgcgggaggacgcgcccagctcagggggactccctctgcgccccccacgctgggtctccggcccacgcgtggcccggctggtctgcggagctagcgccagggccgccagagggcgcccggggcggaggatggggcgggagccggggaagcccgggaggtggtggccgagtgggcgccgcccctctgggtctgcggctcaggtcgaagagtcggctgcgtgggccggggaatccggattccgggggttcaacgcccaggggttccatgagcccctactgttctcggacgcccggccggccccgacgcactcgtcctagcacccctcccctgtccggtcctccggcccctccgccgtcgcccctccggggtccagccgggcggggctgctccagggtcgcggctggcgcgggtccccgggccctggccctccggtgccccgggccaaggagagaaaacttgagcatccacgcacaggggtggggagcaggatcccactctgagggtgcactgccccgccctctccgggtctgcctcggccccgcccgggccccaggccccgccccctcccctcggccggcccgagagctccgggggccgctgcagccgcccaagcgcccgccatgcgcgctgcccgcgccgcgccgctgctccagctgctgctcctgctggggccgtggctggaggctgcgggcgttgcggagtcgccgctgcccgccgtggtccttgccatcctggcccgcaatgccgaacactcgctgccccactacctgggcgctctggagcggctggactacccccgggccaggatggccctctggtgagagacccgggcattggcaccgagtgggcacctaacccccagcttcgcagatggcccccgcccccggcggccctgtctgctcgctccctgcccagacaccacctagacaggcccctcccctcacagacggccctgccagcccgagccgccagagaggaccccgagccccctgctgggagacgacagacctctgaggccacaggccgacgcgggacacccacccctccttctggtcccctactccttcctcttggggccttccctgggtgtaggttgggcccagccagcccttttcaccccagccttcagggcccagctcaaccccagtgggacctgtggttggctggatttgaagaggagcagacaggaacctctgaagtccactggggcccaacgtggcagggatcgaccacgctggaggcttccgggcacaggttgggggtgccatcagcactgggctccgggctgtgcaggggagtcagaccggcccccccaccgcccccgtgctggggccagctctcttggtagatcttggtagaggggcgggatcctgtcagccaagggcagtcccccttcctggagcctctcccctctggcatctctgtacccccagggcactgggatcgaaggccacaacccctggtctgtagacaccagaacagggaggagtccctggctgaggttgggggtaaactgagaaaaatgacaagccaccctcttcaacacaccacagttgggctgggggggtggagccctggcctggggaggccgcccacaattaccacagtttgggagtttgttagttcccacccctgtaagacttgacacgtagtcttcatttctggggaattggcttaaaggggcagcatcacccaaaacctgggcacttggctaaacccccacctctgttatgggggccccttccccaggagaggggaggctgtgccccatgacagcagagcttggacccatctgcattcttagggacgcttagagcatggtttggtccttattacaacctgggggtggaggaaagcagcagctcttctgtctagtccccattcagagagggacaggggctggcctgtggtcacacagccacaggtcacataggtaggtatctgcccacctaacgaaggtaaccagggaatgcaccaggtgtgatccttaaagtcgaggtacttttcatctttcaaaatgcattcgttggccaggtgtggtggctcacgcctgtaatttcagcactttgggaggccgaagtgggcagatcacctgaggtgaggagttcaagaccagcctggctaacatggtgaaaccccatctctactaaacaaacaaaaattagccgggcatggtggtgcacacctgtaatcccaggtactcaggaggctgaggcaggagaatcacttgaacccgggaggcggaggttgcagtgagtcgagatcataccactgcactacagcctgggcgacagagcaagattccatctcaaaaaaaatgcattattcttctcttatctttgtccatgacataagcaggacagcttaagttatagagggaggacgtgaagcccagagaaagatgggacttgcctgaggtcacacagcaggtcacagaactgtggtggggacctggctgtgctgcctccagcctctctgctgtagcacacctacccttcactgttccaaggagagctcgacctcaaaggtgttagtgctttggggtcaaggctgccttggggttcaatcctgtggctgtgccccctcagccttttttcttcccgtccccaggtgtgccacggaccacaatgtggacaacaccacagagatgctgcaggagtggctggcggctgtgggcgatgactatgctgctgtggtctggaggcctgagggcgagcccaggttctacccagatgaagagggtcccaagcactggaccaaagaaaggcaccagtttctgatggagctgaagcaggaagccctcacctttgccaggaactggggggccgactatatcctgtttgcagacacagacaacattctgaccaacaatcagactctgcggcttctcatggggcaggggcttccagtggtggccccaatgctggactcccagacctactactccaacttctggtgtgggatcaccccccagggctactaccgccgcacagccgagtacttccccaccaagaaccgccagcgccggggctgcttccgtgtccccatggtccactccaccttccttgcatccctgcgggctgaaggggcagaccagcttgctttctacccgccacatcccaactacacttggcctttcgacgacatcatcgtcttcgcctatgcctgccaggctgctgctactcaggaggctgaggcaggagaattgctcaaacctgggagacagaggttgtaatgagccaagatcgcaccattgcactccagcctcggtgacagagcaggactccatctcaaaaaaaaaaaaaaggggtctccgtccacgtgtgcaatgagcaccgttatgggtacatgaatgtgccggtgaaatcccaccaggggctggaagacgagagggtcaacttcatccacctgatcttagaagcactagtggacggcccccgcatgcaggcctcagctcatgtgactcggccctctaagaggcccagcaagatagggtttgacgaggtctttgtcatcagcctggctcgcaggcctgaccgtcgggaacgcatgctcgcctcgctctgggagatggagatctctgggagggtggtggacgctgtggatggctggatgctcaacagcagtgccatcaggaacctcggcgtagacctgctcccgggctaccaggacccttactcgggccgcactctgaccaagggcgaggtgggctgcttcctcagccattactccatctgggaagaggtggttgccaggggcctggcccgggtcctggtgtttgaggatgacgtgcgctttgagagcaacttcagggggcggctggagcggctgatggaggatgtggaggcagagaaactgtcttgggacctgatctacctcggacggaagcaggtgaaccctgagaaggagacggccgtggaggggctgccgggcctggtggtggctgggtactcctactggacgctggcctatgccctgcgtctggcgggtgcccgcaagctgctggcctcacagcctctgcgccgcatgctgcccgtggacgagttcctgcccatcatgttcgaccagcaccccaacgagcagtacaaggcacacttctggccacgggacctggtggccttctccgcccagcccctgctcgctgcccctacccactatgccggggacgccgagtggctcagtgacacggagacatcctctccatgggatgatgacagcggccgcctcatcagctggagcggctcccaaaagaccctgcgcagcccccgcctggacctgactggcagcagcgggcacagcctccaaccccagccccgagatgagctctaggtccaggtgatgactgcaaagcagtgtccaggagcaggccactactgcccagagagcagaggaggaggttgttggcagggactgcagatcctgtcagacctggccaccaccttgggcatggccactctgccctctggacctgtctttcatcgggagaaaccactcagagatggatcccattccctaaaggtctcacagcaaaggagcaggactcccaggcccctgtaccctgcctggcctgatttcagggccttgtggcccccagcttctgtttcaagctgggcagaccccaggatcccttccctccctaaggactcagctgaggggcccctctgcccccttctacctccacctcagcaccctcccccagcttgatgtttgggtctccccagcaccctcctccctggccggtgcaaagtacagggaggtaaagcaggacccttgcagacatgttgcccagcacacagtaggccctcaataaaagccatttgcactttaaatata

SEQ ID NO: 455763 - DNA, 4699 bp, Homo sapiens
  misc_feature (4611)..(4611): n is a, c, g, or t
  misc_feature (4619)..(4619): n is a, c, g, or t
  misc_feature (4623)..(4623): n is a, c, g, or t
  misc_feature (4642)..(4643): n is a, c, g, or t
  misc_feature (4646)..(4646): n is a, c, g, or t
gggcagagatgcctccagctgggctttgagggtgtcagtcttccctcaaataggaaagatgaggggcaggggaggatattggggacaagcctctgctcagccctgggtcctcttggaaccgggcttggagccggaggtggggagggtgtccaagctgagctcctggattcccatctgccgaactgcacccagaaccaggagtggggtgcgggcccatcctctggccaggatcctgggctcccttggccacaaagcaggacaggggaccagagatcccccaactcaggagacgtgaagctggcagctgggccgctggcctagaaatggcctcaaatggaagctgccacccgatcctggtggaggctttgagctaggctagagatcaggactccagggttcagtgcgcacgtgctgcccctgcactagggccgaagcaatgcgggtgctggcgaccgacgcaaggaggtgacgcacaggggacttaaggagcggaccgccgcgggaggacgcgcccagctcagggggactccctctgcgccccccacgctgggtctccggcccacgcgtggcccggctggtctgcggagctagcgccagggccgccagagggcgcccggggcggaggatggggcgggagccggggaagcccgggaggtggtggccgagtgggcgccgcccctctgggtctgcggctcaggtcgaagagtcggctgcgtgggccggggaatccggattccgggggttcaacgcccaggggttccatgagcccctactgttctcggacgcccggccggccccgacgcactcgtcctagcacccctcccctgtccggtcctccggcccctccgccgtcgcccctccggggtccagccgggcggggctgctccagggtcgcggctggcgcgggtccccgggccctggccctccggtgccccgggccaaggagagaaaacttgagcatccacgcacaggggtggggagcaggatcccactctgagggtgcactgccccgccctctccgggtctgcctcggccccgcccgggccccaggccccgccccctcccctcggccggcccgagagctccgggggccgctgcagccgcccaagcgcccgccatgcgcgctgcccgcgccgcgccgctgctccagctgctgctcctgctggggccgtggctggaggctgcgggcgttgcggagtcgccgctgcccgccgtggtccttgccatcctggcccgcaatgccgaacactcgctgccccactacctgggcgctctggagcggctggactacccccgggccaggatggccctctggtgagagacccgggcattggcaccgagtgggcacctaacccccagcttcgcagatggcccccgcccccggcggccctgtctgctcgctccctgcccagacaccacctagacaggcccctcccctcacagacggccctgccagcccgagccgccagagaggaccccgagccccctgctgggagacgacagacctctgaggccacaggccgacgcgggacacccacccctccttctggtcccctactccttcctcttggggccttccctgggtgtaggttgggcccagccagcccttttcaccccagccttcagggcccagctcaaccccagtgggacctgtggttggctggatttgaagaggagcagacaggaacctctgaagtccactggggcccaacgtggcagggatcgaccacgctggaggcttccgggcacaggttgggggtgccatcagcactgggctccgggctgtgcaggggagtcagaccggcccccccaccgcccccgtgctggggccagctctcttggtagatcttggtagaggggcgggatcctgtcagccaagggcagtcccccttcctggagcctctcccctctggcatctctgtacccccagggcactgggatcgaaggccacaacccctggtctgtagacaccagaacagggaggagtccctggctgaggttgggggtaaactgagaaaaatgacaagccaccctcttcaacacaccacagttgggctgggggggtggagccctggcctggggaggccgcccacaattaccacagtttgggagtttgttagttcccacccctgtaagacttgacacgtagtcttcatttctggggaattggcttaaaggggcagcatcacccaaaacctgggcacttggctaaacccccacctctgttatgggggccccttccccaggagaggggaggctgtgccccatgacagcagagcttggacccatctgcattcttagggacgcttagagcatggtttggtccttattacaacctgggggtggaggaaagcagcagctcttctgtctagtccccattcagagagggacaggggctggcctgtggtcacacagccacaggtcacataggtaggtatctgcccacctaacgaaggtaaccagggaatgcaccaggtgtgatccttaaagtcgaggtacttttcatctttcaaaatgcattcgttggccaggtgtggtggctcacgcctgtaatttcagcactttgggaggccgaagtgggcagatcacctgaggtgaggagttcaagaccagcctggctaacatggtgaaaccccatctctactaaacaaacaaaaattagccgggcatggtggtgcacacctgtaatcccaggtactcaggaggctgaggcaggagaatcacttgaacccgggaggcggaggttgcagtgagtcgagatcataccactgcactacagcctgggcgacagagcaagattccatctcaaaaaaaatgcattattcttctcttatctttgtccatgacataagcaggacagcttaagttatagagggaggacgtgaagcccagagaaagatgggacttgcctgaggtcacacagcaggtcacagaactgtggtggggacctggctgtgctgcctccagcctctctgctgtagcacacctacccttcactgttccaaggagagctcgacctcaaaggtgttagtgctttggggtcaaggctgccttggggttcaatcctgtggctgtgccccctcagccttttttcttcccgtccccaggtgtgccacggaccacaatgtggacaacaccacagagatgctgcaggagtggctggcggctgtgggcgatgactatgctgctgtggtctggaggcctgagggcgagcccaggttctacccagatgaagagggtcccaagcactggaccaaagaaaggcaccagtttctgatggagctgaagcaggaagccctcacctttgccaggaactggggggccgactatatcctgtttgcagacacagacaacattctgaccaacaatcagactctgcggcttctcatggggcaggggcttccagtggtggccccaatgctggactcccagacctactactccaacttctggtgtgggatcaccccccagggctactaccgccgcacagccgagtacttccccaccaagaaccgccagcgccggggctgcttccgtgtccccatggtccactccaccttccttgcatccctgcgggctgaaggggcagaccagcttgctttctacccgccacatcccaactacacttggcctttcgacgacatcatcgtcttcgcctatgcctgccaggctgctggggtctccgtccacgtgtgcaatgagcaccgttatgggtacatgaatgtgccggtgaaatcccaccaggggctggaagacgagagggtcaacttcatccacctgatcttagaagcactagtggacggcccccgcatgcaggcctcagctcatgtgactcggccctctaagaggcccagcaagatagggtttgacgaggtctttgtcatcagcctggctcgcaggcctgaccgtcgggaacgcatgctcgcctcgctctgggagatggagatctctgggagggtggtggacgctgtggatggctggatgctcaacagcagtgccatcaggaacctcggcgtagacctgctcccgggctaccaggacccttactcgggccgcactctgaccaagggcgaggtgggctgcttcctcagccattactccatctgggaagaggtggttgccaggggcctggcccgggtcctggtgtttgaggatgacgtgcgctttgagagcaacttcagggggcggctggagcggctgatggaggatgtggaggcagagaaactgtcttgggacctgatctacctcggacggaagcaggtgaaccctgagaaggagacggccgtggaggggctgccgggcctggtggtggctgggtactcctactggacgctggcctatgccctgcgtctggcgggtgcccgcaagctgctggcctcacagcctctgcgccgcatgctgcccgtggacgagttcctgcccatcatgttcgaccagcaccccaacgagcagtacaaggcacacttctggccacgggacctggtggccttctccgcccagcccctgctcgctgcccctacccactatgccggggacgccgagtggctcagtgacacggagacatcctctccatgggatgatgacagcggccgcctcatcagctggagcgtncaaagacntggngcccgctgactgatggagnnggnaagctcacaaccagccgaaggactagtcaggaagatggaagcggcggcagcga

SEQ ID NO: 455764 - DNA, 3330 bp, Homo sapiens
gggcagagatgcctccagctgggctttgagggtgtcagtcttccctcaaataggaaagatgaggggcaggggaggatattggggacaagcctctgctcagccctgggtcctcttggaaccgggcttggagccggaggtggggagggtgtccaagctgagctcctggattcccatctgccgaactgcacccagaaccaggagtggggtgcgggcccatcctctggccaggatcctgggctcccttggccacaaagcaggacaggggaccagagatcccccaactcaggagacgtgaagctggcagctgggccgctggcctagaaatggcctcaaatggaagctgccacccgatcctggtggaggctttgagctaggctagagatcaggactccagggttcagtgcgcacgtgctgcccctgcactagggccgaagcaatgcgggtgctggcgaccgacgcaaggaggtgacgcacaggggacttaaggagcggaccgccgcgggaggacgcgcccagctcagggggactccctctgcgccccccacgctgggtctccggcccacgcgtggcccggctggtctgcggagctagcgccagggccgccagagggcgcccggggcggaggatggggcgggagccggggaagcccgggaggtggtggccgagtgggcgccgcccctctgggtctgcggctcaggtcgaagagtcggctgcgtgggccggggaatccggattccgggggttcaacgcccaggggttccatgagcccctactgttctcggacgcccggccggccccgacgcactcgtcctagcacccctcccctgtccggtcctccggcccctccgccgtcgcccctccggggtccagccgggcggggctgctccagggtcgcggctggcgcgggtccccgggccctggccctccggtgccccgggccaaggagagaaaacttgagcatccacgcacaggggtggggagcaggatcccactctgagggtgcactgccccgccctctccgggtctgcctcggccccgcccgggccccaggccccgccccctcccctcggccggcccgagagctccgggggccgctgcagccgcccaagcgcccgccatgcgcgctgcccgcgccgcgccgctgctccagctgctgctcctgctggggccgtggctggaggctgcgggcgttgcggagtcgccgctgcccgccgtggtccttgccatcctggcccgcaatgccgaacactcgctgccccactacctgggcgctctggagcggctggactacccccgggccaggatggccctctggtgtgccacggaccacaatgtggacaacaccacagagatgctgcaggagtggctggcggctgtgggcgatgactatgctgctgtggtctggaggcctgagggcgagcccaggttctacccagatgaagagggtcccaagcactggaccaaagaaaggcaccagtttctgatggagctgaagcaggaagccctcacctttgccaggaactggggggccgactatatcctgtttgcagacacagacaacattctgaccaacaatcagactctgcggcttctcatggggcaggggcttccagtggtggccccaatgctggactcccagacctactactccaacttctggtgtgggatcaccccccagggctactaccgccgcacagccgagtacttccccaccaagaaccgccagcgccggggctgcttccgtgtccccatggtccactccaccttccttgcatccctgcgggctgaaggggcagaccagcttgctttctacccgccacatcccaactacacttggcctttcgacgacatcatcgtcttcgcctatgcctgccaggctgctggggtctccgtccacgtgtgcaatgagcaccgttatgggtacatgaatgtgccggtgaaatcccaccaggggctggaagacgagagggtcaacttcatccacctgatcttagaagcactagtggacggcccccgcatgcaggcctcagctcatgtgactcggccctctaagaggcccagcaagatagggtttgacgaggtctttgtcatcagcctggctcgcaggcctgaccgtcgggaacgcatgctcgcctcgctctgggagatggagatctctgggagggtggtggacgctgtggatggctggatgctcaacagcagtgccatcaggaacctcggcgtagacctgctcccgggctaccaggacccttactcgggccgcactctgaccaagggcgaggtgggctgcttcctcagccattactccatctgggaagaggtggttgccaggggcctggcccgggtcctggtgtttgaggatgacgtgcgctttgagagcaacttcagggggcggctggagcggctgatggaggatgtggaggcagagaaactgtcttgggacctgattcctactggacgctggcctatgccctgcgtctggcgggtgcccgcaagctgctggcctcacagcctctgcgccgcatgctgcccgtggacgagttcctgcccatcatgttcgaccagcaccccaacgagcagtacaaggcacacttctggccacgggacctggtggccttctccgcccagcccctgctcgctgcccctacccactatgccggggacgccgagtggctcagtgacacggagacatcctctccatgggatgatgacagcggccgcctcatcagctggagcggctcccaaaagaccctgcgcagcccccgcctggacctgactggcagcagcgggcacagcctccaaccccagccccgagatgagctctaggtccaggtgatgactgcaaagcagtgtccaggagcaggccactactgcccagagagcagaggaggaggttgttggcagggactgcagatcctgtcagacctggccaccaccttgggcatggccactctgccctctggacctgtctttcatcgggagaaaccactcagagatggatcccattccctaaaggtctcacagcaaaggagcaggactcccaggcccctgtaccctgcctggcctgatttcagggccttgtggcccccagcttctgtttcaagctgggcagaccccaggatcccttccctccctaaggactcagctgaggggcccctctgcccccttctacctccacctcagcaccctcccccagcttgatgtttgggtctccccagcaccctcctccctggccggtgcaaagtacagggaggtaaagcaggacccttgcagacatgttgcccagcacacagtaggccctcaataaaagccatttgcactttaaatata

SEQ ID NO: 455765 - DNA, 4391 bp, Homo sapiens
gggcagagatgcctccagctgggctttgagggtgtcagtcttccctcaaataggaaagatgaggggcaggggaggatattggggacaagcctctgctcagccctgggtcctcttggaaccgggcttggagccggaggtggggagggtgtccaagctgagctcctggattcccatctgccgaactgcacccagaaccaggagtggggtgcgggcccatcctctggccaggatcctgggctcccttggccacaaagcaggacaggggaccagagatcccccaactcaggagacgtgaagctggcagctgggccgctggcctagaaatggcctcaaatggaagctgccacccgatcctggtggaggctttgagctaggctagagatcaggactccagggttcagtgcgcacgtgctgcccctgcactagggccgaagcaatgcgggtgctggcgaccgacgcaaggaggtgacgcacaggggacttaaggagcggaccgccgcgggaggacgcgcccagctcagggggactccctctgcgccccccacgctgggtctccggcccacgcgtggcccggctggtctgcggagctagcgccagggccgccagagggcgcccggggcggaggatggggcgggagccggggaagcccgggaggtggtggccgagtgggcgccgcccctctgggtctgcggctcaggtcgaagagtcggctgcgtgggccggggaatccggattccgggggttcaacgcccaggggttccatgagcccctactgttctcggacgcccggccggccccgacgcactcgtcctagcacccctcccctgtccggtcctccggcccctccgccgtcgcccctccggggtccagccgggcggggctgctccagggtcgcggctggcgcgggtccccgggccctggccctccggtgccccgggccaaggagagaaaacttgagcatccacgcacaggggtggggagcaggatcccactctgagggtgcactgccccgccctctccgggtctgcctcggccccgcccgggccccaggccccgccccctcccctcggccggcccgagagctccgggggccgctgcagccgcccaagcgcccgccatgcgcgctgcccgcgccgcgccgctgctccagctgctgctcctgctggggccgtggctggaggctgcgggcgttgcggagtcgccgctgcccgccgtggtccttgccatcctggcccgcaatgccgaacactcgctgccccactacctgggcgctctggagcggctggactacccccgggccaggatggccctctggtgagagacccgggcattggcaccgagtgggcacctaacccccagcttcgcagatggcccccgcccccggcggccctgtctgctcgctccctgcccagacaccacctagacaggcccctcccctcacagacggccctgccagcccgagccgccagagaggaccccgagccccctgctgggagacgacagacctctgaggccacaggccgacgcgggacacccacccctccttctggtcccctactccttcctcttggggccttccctgggtgtaggttgggcccagccagcccttttcaccccagccttcagggcccagctcaaccccagtgggacctgtggttggctggatttgaagaggagcagacaggaacctctgaagtccactggggcccaacgtggcagggatcgaccacgctggaggcttccgggcacaggttgggggtgccatcagcactgggctccgggctgtgcaggggagtcagaccggcccccccaccgcccccgtgctggggccagctctcttggtagatcttggtagaggggcgggatcctgtcagccaagggcagtcccccttcctggagcctctcccctctggcatctctgtacccccagggcactgggatcgaaggccacaacccctggtctgtagacaccagaacagggaggagtccctggctgaggttgggggtaaactgagaaaaatgacaagccaccctcttcaacacaccacagttgggctgggggggtggagccctggcctggggaggccgcccacaattaccacagtttgggagtttgttagttcccacccctgtaagacttgacacgtagtcttcatttctggggaattggcttaaaggggcagcatcacccaaaacctgggcacttggctaaacccccacctctgttatgggggccccttccccaggagaggggaggctgtgccccatgacagcagagcttggacccatctgcattcttagggacgcttagagcatggtttggtccttattacaacctgggggtggaggaaagcagcagctcttctgtctagtccccattcagagagggacaggggctggcctgtggtcacacagccacaggtcacataggtaggtatctgcccacctaacgaaggtaaccagggaatgcaccaggtgtgatccttaaagtcgaggtacttttcatctttcaaaatgcattcgttggccaggtgtggtggctcacgcctgtaatttcagcactttgggaggccgaagtgggcagatcacctgaggtgaggagttcaagaccagcctggctaacatggtgaaaccccatctctactaaacaaacaaaaattagccgggcatggtggtgcacacctgtaatcccaggtactcaggaggctgaggcaggagaatcacttgaacccgggaggcggaggttgcagtgagtcgagatcataccactgcactacagcctgggcgacagagcaagattccatctcaaaaaaaatgcattattcttctcttatctttgtccatgacataagcaggacagcttaagttatagagggaggacgtgaagcccagagaaagatgggacttgcctgaggtcacacagcaggtcacagaactgtggtggggacctggctgtgctgcctccagcctctctgctgtagcacacctacccttcactgttccaaggagagctcgacctcaaaggtgttagtgctttggggtcaaggctgccttggggttcaatcctgtggctgtgccccctcagccttttttcttcccgtccccaggtgtgccacggaccacaatgtggacaacaccacagagatgctgcaggagtggctggcggctgtgggcgatgactatgctgctgtggtctggaggcctgagggcgagcccaggttctacccagatgaagagggtcccaagcactggaccaaagaaaggcaccagtttctgatggagctgaagcaggaagccctcacctttgccaggaactggggggccgactatatcctgtttgcagacacagacaacattctgaccaacaatcagactctgcggcttctcatggggcaggggcttccagtggtggccccaatgctggactcccctacctcggacggaagcaggtgaaccctgagaaggagacggccgtggaggggctgccgggcctggtggtggctgggtactcctactggacgctggcctatgccctgcgtctggcgggtgcccgcaagctgctggcctcacagcctctgcgccgcatgctgcccgtggacgagttcctgcccatcatgttcgaccagcaccccaacgagcagtacaaggcacacttctggccacgggacctggtggccttctccgcccagcccctgctcgctgcccctacccactatgccggggacgccgagtggctcagtgacacggagacatcctctccatgggatgatgacagcggccgcctcatcagctggagcggctcccaaaagaccctgcgcagcccccgcctggacctgactggcagcagcgggcacagcctccaaccccagccccgagatgagctctaggtccaggtgatgactgcaaagcagtgtccaggagcaggccactactgcccagagagcagaggaggaggttgttggcagggactgcagatcctgtcagacctggccaccaccttgggcatggccactctgccctctggacctgtctttcatcgggagaaaccactcagagatggatcccattccctaaaggtctcacagcaaaggagcaggactcccaggcccctgtaccctgcctggcctgatttcagggccttgtggcccccagcttctgtttcaagctgggcagaccccaggatcccttccctccctaaggactcagctgaggggcccctctgcccccttctacctccacctcagcaccctcccccagcttgatgtttgggtctccccagcaccctcctccctggccggtgcaaagtacagggaggtaaagcaggacccttgcagacatgttgcccagcacacagtaggccctcaataaaagccatttgcactttaaatata

SEQ ID NO: 455766 - DNA, 2647 bp, Homo sapiens
gggcagagatgcctccagctgggctttgagggtgtcagtcttccctcaaataggaaagatgaggggcaggggaggatattggggacaagcctctgctcagccctgggtcctcttggaaccgggcttggagccggaggtggggagggtgtccaagctgagctcctggattcccatctgccgaactgcacccagaaccaggagtggggtgcgggcccatcctctggccaggatcctgggctcccttggccacaaagcaggacaggggaccagagatcccccaactcaggagacgtgaagctggcagctgggccgctggcctagaaatggcctcaaatggaagctgccacccgatcctggtggaggctttgagctaggctagagatcaggactccagggttcagtgcgcacgtgctgcccctgcactagggccgaagcaatgcgggtgctggcgaccgacgcaaggaggtgacgcacaggggacttaaggagcggaccgccgcgggaggacgcgcccagctcagggggactccctctgcgccccccacgctgggtctccggcccacgcgtggcccggctggtctgcggagctagcgccagggccgccagagggcgcccggggcggaggatggggcgggagccggggaagcccgggaggtggtggccgagtgggcgccgcccctctgggtctgcggctcaggtcgaagagtcggctgcgtgggccggggaatccggattccgggggttcaacgcccaggggttccatgagcccctactgttctcggacgcccggccggccccgacgcactcgtcctagcacccctcccctgtccggtcctccggcccctccgccgtcgcccctccggggtccagccgggcggggctgctccagggtcgcggctggcgcgggtccccgggccctggccctccggtgccccgggccaaggagagaaaacttgagcatccacgcacaggggtggggagcaggatcccactctgagggtgcactgccccgccctctccgggtctgcctcggccccgcccgggccccaggccccgccccctcccctcggccggcccgagagctccgggggccgctgcagccgcccaagcgcccgccatgcgcgctgcccgcgccgcgccgctgctccagctgctgctcctgctggggccgtggctggaggctgcgggcgttgcggagtcgccgctgcccgccgtggtccttgccatcctggcccgcaatgccgaacactcgctgccccactacctgggcgctctggagcggctggactacccccgggccaggatggccctctggtgtgccacggaccacaatgtggacaacaccacagagatgctgcaggagtggctggcggctgtgggcgatgactatgctgctgtggtctggaggcctgagggcgagcccaggttctacccagatgaagagggtcccaagcactggaccaaagaaaggcaccagtttctgatggagctgaagcaggaagccctcacctttgccaggaactggggggccgactatatcctgtttgcagacacagacaacattctgaccaacaatcagactctgcggcttctcatggggcaggggcttccagtggtggccccaatgctggactcccagacctactactccaacttctggtgtgggatcaccccccagggctactaccgccgcacagccgagtacttccccaccaagaaccgccagcgccggggctgcttccgtgtccccatggtccactccaccttccttgcatccctgcgggctgaaggggcagaccagcttgctttctacccgccacatcccaactacacttggcctttcgacgacatcatcgtcttcgcctatgcctgccaggctgctggggtctccgtccacgtgtgcaatgagcaccgttatgggtacatgaatgtgccggtgaaatcccaccaggggctggaagacgagagggtcaacttcatccacctgatcttagaagcactagtggacggcccccgcatgcaggcctcagctcatgtgactcggccctctaagaggcccagcaagatagggtttgacgaggtctttgtcatcagcctggctcgcaggcctgaccgtcgggaacgcatgctcgcctcgctctgggagatggagatctctgggagggtggtggacgctgtggatggctggatgctcaacagcagtgccatcaggaacctcggcgtagacctgctcccgggctaccaggacccttactcgggccgcactctgaccaagggcgaggtgggctgcttcctcagccattactccatctgggaagaggtggttgccaggggcctggcccgggtcctggtgtttgaggatgacgtgcgctttgagagcaacttcagggggcggctggagcggctgatggaggatcgccacgccccctaaccccccttgctccccgatctacccctgccctccacgcgcccctctcatacccagaccgcccccgcaccccctgccccccaccggcttctctcacgccacctcctcctcgccccctcccctcctcccctaccctctcctcctctccccccctcacgctccctccccctcccactctccggtccccttcttaccctccccccctactcctcttcccct

SEQ ID NO: 455767 - DNA, 1948 bp, Homo sapiens
gggcagagatgcctccagctgggctttgagggtgtcagtcttccctcaaataggaaagatgaggggcaggggaggatattggggacaagcctctgctcagccctgggtcctcttggaaccgggcttggagccggaggtggggagggtgtccaagctgagctcctggattcccatctgccgaactgcacccagaaccaggagtggggtgcgggcccatcctctggccaggatcctgggctcccttggccacaaagcaggacaggggaccagagatcccccaactcaggagacgtgaagctggcagctgggccgctggcctagaaatggcctcaaatggaagctgccacccgatcctggtggaggctttgagctaggctagagatcaggactccagggttcagtgcgcacgtgctgcccctgcactagggccgaagcaatgcgggtgctggcgaccgacgcaaggaggtgacgcacaggggacttaaggagcggaccgccgcgggaggacgcgcccagctcagggggactccctctgcgccccccacgctgggtctccggcccacgcgtggcccggctggtctgcggagctagcgccagggccgccagagggcgcccggggcggaggatggggcgggagccggggaagcccgggaggtggtggccgagtgggcgccgcccctctgggtctgcggctcaggtcgaagagtcggctgcgtgggccggggaatccggattccgggggttcaacgcccaggggttccatgagcccctactgttctcggacgcccggccggccccgacgcactcgtcctagcacccctcccctgtccggtcctccggcccctccgccgtcgcccctccggggtccagccgggcggggctgctccagggtcgcggctggcgcgggtccccgggccctggccctccggtgccccgggccaaggagagaaaacttgagcatccacgcacaggggtggggagcaggatcccactctgagggtgcactgccccgccctctccgggtctgcctcggccccgcccgggccccaggccccgccccctcccctcggccggcccgagagctccgggggccgctgcagccgcccaagcgcccgccatgcgcgctgcccgcgccgcgccgctgctccagctgctgctcctgctggggccgtggctggaggctgcgggcgttgcggagtcgccgctgcccgccgtggtccttgccatcctggcccgcaatgccgaacactcgctgccccactacctgggcgctctggagcggctggactacccccgggccaggatggccctctggtgtgccacggaccacaatgtggacaacaccacagagatgctgcaggagtggctggcggctgtgggcgatgactatgctgctgtggtctggaggcctgagggcgagcccaggttctacccagatgaagagggtcccaagcactggaccaaagaaaggcaccagtttctgatggagctgaagcaggaagccctcacctttgccaggaactggggggccgactatatcctgtttgcagacacagacaacattctgaccaacaatcagactctgcggcttctcatggggcaggggcttccagtggtggccccaatgctggactcccagacctactactccaacttctggtgtgggatcaccccccagggctactaccgccgcacagccgagtacttccccaccaagaaccgccagcgccggggctgcttccgtgtccccatggtccactccaccttccttgcatccctgcgggctgaaggggcagaccagcttgctttctacccgccacatcccaactacacttggccatcacagaagaacgatcactcccgcctccgccctattgccttgcaaggcctgaatggagagtatcccgtcccaccggtgatccaaccgacagacccgataatagggtag

SEQ ID NO: 455768 - DNA, 348 bp, Homo sapiens
ccagggtataaattgagcctggatctctgaactagagctcagagtaggtgtttggatccattttctaagccagatcccagataaaggtcttagatcagtaactcaggtataatctctggacccagtccctgagtcagtgccccagactagagccttggtccagaaacagatgtactgagtttgtgagacctctgtaagagcattcccactggatcctaggagccacgctgggtctctggcaggaccactcagtgaactccttggggggctgcagcccaggcagggctggagcctgtgacgtcccctcctcaaagtttgcagacacagacaacattctgaccaacaatc

SEQ ID NO: 455769 - DNA, 697 bp, Homo sapiens
gtaatttctaatcttatagctactttgccagtcctgcaaaggcagactggaccccaggcaagaagaagggtctttttgggaaagggctgttataaattttgtttcagagtcaaaccatgaactgaattccttcccaaagttagttcagcctacgcccaggagtgaacaaggacagcttaagggttagaagcaagacagaatcagttaggtctgatttgttccgctgtcataatttcctgagttacaaatttgcaaaggcggtttcacaggggccgttctgttgaggaggggtgtgcctcctgaggctggctgagggcagaggtggaaggttggaggctagaaatgagagttcccaggtaatggcttctattttctccaaaaagtagtagagagatctttgctgggggagaggggcggtggaatgggggcttgagaagactggaggctttgttttgttttgttttgttttgttttgttgagacagaatctcactctgtcacccaggctgtagtgcagtggcgtgatctcaggtcactgcaactcccacctcctaggttcaagtgattcttctgcctcagaatcccaagtggctggggctacaggcatgtgccaccacacctggctaatttttttttgtattattactatttttttttttttgagacggagtttcgcctttgttgcccaggctggaatg

SEQ ID NO: 455770 - DNA, 958 bp, Homo sapiens
  misc_feature (18)..(19): n is a, c, g, or t
  misc_feature (44)..(44): n is a, c, g, or t
  misc_feature (887)..(887): n is a, c, g, or t
  misc_feature (889)..(889): n is a, c, g, or t
  misc_feature (892)..(892): n is a, c, g, or t
  misc_feature (900)..(900): n is a, c, g, or t
  misc_feature (908)..(908): n is a, c, g, or t
  misc_feature (911)..(912): n is a, c, g, or t
  misc_feature (922)..(922): n is a, c, g, or t
cccggatcacagtcaaanntacggctaggtacgaggctgggtgntggatcggccgagggtcacttcatccacctgatcttagaagcactagtggacggcccccgcatgcaggcctcagctcatgtgactcggccctctaagaggcccagcaagatagggtttgacgaggtctttgtcatcagcctggctcgcaggcctgaccgtcgggaacgcatgctcgcctcgctctgggagatggagatctctgggagggtggtggacgctgtggatggctggatgctcaacagcagtgccatcaggaacctcggcgtagacctgctcccgggctaccaggacccttactcgggccgcactctgaccaagggcgaggtgggctgcttcctcagccattactccatctgggaagaggtggttgccaggggcctggcccgggtcctggtgtttgaggatgacgtgcgctttgagagcaacttcagggggcggctggagcggctgatggaggatgtggaggcagagaaactgtcttgggacctgatctacctcggacggaagcaggtgaaccctgagaaggagacggccgtggaggggctgccgggcctggtggtggctgggtactcctactggacgctggcctatgccctgcgtctggcgggtgcccgcaagctgctggcctcacagcctctgcgccgcatgctgcccgtggacgagttcctgcccatcatgttcgaccagcaccccaacgagcagtacaaggcacacttctggccacgggacctggtggccttctccgcccagcccctgctcgctgcccctacccactatgccggggacgccgagtggctcagtgacacggagacatcctctccatgggatgatgacagcggccnanaanggagggtncaaaaacntgnngcccgcgacnatggaggggaagcaccaacgaaaaagcgggatgaaa

SEQ ID NO: 455771 - DNA, 3409 bp, Homo sapiens
gggcagagatgcctccagctgggctttgagggtgtcagtcttccctcaaataggaaagatgaggggcaggggaggatattggggacaagcctctgctcagccctgggtcctcttggaaccgggcttggagccggaggtggggagggtgtccaagctgagctcctggattcccatctgccgaactgcacccagaaccaggagtggggtgcgggcccatcctctggccaggatcctgggctcccttggccacaaagcaggacaggggaccagagatcccccaactcaggagacgtgaagctggcagctgggccgctggcctagaaatggcctcaaatggaagctgccacccgatcctggtggaggctttgagctaggctagagatcaggactccagggttcagtgcgcacgtgctgcccctgcactagggccgaagcaatgcgggtgctggcgaccgacgcaaggaggtgacgcacaggggacttaaggagcggaccgccgcgggaggacgcgcccagctcagggggactccctctgcgccccccacgctgggtctccggcccacgcgtggcccggctggtctgcggagctagcgccagggccgccagagggcgcccggggcggaggatggggcgggagccggggaagcccgggaggtggtggccgagtgggcgccgcccctctgggtctgcggctcaggtcgaagagtcggctgcgtgggccggggaatccggattccgggggttcaacgcccaggggttccatgagcccctactgttctcggacgcccggccggccccgacgcactcgtcctagcacccctcccctgtccggtcctccggcccctccgccgtcgcccctccggggtccagccgggcggggctgctccagggtcgcggctggcgcgggtccccgggccctggccctccggtgccccgggccaaggagagaaaacttgagcatccacgcacaggggtggggagcaggatcccactctgagggtgcactgccccgccctctccgggtctgcctcggccccgcccgggccccaggccccgccccctcccctcggccggcccgagagctccgggggccgctgcagccgcccaagcgcccgccatgcgcgctgcccgcgccgcgccgctgctccagctgctgctcctgctggggccgtggctggaggctgcgggcgttgcggagtcgccgctgcccgccgtggtccttgccatcctggcccgcaatgccgaacactcgctgccccactacctgggcgctctggagcggctggactacccccgggccaggatggccctctggtgtgccacggaccacaatgtggacaacaccacagagatgctgcaggagtggctggcggctgtgggcgatgactatgctgctgtggtctggaggcctgagggcgagcccaggttctacccagatgaagagggtcccaagcactggaccaaagaaaggcaccagtttctgatggagctgaagcaggaagccctcacctttgccaggaactggggggccgactatatcctgtttgcagacacagacaacattctgaccaacaatcagactctgcggcttctcatggggcaggggcttccagtggtggccccaatgctggactcccagacctactactccaacttctggtgtgggatcaccccccagggctactaccgccgcacagccgagtacttccccaccaagaaccgccagcgccggggctgcttccgtgtccccatggtccactccaccttccttgcatccctgcgggctgaaggggcagaccagcttgctttctacccgccacatcccaactacacttggcctttcgacgacatcatcgtcttcgcctatgcctgccaggctgctggggtctccgtccacgtgtgcaatgagcaccgttatgggtacatgaatgtgccggtgaaatcccaccaggggctggaagacgagagggtcaacttcatccacctgatcttagaagcactagtggacggcccccgcatgcaggcctcagctcatgtgactcggccctctaagaggcccagcaagatagggtttgacgaggtctttgtcatcagcctggctcgcaggcctgaccgtcgggaacgcatgctcgcctcgctctgggagatggagatctctgggagggtggtggacgctgtggatggctggatgctcaacagcagtgccatcaggaacctcggcgtagacctgctcccgggctaccaggacccttactcgggccgcactctgaccaagggcgaggtgggctgcttcctcagccattactccatctgggaagaggtggttgccaggggcctggcccgggtcctggtgtttgaggatgacgtgcgctttgagagcaacttcagggggcggctggagcggctgatggaggatgtggaggcagagaaactgtcttgggacctgatctacctcggacggaagcaggtgaaccctgagaaggagacggccgtggaggggctgccgggcctggtggtggctgggtactcctactggacgctggcctatgccctgcgtctggcgggtgcccgcaagctgctggcctcacagcctctgcgccgcatgctgcccgtggacgagttcctgcccatcatgttcgaccagcaccccaacgagcagtacaaggcacacttctggccacgggacctggtggccttctccgcccagcccctgctcgctgcccctacccactatgccggggacgccgagtggctcagtgacacggagacatcctctccatgggatgatgacagcggccgcctcatcagctggagcggctcccaaaagaccctgcgcagcccccgcctggacctgactggcagcagcgggcacagcctccaaccccagccccgagatgagctctaggtccaggtgatgactgcaaagcagtgtccaggagcaggccactactgcccagagagcagaggaggaggttgttggcagggactgcagatcctgtcagacctggccaccaccttgggcatggccactctgccctctggacctgtctttcatcgggagaaaccactcagagatggatcccattccctaaaggtctcacagcaaaggagcaggactcccaggcccctgtaccctgcctggcctgatttcagggccttgtggcccccagcttctgtttcaagctgggcagaccccaggatcccttccctccctaaggactcagctgaggggcccctctgcccccttctacctccacctcagcaccctcccccagcttgatgtttgggtctccccagcaccctcctccctggccggtgcaaagtacagggaggtaaagcaggacccttgcagacatgttgcccagcacacagtaggccctcaataaaagccatttgcactttaaatata

SEQ ID NO: 455772 - DNA, 5143 bp, Homo sapiens
gggcagagatgcctccagctgggctttgagggtgtcagtcttccctcaaataggaaagatgaggggcaggggaggatattggggacaagcctctgctcagccctgggtcctcttggaaccgggcttggagccggaggtggggagggtgtccaagctgagctcctggattcccatctgccgaactgcacccagaaccaggagtggggtgcgggcccatcctctggccaggatcctgggctcccttggccacaaagcaggacaggggaccagagatcccccaactcaggagacgtgaagctggcagctgggccgctggcctagaaatggcctcaaatggaagctgccacccgatcctggtggaggctttgagctaggctagagatcaggactccagggttcagtgcgcacgtgctgcccctgcactagggccgaagcaatgcgggtgctggcgaccgacgcaaggaggtgacgcacaggggacttaaggagcggaccgccgcgggaggacgcgcccagctcagggggactccctctgcgccccccacgctgggtctccggcccacgcgtggcccggctggtctgcggagctagcgccagggccgccagagggcgcccggggcggaggatggggcgggagccggggaagcccgggaggtggtggccgagtgggcgccgcccctctgggtctgcggctcaggtcgaagagtcggctgcgtgggccggggaatccggattccgggggttcaacgcccaggggttccatgagcccctactgttctcggacgcccggccggccccgacgcactcgtcctagcacccctcccctgtccggtcctccggcccctccgccgtcgcccctccggggtccagccgggcggggctgctccagggtcgcggctggcgcgggtccccgggccctggccctccggtgccccgggccaaggagagaaaacttgagcatccacgcacaggggtggggagcaggatcccactctgagggtgcactgccccgccctctccgggtctgcctcggccccgcccgggccccaggccccgccccctcccctcggccggcccgagagctccgggggccgctgcagccgcccaagcgcccgccatgcgcgctgcccgcgccgcgccgctgctccagctgctgctcctgctggggccgtggctggaggctgcgggcgttgcggagtcgccgctgcccgccgtggtccttgccatcctggcccgcaatgccgaacactcgctgccccactacctgggcgctctggagcggctggactacccccgggccaggatggccctctggtgagagacccgggcattggcaccgagtgggcacctaacccccagcttcgcagatggcccccgcccccggcggccctgtctgctcgctccctgcccagacaccacctagacaggcccctcccctcacagacggccctgccagcccgagccgccagagaggaccccgagccccctgctgggagacgacagacctctgaggccacaggccgacgcgggacacccacccctccttctggtcccctactccttcctcttggggccttccctgggtgtaggttgggcccagccagcccttttcaccccagccttcagggcccagctcaaccccagtgggacctgtggttggctggatttgaagaggagcagacaggaacctctgaagtccactggggcccaacgtggcagggatcgaccacgctggaggcttccgggcacaggttgggggtgccatcagcactgggctccgggctgtgcaggggagtcagaccggcccccccaccgcccccgtgctggggccagctctcttggtagatcttggtagaggggcgggatcctgtcagccaagggcagtcccccttcctggagcctctcccctctggcatctctgtacccccagggcactgggatcgaaggccacaacccctggtctgtagacaccagaacagggaggagtccctggctgaggttgggggtaaactgagaaaaatgacaagccaccctcttcaacacaccacagttgggctgggggggtggagccctggcctggggaggccgcccacaattaccacagtttgggagtttgttagttcccacccctgtaagacttgacacgtagtcttcatttctggggaattggcttaaaggggcagcatcacccaaaacctgggcacttggctaaacccccacctctgttatgggggccccttccccaggagaggggaggctgtgccccatgacagcagagcttggacccatctgcattcttagggacgcttagagcatggtttggtccttattacaacctgggggtggaggaaagcagcagctcttctgtctagtccccattcagagagggacaggggctggcctgtggtcacacagccacaggtcacataggtaggtatctgcccacctaacgaaggtaaccagggaatgcaccaggtgtgatccttaaagtcgaggtacttttcatctttcaaaatgcattcgttggccaggtgtggtggctcacgcctgtaatttcagcactttgggaggccgaagtgggcagatcacctgaggtgaggagttcaagaccagcctggctaacatggtgaaaccccatctctactaaacaaacaaaaattagccgggcatggtggtgcacacctgtaatcccaggtactcaggaggctgaggcaggagaatcacttgaacccgggaggcggaggttgcagtgagtcgagatcataccactgcactacagcctgggcgacagagcaagattccatctcaaaaaaagggaggacgtgaagcccagagaaagatgggacttgcctgaggtcacacagcaggtcacagaactgtggtggggacctggctgtgctgcctccagcctctctgctgtagcacacctacccttcactgttccaaggagagctcgacctcaaaggtgttagtgctttggggtcaaggctgccttggggttcaatcctgtggctgtgccccctcagccttttttcttcccgtccccaggtgtgccacggaccacaatgtggacaacaccacagagatgctgcaggagtggctggcggctgtgggcgatgactatgctgctgtggtctggaggcctgagggcgagcccaggttctacccagatgaagagggtcccaagcactggaccaaagaaaggcaccagtttctgatggagctgaagcaggaagccctcacctttgccaggaactggggggccgactatatcctgtttgcagacacagacaacattctgaccaacaatcagactctgcggcttctcatggggcaggggcttccagtggtggccccaatgctggactcccagacctactactccaacttctggtgtgggatcaccccccagggctactaccgccgcacagccgagtacttccccaccaagaaccgccagcgccggggctgcttccgtgtccccatggtccactccaccttccttgcatccctgcgggctgaaggggcagaccagcttgctttctacccgccacatcccaactacacttggcctttcgacgacatcatcgtcttcgcctatgcctgccaggctgctggggtctccgtccacgtgtgcaatgagcaccgttatgggtacatgaatgtgccggtgaaatcccaccaggggctggaagacgagagggtcaacttcatccacctgatcttagaagcactagtggacggcccccgcatgcaggcctcagctcatgtgactcggccctctaagaggcccagcaagatagggtttgacgaggtctttgtcatcagcctggctcgcaggcctgaccgtcgggaacgcatgctcgcctcgctctgggagatggagatctctgggagggtggtggacgctgtggatggctggatgctcaacagcagtgccatcaggaacctcggcgtagacctgctcccgggctaccaggacccttactcgggccgcactctgaccaagggcgaggtgggctgcttcctcagccattactccatctgggaagaggtggttgccaggggcctggcccgggtcctggtgtttgaggatgacgtgcgctttgagagcaacttcagggggcggctggagcggctgatggaggatgtggaggcagagaaactgtcttgggacctgatctacctcggacggaagcaggtgaaccctgagaaggagacggccgtggaggggctgccgggcctggtggtggctgggtactcctactggacgctggcctatgccctgcgtctggcgggtgcccgcaagctgctggcctcacagcctctgcgccgcatgctgcccgtggacgagttcctgcccatcatgttcgaccagcaccccaacgagcagtacaaggcacacttctggccacgggacctggtggccttctccgcccagcccctgctcgctgcccctacccactatgccggggacgccgagtggctcagtgacacggagacatcctctccatgggatgatgacagcggccgcctcatcagctggagcggctcccaaaagaccctgcgcagcccccgcctggacctgactggcagcagcgggcacagcctccaaccccagccccgagatgagctctaggtccaggtgatgactgcaaagcagtgtccaggagcaggccactactgcccagagagcagaggaggaggttgttggcagggactgcagatcctgtcagacctggccaccaccttgggcatggccactctgccctctggacctgtctttcatcgggagaaaccactcagagatggatcccattccctaaaggtctcacagcaaaggagcaggactcccaggcccctgtaccctgcctggcctgatttcagggccttgtggcccccagcttctgtttcaagctgggcagaccccaggatcccttccctccctaaggactcagctgaggggcccctctgcccccttctacctccacctcagcaccctcccccagcttgatgtttgggtctccccagcaccctcctccctggccggtgcaaagtacagggaggtaaagcaggacccttgcagacatgttgcccagcacacagtaggccctcaataaaagccatttgcactttaaatata

SEQ ID NO: 455773 - DNA, 3717 bp, Homo sapiens
gggcagagatgcctccagctgggctttgagggtgtcagtcttccctcaaataggaaagatgaggggcaggggaggatattggggacaagcctctgctcagccctgggtcctcttggaaccgggcttggagccggaggtggggagggtgtccaagctgagctcctggattcccatctgccgaactgcacccagaaccaggagtggggtgcgggcccatcctctggccaggatcctgggctcccttggccacaaagcaggacaggggaccagagatcccccaactcaggagacgtgaagctggcagctgggccgctggcctagaaatggcctcaaatggaagctgccacccgatcctggtggaggctttgagctaggctagagatcaggactccagggttcagtgcgcacgtgctgcccctgcactagggccgaagcaatgcgggtgctggcgaccgacgcaaggaggtgacgcacaggggacttaaggagcggaccgccgcgggaggacgcgcccagctcagggggactccctctgcgccccccacgctgggtctccggcccacgcgtggcccggctggtctgcggagctagcgccagggccgccagagggcgcccggggcggaggatggggcgggagccggggaagcccgggaggtggtggccgagtgggcgccgcccctctgggtctgcggctcaggtcgaagagtcggctgcgtgggccggggaatccggattccgggggttcaacgcccaggggttccatgagcccctactgttctcggacgcccggccggccccgacgcactcgtcctagcacccctcccctgtccggtcctccggcccctccgccgtcgcccctccggggtccagccgggcggggctgctccagggtcgcggctggcgcgggtccccgggccctggccctccggtgccccgggccaaggagagaaaacttgagcatccacgcacaggggtggggagcaggatcccactctgagggtgcactgccccgccctctccgggtctgcctcggccccgcccgggccccaggccccgccccctcccctcggccggcccgagagctccgggggccgctgcagccgcccaagcgcccgccatgcgcgctgcccgcgccgcgccgctgctccagctgctgctcctgctggggccgtggctggaggctgcgggcgttgcggagtcgccgctgcccgccgtggtccttgccatcctggcccgcaatgccgaacactcgctgccccactacctgggcgctctggagcggctggactacccccgggccaggatggccctctgacggccctgccagcccgagccgccagagaggaccccgagccccctgctgggagacgacagacctctgaggccacaggccgacgcgggacacccacccctccttctggtcccctactccttcctcttggggccttccctgggtgtaggttgggcccagccagcccttttcaccccagccttcagggcccagctcaaccccagtgggacctgtggttggctggatttgaagaggagcagacaggaacctctgaagtccactggggcccaacgtggcagggatcgaccacgctggaggcttccgggcacaggtgtgccacggaccacaatgtggacaacaccacagagatgctgcaggagtggctggcggctgtgggcgatgactatgctgctgtggtctggaggcctgagggcgagcccaggttctacccagatgaagagggtcccaagcactggaccaaagaaaggcaccagtttctgatggagctgaagcaggaagccctcacctttgccaggaactggggggccgactatatcctgtttgcagacacagacaacattctgaccaacaatcagactctgcggcttctcatggggcaggggcttccagtggtggccccaatgctggactcccagacctactactccaacttctggtgtgggatcaccccccagggctactaccgccgcacagccgagtacttccccaccaagaaccgccagcgccggggctgcttccgtgtccccatggtccactccaccttccttgcatccctgcgggctgaaggggcagaccagcttgctttctacccgccacatcccaactacacttggcctttcgacgacatcatcgtcttcgcctatgcctgccaggctgctggggtctccgtccacgtgtgcaatgagcaccgttatgggtacatgaatgtgccggtgaaatcccaccaggggctggaagacgagagggtcaacttcatccacctgatcttagaagcactagtggacggcccccgcatgcaggcctcagctcatgtgactcggccctctaagaggcccagcaagatagggtttgacgaggtctttgtcatcagcctggctcgcaggcctgaccgtcgggaacgcatgctcgcctcgctctgggagatggagatctctgggagggtggtggacgctgtggatggctggatgctcaacagcagtgccatcaggaacctcggcgtagacctgctcccgggctaccaggacccttactcgggccgcactctgaccaagggcgaggtgggctgcttcctcagccattactccatctgggaagaggtggttgccaggggcctggcccgggtcctggtgtttgaggatgacgtgcgctttgagagcaacttcagggggcggctggagcggctgatggaggatgtggaggcagagaaactgtcttgggacctgatctacctcggacggaagcaggtgaaccctgagaaggagacggccgtggaggggctgccgggcctggtggtggctgggtactcctactggacgctggcctatgccctgcgtctggcgggtgcccgcaagctgctggcctcacagcctctgcgccgcatgctgcccgtggacgagttcctgcccatcatgttcgaccagcaccccaacgagcagtacaaggcacacttctggccacgggacctggtggccttctccgcccagcccctgctcgctgcccctacccactatgccggggacgccgagtggctcagtgacacggagacatcctctccatgggatgatgacagcggccgcctcatcagctggagcggctcccaaaagaccctgcgcagcccccgcctggacctgactggcagcagcgggcacagcctccaaccccagccccgagatgagctctaggtccaggtgatgactgcaaagcagtgtccaggagcaggccactactgcccagagagcagaggaggaggttgttggcagggactgcagatcctgtcagacctggccaccaccttgggcatggccactctgccctctggacctgtctttcatcgggagaaaccactcagagatggatcccattccctaaaggtctcacagcaaaggagcaggactcccaggcccctgtaccctgcctggcctgatttcagggccttgtggcccccagcttctgtttcaagctgggcagaccccaggatcccttccctccctaaggactcagctgaggggcccctctgcccccttctacctccacctcagcaccctcccccagcttgatgtttgggtctccccagcaccctcctccctggccggtgcaaagtacagggaggtaaagcaggacccttgcagacatgttgcccagcacacagtaggccctcaataaaagccatttgcactttaaatata

SEQ ID NO: 455774 - DNA, 2161 bp, Homo sapiens
gtgtgcctcctgaggctggctgagggcagaggtggaaggttggaggctagaaatgagagttcccaggtgtgccacggaccacaatgtggacaacaccacagagatgctgcaggagtggctggcggctgtgggcgatgactatgctgctgtggtctggaggcctgagggcgagcccaggttctacccagatgaagagggtcccaagcactggaccaaagaaaggcaccagtttctgatggagctgaagcaggaagccctcacctttgccaggaactggggggccgactatatcctgtttgcagacacagacaacattctgaccaacaatcagactctgcggcttctcatggggcaggggcttccagtggtggccccaatgctggactcccagacctactactccaacttctggtgtgggatcaccccccagggctactaccgccgcacagccgagtacttccccaccaagaaccgccagcgccggggctgcttccgtgtccccatggtccactccaccttccttgcatccctgcgggctgaaggggcagaccagcttgctttctacccgccacatcccaactacacttggcctttcgacgacatcatcgtcttcgcctatgcctgccaggctgctggggtctccgtccacgtgtgcaatgagcaccgttatgggtacatgaatgtgccggtgaaatcccaccaggggctggaagacgagagggtcaacttcatccacctgatcttagaagcactagtggacggcccccgcatgcaggcctcagctcatgtgactcggccctctaagaggcccagcaagatagggtttgacgaggtctttgtcatcagcctggctcgcaggcctgaccgtcgggaacgcatgctcgcctcgctctgggagatggagatctctgggagggtggtggacgctgtggatggctggatgctcaacagcagtgccatcaggaacctcggcgtagacctgctcccgggctaccaggacccttactcgggccgcactctgaccaagggcgaggtgggctgcttcctcagccattactccatctgggaagaggtggttgccaggggcctggcccgggtcctggtgtttgaggatgacgtgcgctttgagagcaacttcagggggcggctggagcggctgatggaggatgtggaggcagagaaactgtcttgggacctgatctacctcggacggaagcaggtgaaccctgagaaggagacggccgtggaggggctgccgggcctggtggtggctgggtactcctactggacgctggcctatgccctgcgtctggcgggtgcccgcaagctgctggcctcacagcctctgcgccgcatgctgcccgtggacgagttcctgcccatcatgttcgaccagcaccccaacgagcagtacaaggcacacttctggccacgggacctggtggccttctccgcccagcccctgctcgctgcccctacccactatgccggggacgccgagtggctcagtgacacggagacatcctctccatgggatgatgacagcggccgcctcatcagctggagcggctcccaaaagaccctgcgcagcccccgcctggacctgactggcagcagcgggcacagcctccaaccccagccccgagatgagctctaggtccaggtgatgactgcaaagcagtgtccaggagcaggccactactgcccagagagcagaggaggaggttgttggcagggactgcagatcctgtcagacctggccaccaccttgggcatggccactctgccctctggacctgtctttcatcgggagaaaccactcagagatggatcccattccctaaaggtctcacagcaaaggagcaggactcccaggcccctgtaccctgcctggcctgatttcagggccttgtggcccccagcttctgtttcaagctgggcagaccccaggatcccttccctccctaaggactcagctgaggggcccctctgcccccttctacctccacctcagcaccctcccccagcttgatgtttgggtctccccagcaccctcctccctggccggtgcaaagtacagggaggtaaagcaggacccttgcagacatgttgcccagcacacagtaggccctcaataaaagccatttgcactttaaatata

SEQ ID NO: 455775 - DNA, 1829 bp, Homo sapiens
tcgtgatggtagatctagagtatcacgggggcgaaaagctagtacatcatctggttcagacctactactccaacttctggtgtgggatcaccccccagggctactaccgccgcacagccgagtacttccccaccaagaaccgccagcgccggggctgcttccgtgtccccatggtccactccaccttccttgcatccctgcgggctgaaggggcagaccagcttgctttctacccgccacatcccaactacacttggcctttcgacgacatcatcgtcttcgcctatgcctgccaggctgctggggtctccgtccacgtgtgcaatgagcaccgttatgggtacatgaatgtgccggtgaaatcccaccaggggctggaagacgagagggtcaacttcatccacctgatcttagaagcactagtggacggcccccgcatgcaggcctcagctcatgtgactcggccctctaagaggcccagcaagatagggtttgacgaggtctttgtcatcagcctggctcgcaggcctgaccgtcgggaacgcatgctcgcctcgctctgggagatggagatctctgggagggtggtggacgctgtggatggctggatgctcaacagcagtgccatcaggaacctcggcgtagacctgctcccgggctaccaggacccttactcgggccgcactctgaccaagggcgaggtgggctgcttcctcagccattactccatctgggaagaggtggttgccaggggcctggcccgggtcctggtgtttgaggatgacgtgcgctttgagagcaacttcagggggcggctggagcggctgatggaggatgtggaggcagagaaactgtcttgggacctgatctacctcggacggaagcaggtgaaccctgagaaggagacggccgtggaggggctgccgggcctggtggtggctgggtactcctactggacgctggcctatgccctgcgtctggcgggtgcccgcaagctgctggcctcacagcctctgcgccgcatgctgcccgtggacgagttcctgcccatcatgttcgaccagcaccccaacgagcagtacaaggcacacttctggccacgggacctggtggccttctccgcccagcccctgctcgctgcccctacccactatgccggggacgccgagtggctcagtgacacggagacatcctctccatgggatgatgacagcggccgcctcatcagctggagcggctcccaaaagaccctgcgcagcccccgcctggacctgactggcagcagcgggcacagcctccaaccccagccccgagatgagctctaggtccaggtgatgactgcaaagcagtgtccaggagcaggccactactgcccagagagcagaggaggaggttgttggcagggactgcagatcctgtcagacctggccaccaccttgggcatggccactctgccctctggacctgtctttcatcgggagaaaccactcagagatggatcccattccctaaaggtctcacagcaaaggagcaggactcccaggcccctgtaccctgcctggcctgatttcagggccttgtggcccccagcttctgtttcaagctgggcagaccccaggatcccttccctccctaaggactcagctgaggggcccctctgcccccttctacctccacctcagcaccctcccccagcttgatgtttgggtctccccagcaccctcctccctggccggtgcaaagtacagggaggtaaagcaggacccttgcagacatgttgcccagcacacagtaggccctcaataaaagccatttgcactttaaatata

SEQ ID NO: 455776 - DNA, 2870 bp, Homo sapiens
  misc_feature (2799)..(2799): n is a, c, g, or t
  misc_feature (2801)..(2801): n is a, c, g, or t
  misc_feature (2804)..(2804): n is a, c, g, or t
  misc_feature (2812)..(2812): n is a, c, g, or t
  misc_feature (2820)..(2820): n is a, c, g, or t
  misc_feature (2823)..(2824): n is a, c, g, or t
  misc_feature (2834)..(2834): n is a, c, g, or t
gggcagagatgcctccagctgggctttgagggtgtcagtcttccctcaaataggaaagatgaggggcaggggaggatattggggacaagcctctgctcagccctgggtcctcttggaaccgggcttggagccggaggtggggagggtgtccaagctgagctcctggattcccatctgccgaactgcacccagaaccaggagtggggtgcgggcccatcctctggccaggatcctgggctcccttggccacaaagcaggacaggggaccagagatcccccaactcaggagacgtgaagctggcagctgggccgctggcctagaaatggcctcaaatggaagctgccacccgatcctggtggaggctttgagctaggctagagatcaggactccagggttcagtgcgcacgtgctgcccctgcactagggccgaagcaatgcgggtgctggcgaccgacgcaaggaggtgacgcacaggggacttaaggagcggaccgccgcgggaggacgcgcccagctcagggggactccctctgcgccccccacgctgggtctccggcccacgcgtggcccggctggtctgcggagctagcgccagggccgccagagggcgcccggggcggaggatggggcgggagccggggaagcccgggaggtggtggccgagtgggcgccgcccctctgggtctgcggctcaggtcgaagagtcggctgcgtgggccggggaatccggattccgggggttcaacgcccaggggttccatgagcccctactgttctcggacgcccggccggccccgacgcactcgtcctagcacccctcccctgtccggtcctccggcccctccgccgtcgcccctccggggtccagccgggcggggctgctccagggtcgcggctggcgcgggtccccgggccctggccctccggtgccccgggccaaggagagaaaacttgagcatccacgcacaggggtggggagcaggatcccactctgagggtgcactgccccgccctctccgggtctgcctcggccccgcccgggccccaggccccgccccctcccctcggccggcccgagagctccgggggccgctgcagccgcccaagcgcccgccatgcgcgctgcccgcgccgcgccgctgctccagctgctgctcctgctggggccgtggctggaggctgcgggcgttgcggagtcgccgctgcccgccgtggtccttgccatcctggcccgcaatgccgaacactcgctgccccactacctgggcgctctggagcggctggactacccccgggccaggatggccctctggtgtgccacggaccacaatgtggacaacaccacagagatgctgcaggagtggctggcggctgtgggcgatgactatgctgctgtggtctggaggcctgagggcgagcccaggttctacccagatgaagagggtcccaagcactggaccaaagaaaggcaccagtttctgatggagctgaagcaggaagccctcacctttgccaggaactggggggccgactatatcctgtttgcagacacagacaacattctgaccaacaatcagactctgcggcttctcatggggcaggggcttccagtggtggccccaatgctggactcccagacctactactccaacttctggtgtgggatcaccccccagggctactaccgccgcacagccgagtacttccccaccaagaaccgccagcgccggggctgcttccgtgtccccatggtccactccaccttccttgcatccctgcgggctgaaggggcagaccagcttgctttctacccgccacatcccaactacacttggcctttcgacgacatcatcgtcttcgcctatgcctgccaggctgctggggtctccgtccacgtgtgcaatgagcaccgttatgggtacatgaatgtgccggtgaaatcccaccaggggctggaagacgagagggtcaacttcatccacctgatcttagaagcactagtggacggcccccgcatgcaggcctcagctcatgtgactcggccctctaagaggcccagcaagatagggtttgacgaggtctttgtcatcagcctggctcgcaggcctgaccgtcgggaacgcatgctcgcctcgctctgggagatggagatctctgggagggtggtggacgctgtggatggctggatgctcaacagcagtgccatcaggaacctcggcgtagacctgctcccgggctaccaggacccttactcgggccgcactctgaccaagggcgaggtgggctgcttcctcagccattactccatctgggaagaggtggttgccaggggcctggcccgggtcctggtgtttgaggatgacgtgcgctttgagagcaacttcagggggcggctggagcggctgatggaggatgtggaggcagagaaactgtcttgggacctgatctacctcggacggaagcaggtgaaccctgagaaggagacggccgtggaggggctgccgggcctggtggtggctgggtactcctactggacgctggcctatgccctgcgtctggcgggtgcccgcaagctgctggcctcacagcctctgcgccgcatgctgcccgtggacgagttcctgcccatcatgttcgaccagcaccccaacgagcagtacaaggcacacttctggccacgggacctggtggccttctccgcccagcccctgctcgctgcccctacccactatgccggggacgccgagtggctcagtgacacggagacatcctctccatgggatgatgacagcggccnanaanggagggtncaaaaacntgnngcccgcgacnatggaggggaagcaccaacgaaaaagcgggatgaaa

SEQ ID NO: 455777 - DNA, 3077 bp, Homo sapiens
gggcagagatgcctccagctgggctttgagggtgtcagtcttccctcaaataggaaagatgaggggcaggggaggatattggggacaagcctctgctcagccctgggtcctcttggaaccgggcttggagccggaggtggggagggtgtccaagctgagctcctggattcccatctgccgaactgcacccagaaccaggagtggggtgcgggcccatcctctggccaggatcctgggctcccttggccacaaagcaggacaggggaccagagatcccccaactcaggagacgtgaagctggcagctgggccgctggcctagaaatggcctcaaatggaagctgccacccgatcctggtggaggctttgagctaggctagagatcaggactccagggttcagtgcgcacgtgctgcccctgcactagggccgaagcaatgcgggtgctggcgaccgacgcaaggaggtgacgcacaggggacttaaggagcggaccgccgcgggaggacgcgcccagctcagggggactccctctgcgccccccacgctgggtctccggcccacgcgtggcccggctggtctgcggagctagcgccagggccgccagagggcgcccggggcggaggatggggcgggagccggggaagcccgggaggtggtggccgagtgggcgccgcccctctgggtctgcggctcaggtcgaagagtcggctgcgtgggccggggaatccggattccgggggttcaacgcccaggggttccatgagcccctactgttctcggacgcccggccggccccgacgcactcgtcctagcacccctcccctgtccggtcctccggcccctccgccgtcgcccctccggggtccagccgggcggggctgctccagggtcgcggctggcgcgggtccccgggccctggccctccggtgccccgggccaaggagagaaaacttgagcatccacgcacaggggtggggagcaggatcccactctgagggtgcactgccccgccctctccgggtctgcctcggccccgcccgggccccaggccccgccccctcccctcggccggcccgagagctccgggggccgctgcagccgcccaagcgcccgccatgcgcgctgcccgcgccgcgccgctgctccagctgctgctcctgctggggccgtggctggaggctgcgggcgttgcggagtcgccgctgcccgccgtggtccttgccatcctggcccgcaatgccgaacactcgctgccccactacctgggcgctctggagcggctggactacccccgggccaggatggccctctggtgtgccacggaccacaatgtggacaacaccacagagatgctgcaggagtggctggcggctgtgggcgatgactatgctgctgtggtctggaggcctgagggcgagcccaggttctacccagatgaagagggtcccaagcactggaccaaagaaaggcaccagtttctgatggagctgaagcaggaagccctcacctttgccaggaactggggggccgactatatcctgtttgcagacacagacaacattctgaccaacaatcagactctgcggcttctcatggggcaggggcttccagtggtggccccaatgctggactcccagacctactactccaacttctggtgtgggatcaccccccagggctactaccgccgcacagccgagtacttccccaccaagaaccgccagcgccggggctgcttccgtgtccccatggtccactccaccttccttgcatccctgcgggctgaaggggcagaccagcttgctttctacccgccacatcccaactacacttggcctttcgacgacatcatcgtcttcgcctatgcctgccaggctgctggggtctccgtccacgtgtgcaatgagcaccgttatgggtacatgaatgtgccggtgaaatcccaccaggggctggaagacgagagggtcaacttcatccacctgatcttagaagcactagtggacggcccccgcatgcaggcctcagctcatgtgactcggccctctaagaggcccagcaagatagggtttgacgaggtctttgtcatcagcctggctcgcaggcctgaccgtcgggaacgcatgctcgcctcgctctgggagatggagatctctgggagggtggtggacgctgtggatggctggatgctcaacagcagtgccatcaggaacctcggcgtagacctgctcccgggctaccaggacccttactcgggccgcactctgaccaagggcgaggtgggctgcttcctcagccattactccatctgggaagagcgagcagtacaaggcacacttctggccacgggacctggtggccttctccgcccagcccctgctcgctgcccctacccactatgccggggacgccgagtggctcagtgacacggagacatcctctccatgggatgatgacagcggccgcctcatcagctggagcggctcccaaaagaccctgcgcagcccccgcctggacctgactggcagcagcgggcacagcctccaaccccagccccgagatgagctctaggtccaggtgatgactgcaaagcagtgtccaggagcaggccactactgcccagagagcagaggaggaggttgttggcagggactgcagatcctgtcagacctggccaccaccttgggcatggccactctgccctctggacctgtctttcatcgggagaaaccactcagagatggatcccattccctaaaggtctcacagcaaaggagcaggactcccaggcccctgtaccctgcctggcctgatttcagggccttgtggcccccagcttctgtttcaagctgggcagaccccaggatcccttccctccctaaggactcagctgaggggcccctctgcccccttctacctccacctcagcaccctcccccagcttgatgtttgggtctccccagcaccctcctccctggccggtgcaaagtacagggaggtaaagcaggacccttgcagacatgttgcccagcacacagtaggccctcaataaaagccatttgcactttaaatata

SEQ ID NO: 455778 - DNA, 2801 bp, Homo sapiens
gggcagagatgcctccagctgggctttgagggtgtcagtcttccctcaaataggaaagatgaggggcaggggaggatattggggacaagcctctgctcagccctgggtcctcttggaaccgggcttggagccggaggtggggagggtgtccaagctgagctcctggattcccatctgccgaactgcacccagaaccaggagtggggtgcgggcccatcctctggccaggatcctgggctcccttggccacaaagcaggacaggggaccagagatcccccaactcaggagacgtgaagctggcagctgggccgctggcctagaaatggcctcaaatggaagctgccacccgatcctggtggaggctttgagctaggctagagatcaggactccagggttcagtgcgcacgtgctgcccctgcactagggccgaagcaatgcgggtgctggcgaccgacgcaaggaggtgacgcacaggggacttaaggagcggaccgccgcgggaggacgcgcccagctcagggggactccctctgcgccccccacgctgggtctccggcccacgcgtggcccggctggtctgcggagctagcgccagggccgccagagggcgcccggggcggaggatggggcgggagccggggaagcccgggaggtggtggccgagtgggcgccgcccctctgggtctgcggctcaggtcgaagagtcggctgcgtgggccggggaatccggattccgggggttcaacgcccaggggttccatgagcccctactgttctcggacgcccggccggccccgacgcactcgtcctagcacccctcccctgtccggtcctccggcccctccgccgtcgcccctccggggtccagccgggcggggctgctccagggtcgcggctggcgcgggtccccgggccctggccctccggtgccccgggccaaggagagaaaacttgagcatccacgcacaggggtggggagcaggatcccactctgagggtgcactgccccgccctctccgggtctgcctcggccccgcccgggccccaggccccgccccctcccctcggccggcccgagagctccgggggccgctgcagccgcccaagcgcccgccatgcgcgctgcccgcgccgcgccgctgctccagctgctgctcctgctggggccgtggctggaggctgcgggcgttgcggagtcgccgctgcccgccgtggtccttgccatcctggcccgcaatgccgaacactcgctgccccactacctgggcgctctggagcggctggactacccccgggccaggatggccctctggtgtgccacggaccacaatgtggacaacaccacagagatgctgcaggagtggctggcggctgtgggcgatgactatgctgctgtggtctggaggcctgagggcgagcccaggttctacccagatgaagagggtcccaagcactggaccaaagaaaggcaccagtttctgatggagctgaagcaggaagccctcacctttgccaggaactggggggccgactatatcctgtttgcagacacagacaacattctgaccaacaatcagactctgcggcttctcatggggcaggggcttccagtggtggccccaatgctggactcccagacctactactccaacttctggtgtgggatcaccccccagggctactaccgccgcacagccgagtacttccccaccaagaaccgccagcgccggggctgcttccgtgtccccatggtccactccaccttccttgcatccctgcgggctgaaggggcagaccagcttgctttctacccgccacatcccaactacacttggcctttcgacgacatcatcgtcttcgcctatgcctgccaggctgctggggtctccgtccacgtgtgcaatgagcaccgttatgggtacatgaatgtgccggtgaaatcccaccaggggctggaagacgagagggtcaacttcatccacctgatcttagaagcactagtggacggcccccgcatgcaggcctcagctcatgtgactcggccctctaagaggcccagcaagatagggtttgacgaggtctttgtcatcagcctggctcgcaggcctgaccgtcgggaacgcatgctcgcctcgctctgggagatggagatctctgggagggtggtggacgctgtggatggctggatgctcaacagcagtgccatcaggaacctcggcgtagacctgctcccgggctaccaggacccttactcgggccgcactctgaccaagggcgaggtgggctgcttcctcagccattactccatctgggaagaggttgcccatggggccctgggaccgtggtcctgtgctgctgtcgagagactgacgatgccgcttattgagagcaatactttcaggggtgcgtactgagagtcggcttgcattggacggatgtgagcacggcagtagaaaaagtgcttgtaggggggagcgctgattcttagatatcagagacctcgaaaagagacgagtgatatacgctgcaagtaaggaacaccggacggagtgatgccggggctcgacgggtggtccttgtgagtgcgaatggacatcggtggagtacattgcctaccatggtaacggcgtgagccgtaactgacccctgctgtgactcgcgagggggtggcacactgggaaaggcttggcctgtgcccatcaaaagcaggacatagaggcaaccgggcaatttgtatcacatcgggaagcatacagaagcattcgcctgaaccagaagagtggtaacagagaaccacgg

SEQ ID NO: 455779 - DNA, 461 bp, Homo sapiens
cggaagcaggtgaaccctgagaaggagacggccgtggaggggctgccgggcctggtggtggctgggtactcctactggacgctggcctatgccctgcgtctggcgggtgcccgcaagctgctggcctcacagcctctgcgccgcatgctgcccgtggacgagttcctgcccatcatgttcgaccagcaccccaagtgaggctctgatgggggccgggcatggcagggcagaggcgtcccctccaggaactcacctcagtcagcaggaagtcccctcacctggcagatggggagactgggactggcaaggccaagccacttggcccaggtcaccaaggagtggctcagcctagccttagagtcagtccattctcggtgtgtactttgcacagtgcatgcaggcttttttttgaaatggagtcttgctctgttgcccaggctagaatgcagtggcatgatttt

SEQ ID NO: 455780 - DNA, 3919 bp, Homo sapiens
gcgggggcgggctttgccgagcgcagagctgcagccgccgagccggacgtgtgcgcgaagatggcgggccggagcatgcaagcggcaagatgtcctacagatgaattatctttaaccaattgtgcagttgtgaatgaaaaggatttccagtctggccagcatgtgattgtgaggacctctcccaatcacaggtacacatttacactgaagacacatccatcggtggttccagggagcattgcattcagtttacctcagagaaaatgggctgggctttctattgggcaagaaatagaagtctccttatatacatttgacaaagccaaacagtgtattggcacaatgaccatcgagattgatttcctgcagaaaaaaagcattgactccaacccttatgacaccgacaagatggcagcagaatttattcagcaattcaacaaccaggccttctcagtgggacaacagcttgtctttagcttcaatgaaaagctttttggcttactggtgaaggacattgaatccatggatcctagcatcctgaagggagagcctgcgacagggaaaaggcagaagattgaagtaggactggttgttggaaacagtcaagttgcatttgaaaaagcagaaaattcgtcacttaatcttattggcaaagctaaaaccaaggaaaatcgccaatcaattatcaatcctgactggaactttgaaaaaatgggaataggaggtctagacaaggaattttcagatattttccgacgagcatttgccttcccgagtatttcctccagagattgtggagcagatgggttgtatacatgttaaaggcatcctgttatatggacccccaggttgtggtaagactctcttggctcgacagattggcaagatgttgaatgcaagagagcccaaagtggtcaatgggccagaaatccttaacaaatatgtgggagaatcagaggctaacattcgcaaactttttgctgatgctgaagaggagcaaaggaggcttggtgctaacagtggtttgcacatcatcatctttgatgaaattgatgccatctgcaagcagagagggagcatggctggtagcacgggagttcatgacactgttgtcaaccagttgctgtccaaaattgatggcgtggagcagctaaacaacatcctagtcattggaatgaccaatagaccagatctgatagatgaggctcttcttagacctggaagactggaagttaaaatggagataggcttgccagatgagaaaggccgactacagattcttcacatccacacagcaagaatgagagggcatcagttactctctgctgatgtagacattaaagaactggccgtggagaccaagaatttcagtggtgctgaattggagggtctggtgcgagcagcccagtccactgctatgaatagacacataaaggccagtactaaagtggaagtggacatggagaaagcagaaagcctgcaagtgacgagaggagacttccttgcttctttggagaatgatatcaaaccagcctttggcacaaaccaagaagattatgcaagttacattatgaacggtatcatcaaatggggtgacccagttactcgagttctagatgatggggagctgctggtgcagcagactaagaacagtgaccgcacaccattggtcagcgtgcttctggaaggccctcctcacagtgggaagactgctttagctgcaaaaattgcagaggaatccaacttcccgttcatcaagatctgttctcctgataaaatgattggcttttctgaaacagccaaatgtcaggccatgaagaagatctttgatgatgcgtacaaatcccagctcagttgtgtggttgtggatgacattgagagattgcttgattacgtccctattggccctcgattttcaaatcttgtattacaggctcttctcgttttactgaaaaaggcacctcctcagggccgcaagcttcttatcattgggaccactagccgcaaagatgtccttcaggagatggaaatgcttaacgctttcagcaccaccatccacgtgcccaacattgccacaggagagcagctgttggaagctttggagcttttgggcaacttcaaggataaggaacgcaccacaattgcacagcaagtcaaagggaagaaggtctggataggaatcaagaagttactaatgctgatcgagatgtccctacagatggatcctgaataccgtgtgagaaaattcttggccctcttaagagaagaaggagctagcccccttgattttgattgaaaatgaactatttgaaacacacagtgaccaagggaagtgaccaaggtgaagatggcctaggatcttcactgtcttactcaagatactggactaagtggaacgttctctaccttcaacatgtgctcgctctgcatgattagtgcaataaaactcccttccttatgcatactgagatagcttagtgtctcgtggaaggtgtcaatttggtttagaatgctgcgcttaccttcccatgcaggctaaagtgattccttcttgctcagtccctctgggtgggaaccatccagtacttgtggacactacacgtttcaacctctctactagcaccatcacccttgaaaactctcagtcagtgtcatgaatgttgcatgacaacagttggccgattagaaggcagactttctacatgcaaatctggcttagtaaatcgaggtgtgggccagagatcctctgacagctgtcctgagctaacactaaaagtcactgggtatttggttaaaggtctcccacaagactggtattctctttgcctgaagaaacaaggcattgaatctctaaaatgctgttctcaatcattgtcagagatgttttcaagttgcagtcagaagatctttcttaatagaaagtcagatgactaccgtgttggttgtgacttccccttaagtataactaatttgctctgtggtaagagatatgctcattattaccacttagaagatgttgttaaaaacatgtgaaagataggtatggaaaaagcatacacccccaaacagaaaggagttattaaagtaatttacaaacctctcagcactaattagtgtccaactccaagtgggtcaattccttagtataatattaaggcttactagtatcactgctttttccttagcttaatgacttacttagaatttatcctttattttaaatgatctgtactatctagtgtctaaaacactattctccagaaaaatcaatcattttctagccctctccctcagtcctttattgtccattccaatacattgaacacatttcctttaccctccacacacttcttccaaaaggaagcacccgttgagtccttttgagggtgatttgtcttacaactgactgacttagcaggaatttaattaggtcatatttggtgatgagacttatggagtgtgcctctctctcccaactgctgcttaaaatgcaaggacaagcaattagaagccatcctaaggtgcttacctcacacgccacccatgaggcttgtggccacagtggcacttgggtgtggctcctctgttatttgtcctcatgtgagaaagcagatcatctccaaatcttgccatttgtatacttttggtggagacttggatgtcatatcttctttgttttgggttttcttccctagcttattttgtggcttttaaagaagtggattgtattgtgagatcctgtgattcctggtggccagtatcctggattcctctaagatcttgcctctttcctcctcatgaaagcagcacacattgtgttaacttatgtctcttgttaaatgagcttaatgtctttgtgttttgtccaaaactgtattgaaaaaatattgtttaatgcaaatgaaggaatgcaataaag

SEQ ID NO: 455781 - DNA, 1842 bp, Homo sapiens
  misc_feature (1427)..(1427): n is a, c, g, or t
  misc_feature (1610)..(1610): n is a, c, g, or t
  misc_feature (1622)..(1622): n is a, c, g, or t
  misc_feature (1628)..(1630): n is a, c, g, or t
  misc_feature (1633)..(1633): n is a, c, g, or t
  misc_feature (1639)..(1639): n is a, c, g, or t
  misc_feature (1646)..(1647): n is a, c, g, or t
  misc_feature (1654)..(1654): n is a, c, g, or t
  misc_feature (1659)..(1659): n is a, c, g, or t
  misc_feature (1661)..(1661): n is a, c, g, or t
  misc_feature (1666)..(1666): n is a, c, g, or t
  misc_feature (1670)..(1670): n is a, c, g, or t
  misc_feature (1676)..(1676): n is a, c, g, or t
  misc_feature (1682)..(1682): n is a, c, g, or t
  misc_feature (1687)..(1688): n is a, c, g, or t
  misc_feature (1696)..(1696): n is a, c, g, or t
  misc_feature (1701)..(1701): n is a, c, g, or t
  misc_feature (1703)..(1705): n is a, c, g, or t
  misc_feature (1710)..(1710): n is a, c, g, or t
  misc_feature (1720)..(1720): n is a, c, g, or t
  misc_feature (1724)..(1724): n is a, c, g, or t
  misc_feature (1728)..(1728): n is a, c, g, or t
  misc_feature (1731)..(1731): n is a, c, g, or t
  misc_feature (1739)..(1739): n is a, c, g, or t
  misc_feature (1750)..(1751): n is a, c, g, or t
  misc_feature (1756)..(1756): n is a, c, g, or t
  misc_feature (1758)..(1759): n is a, c, g, or t
  misc_feature (1766)..(1766): n is a, c, g, or t
  misc_feature (1769)..(1770): n is a, c, g, or t
  misc_feature (1777)..(1777): n is a, c, g, or t
  misc_feature (1782)..(1782): n is a, c, g, or t
  misc_feature (1788)..(1788): n is a, c, g, or t
  misc_feature (1794)..(1795): n is a, c, g, or t
  misc_feature (1799)..(1799): n is a, c, g, or t
  misc_feature (1801)..(1801): n is a, c, g, or t
  misc_feature (1807)..(1807): n is a, c, g, or t
  misc_feature (1823)..(1824): n is a, c, g, or t
  misc_feature (1830)..(1830): n is a, c, g, or t
atttctaattaattcagatggggaagaaaatctctagtgactattattttttaaacctgtacctgtgtgtccctccagtgaaggccatttaaaccccatttttggtgaagtagtttatgattcatttatgtgaaacttttagttactagaaacactacaggtattttgtactcctgtgatttttaaaaaaatgcttctttttttcccctagtctccttatatacatttgacaaagccaaacagtgtattggcacaatgaccatcgagattgatttcctgcagaaaaaaagcattgactccaacccttatgacaccgacaagatggcagcagaatttattcagcaattcaacaaccaggccttctcagtgggacaacaggtagtttttaattttctttcattcctttaactttataggtattctaatttctgcagttttccaaaattaattccaccttttaaaaagtgagaggggctttgcgtatcaactcgtatatccaaggtgagtgataaaagtgagggagatgtatttactgaacttcaaggagtctgttcagaaaaattctaaagtagcttttagattaaaatgtcatgtataattatagcagcttttccctcagcaaatttgggaaccctgtggacatatatatctgaaattcctttttatatcataggacatttgttttgcctctggaatgtctgtctctttcactaatatagttctgtagaaaatgtagctcttggccagacatggtggctcatgcctgtaatcccaacactttgggagactgagttgggaggatcgtttgagcccaggagctcaagatcagcttgggcaacaaagtgagaccctgtctctacaaaaatttttttaaaagtagctgcgtgtagtggtctcaactactcaagaggctgaggtgggaggacggcttgagcctgggaggttgaggctgcagtgagccatgattgtgccacggcactccagcctgggtgacagatcgagattgtctcaaaaaaaaaaaaaaagttcttattttggttatgggcttatttgagaatcttaaaaaactgaattcctgctagataggaaaaggatatagtacattattttaaaaagagtactagaattggaatgaacctcaagagattaccttatgtaactccacatatacaaatgaggaattttatttttttattttttaaaattttatttatttattcatttattttttgagatggtgtgttaccctgtcatccaggctggagtgcagcggcaccatctcagctcactgcaacctccgctttctgggttcaagtgattttcctgcctctgcctcccgagtaactgggataacaggcatgcgccaccacacccgactaattttgtacttttagtagagatggggtttcaccatgttaatcaggctngtctcgaactcatgagctcaggtgatccatccgccttgacctcccaaagtgctgagattacaggcatgagccaccatgcccaaccattttttttttgtatttttagtagagatggggttttgccatgttggccaggctggtcctgacctcaagtgatcctcccactcatgcctgtaatcccancactttgggagnctgagnnnggnggatcntttgagnncaggagntcaanancagcntggncaacanagtganacccnntctctacnaaaantnnnaaaantagctgcgtntgtngtcncanctactcangaggctgaggnnggagnanngcttganccnnggaggtngaggntgcagngagccnngatngngccacngcactccagcctgggnnacagancgagattgtctc

SEQ ID NO: 455782 - DNA, 3994 bp, Homo sapiens
  misc_feature (3952)..(3952): n is a, c, g, or t
  misc_feature (3956)..(3956): n is a, c, g, or t
gcgggggcgggctttgccgagcgcagagctgcagccgccgagccggacgtgtgcgcgaagatggcgggccggagcatgcaagcggcaagatgtcctacagatgaattatctttaaccaattgtgcagttgtgaatgaaaaggatttccagtctggccagcatgtgattgtgaggacctctcccaatcacaggtacacatttacactgaagacacatccatcggtggttccagggagcattgcattcagtttacctcagagaaaatgggctgggctttctattgggcaagaaatagaagtctccttatatacatttgacaaagccaaacagtgtattggcacaatgaccatcgagattgatttcctgcagaaaaaaagcattgactccaacccttatgacaccgacaagatggcagcagaatttattcagcaattcaacaaccaggccttctcagtgggacaacagcttgtctttagcttcaatgaaaagctttttggcttactggtgaaggacattgaatccatggatcctagcatcctgaagggagagcctgcgacagggaaaaggcagaagattgaagtaggactggttgttggaaacagtcaagttgcatttgaaaaagcagaaaattcgtcacttaatcttattggcaaagctaaaaccaaggaaaatcgccaatcaattatcaatcctgactggaactttgaaaaaatgggaataggaggtctagacaaggaattttcagatattttccgacgagcatttgccttcccgagtatttcctccagagattgtggagcagatgggttgtatacatgttaaaggcatcctgttatatggacccccaggttgtggtaagactctcttggctcgacagattggcaagatgttgaatgcaagagagcccaaagtggtcaatgggccagaaatccttaacaaatatgtgggagaatcagaggctaacattcgcaaactttttgctgatgctgaagaggagcaaaggaggcttggtgctaacagtggtttgcacatcatcatctttgatgaaattgatgccatctgcaagcagagagggagcatggctggtagcacgggagttcatgacactgttgtcaaccagttgctgtccaaaattgatggcgtggagcagctaaacaacatcctagtcattggaatgaccaatagaccagatctgatagatgaggctcttcttagacctggaagactggaagttaaaatggagataggcttgccagatgagaaaggccgactacagattcttcacatccacacagcaagaatgagagggcatcagttactctctgctgatgtagacattaaagaactggccgtggagaccaagaatttcagtggtgctgaattggagggtctggtgcgagcagcccagtccactgctatgaatagacacataaaggccagtactaaagtggaagtggacatggagaaagcagaaagcctgcaagtgacgagaggagacttccttgcttctttggagaatgatatcaaaccagcctttggcacaaaccaagaagattatgcaagttacattatgaacggtatcatcaaatggggtgacccagttactcgagttctagatgatggggagctgctggtgcagcagactaagaacagtgaccgcacaccattggtcagcgtgcttctggaaggccctcctcacagtgggaagactgctttagctgcaaaaattgcagaggaatccaacttcccgttcatcaagatctgttctcctgataaaatgattggcttttctgaaacagccaaatgtcaggccatgaagaagatctttgatgatgcgtacaaatcccagctcagttgtgtggttgtggatgacattgagagattgcttgattacgtccctattggccctcgattttcaaatcttgtattacaggctcttctcgttttactgaaaaaggcacctcctcagggccgcaagcttcttatcattgggaccactagccgcaaagatgtccttcaggagatggaaatgcttaacgctttcagcaccaccatccacgtgcccaacattgccacaggagagcagctgttggaagctttggagcttttgggcaacttcaaggataaggaacgcaccacaattgcacagcaagtcaaagggaagaaggtctggataggaatcaagaagttactaatgctgatcgagatgtccctacagatggatcctgaataccgtgtgagaaaattcttggccctcttaagagaagaaggagctagcccccttgattttgattgaaaatgaactatttgaaacacacagtgaccaagggaagtgaccaaggtgaagatggcctaggatcttcactgtcttactcaagatactggactaagtggaacgttctctaccttcaacatgtgctcgctctgcatgattagtgcaataaaactcccttccttatgcatactgagatagcttagtgtctcgtggaaggtgtcaatttggtttagaatgctgcgcttaccttcccatgcaggctaaagtgattccttcttgctcagtccctctgggtgggaaccatccagtacttgtggacactacacgtttcaacctctctactagcaccatcacccttgaaaactctcagtcagtgtcatgaatgttgcatgacaacagttggccgattagaaggcagactttctacatgcaaatctggcttagtaaatcgaggtgtgggccagagatcctctgacagctgtcctgagctaacactaaaagtcactgggtatttggttaaaggtctcccacaagactggtattctctttgcctgaagaaacaaggcattgaatctctaaaatgctgttctcaatcattgtcagagatgttttcaagttgcagtcagaagatctttcttaatagaaagtcagatgactaccgtgttggttgtgacttccccttaagtataactaatttgctctgtggtaagagatatgctcattattaccacttagaagatgttgttaaaaacatgtgaaagataggtatggaaaaagcatacacccccaaacagaaaggagttattaaagtaatttacaaacctctcagcactaattagtgtccaactccaagtgggtcaattccttagtataatattaaggcttactagtatcactgctttttccttagcttaatgacttacttagaatttatcctttattttaaatgatctgtactatctagtgtctaaaacactattctccagaaaaatcaatcattttctagccctctccctcagtcctttattgtccattccaatacattgaacacatttcctttaccctccacacacttcttccaaaaggaagcacccgttgagtccttttgagggtgatttgtcttacaactgactgacttagcaggaatttaattaggtcatatttggtgatgagacttatggagtgtgcctctctctcccaactgctgcttaaaatgcaaggacaagcaattagaagccatcctaaggtgcttacctcacacgccacccatgaggcttgtggccacagtggcacttgggtgtggctcctctgttatttgtcctcatgtgagaaagcagatcatctccaaatcttgccatttgtatacttttggtggagacttggatgtcatatcttctttgttttgggttttcttccctagcttattttgtggcttttaaagaagtggattgtattgtgagatcctgtgattcctggtggccagtatcctggattcctctaagatcttgcctctttcctcctcatgaaagcagcacacattgtgttaacttatgtctcttgttaaatgagcttaatgtctttgtgttttgtccaaaactgtattgaaaaaatattgtttaatgcaaatgaaggaatgcaataaaggcctcgttggcctcagcggtggagctctgcgcnaagnctataaaaattataatctcttactattacttatcacaa

SEQ ID NO: 455783 - DNA, 3997 bp, Homo sapiens
  misc_feature (3956)..(3956): n is a, c, g, or t
gcgggggcgggctttgccgagcgcagagctgcagccgccgagccggacgtgtgcgcgaagatggcgggccggagcatgcaagcggcaagatgtcctacagatgaattatctttaaccaattgtgcagttgtgaatgaaaaggatttccagtctggccagcatgtgattgtgaggacctctcccaatcacaggtacacatttacactgaagacacatccatcggtggttccagggagcattgcattcagtttacctcagagaaaatgggctgggctttctattgggcaagaaatagaagtctccttatatacatttgacaaagccaaacagtgtattggcacaatgaccatcgagattgatttcctgcagaaaaaaagcattgactccaacccttatgacaccgacaagatggcagcagaatttattcagcaattcaacaaccaggccttctcagtgggacaacagcttgtctttagcttcaatgaaaagctttttggcttactggtgaaggacattgaatccatggatcctagcatcctgaagggagagcctgcgacagggaaaaggcagaagattgaagtaggactggttgttggaaacagtcaagttgcatttgaaaaagcagaaaattcgtcacttaatcttattggcaaagctaaaaccaaggaaaatcgccaatcaattatcaatcctgactggaactttgaaaaaatgggaataggaggtctagacaaggaattttcagatattttccgacgagcatttgccttcccgagtatttcctccagagattgtggagcagatgggttgtatacatgttaaaggcatcctgttatatggacccccaggttgtggtaagactctcttggctcgacagattggcaagatgttgaatgcaagagagcccaaagtggtcaatgggccagaaatccttaacaaatatgtgggagaatcagaggctaacattcgcaaactttttgctgatgctgaagaggagcaaaggaggcttggtgctaacagtggtttgcacatcatcatctttgatgaaattgatgccatctgcaagcagagagggagcatggctggtagcacgggagttcatgacactgttgtcaaccagttgctgtccaaaattgatggcgtggagcagctaaacaacatcctagtcattggaatgaccaatagaccagatctgatagatgaggctcttcttagacctggaagactggaagttaaaatggagataggcttgccagatgagaaaggccgactacagattcttcacatccacacagcaagaatgagagggcatcagttactctctgctgatgtagacattaaagaactggccgtggagaccaagaatttcagtggtgctgaattggagggtctggtgcgagcagcccagtccactgctatgaatagacacataaaggccagtactaaagtggaagtggacatggagaaagcagaaagcctgcaagtgacgagaggagacttccttgcttctttggagaatgatatcaaaccagcctttggcacaaaccaagaagattatgcaagttacattatgaacggtatcatcaaatggggtgacccagttactcgagttctagatgatggggagctgctggtgcagcagactaagaacagtgaccgcacaccattggtcagcgtgcttctggaaggccctcctcacagtgggaagactgctttagctgcaaaaattgcagaggaatccaacttcccgttcatcaagatctgttctcctgataaaatgattggcttttctgaaacagccaaatgtcaggccatgaagaagatctttgatgatgcgtacaaatcccagctcagttgtgtggttgtggatgacattgagagattgcttgattacgtccctattggccctcgattttcaaatcttgtattacaggctcttctcgttttactgaaaaaggcacctcctcagggccgcaagcttcttatcattgggaccactagccgcaaagatgtccttcaggagatggaaatgcttaacgctttcagcaccaccatccacgtgcccaacattgccacaggagagcagctgttggaagctttggagcttttgggcaacttcaaggataaggaacgcaccacaattgcacagcaagtcaaagggaagaaggtctggataggaatcaagaagttactaatgctgatcgagatgtccctacagatggatcctgaataccgtgtgagaaaattcttggccctcttaagagaagaaggagctagcccccttgattttgattgaaaatgaactatttgaaacacacagtgaccaagggaagtgaccaaggtgaagatggcctaggatcttcactgtcttactcaagatactggactaagtggaacgttctctaccttcaacatgtgctcgctctgcatgattagtgcaataaaactcccttccttatgcatactgagatagcttagtgtctcgtggaaggtgtcaatttggtttagaatgctgcgcttaccttcccatgcaggctaaagtgattccttcttgctcagtccctctgggtgggaaccatccagtacttgtggacactacacgtttcaacctctctactagcaccatcacccttgaaaactctcagtcagtgtcatgaatgttgcatgacaacagttggccgattagaaggcagactttctacatgcaaatctggcttagtaaatcgaggtgtgggccagagatcctctgacagctgtcctgagctaacactaaaagtcactgggtatttggttaaaggtctcccacaagactggtattctctttgcctgaagaaacaaggcattgaatctctaaaatgctgttctcaatcattgtcagagatgttttcaagttgcagtcagaagatctttcttaatagaaagtcagatgactaccgtgttggttgtgacttccccttaagtataactaatttgctctgtggtaagagatatgctcattattaccacttagaagatgttgttaaaaacatgtgaaagataggtatggaaaaagcatacacccccaaacagaaaggagttattaaagtaatttacaaacctctcagcactaattagtgtccaactccaagtgggtcaattccttagtataatattaaggcttactagtatcactgctttttccttagcttaatgacttacttagaatttatcctttattttaaatgatctgtactatctagtgtctaaaacactattctccagaaaaatcaatcattttctagccctctccctcagtcctttattgtccattccaatacattgaacacatttcctttaccctccacacacttcttccaaaaggaagcacccgttgagtccttttgagggtgatttgtcttacaactgactgacttagcaggaatttaattaggtcatatttggtgatgagacttatggagtgtgcctctctctcccaactgctgcttaaaatgcaaggacaagcaattagaagccatcctaaggtgcttacctcacacgccacccatgaggcttgtggccacagtggcacttgggtgtggctcctctgttatttgtcctcatgtgagaaagcagatcatctccaaatcttgccatttgtatacttttggtggagacttggatgtcatatcttctttgttttgggttttcttccctagcttattttgtggcttttaaagaagtggattgtattgtgagatcctgtgattcctggtggccagtatcctggattcctctaagatcttgcctctttcctcctcatgaaagcagcacacattgtgttaacttatgtctcttgttaaatgagcttaatgtctttgtgttttgtccaaaactgtattgaaaaaatattgtttaatgcaaatgaaggaatgcaataaagtggcctcgttggcctcagcggtggagctctgcggcanagaaattaatataaaaataaataatcgatattatcaataat

SEQ ID NO: 455784 - DNA, 1284 bp, Homo sapiens
gcgggggcgggctttgccgagcgcagagctgcagccgccgagccggacgtgtgcgcgaagatggcgggccggagcatgcaagcggcaagatgtcctacagatgaattatctttaaccaattgtgcagttgtgaatgaaaaggatttccagtctggccagcatgtgattgtgaggacctctcccaatcacaggtacacatttacactgaagacacatccatcggtggttccagggagcattgcattcagtttacctcagatgactaccgtgttggttgtgacttccccttaagtataactaatttgctctgtggtaagagatatgctcattattaccacttagaagatgttgttaaaaacatgtgaaagataggtatggaaaaagcatacacccccaaacagaaaggagttattaaagtaatttacaaacctctcagcactaattagtgtccaactccaagtgggtcaattccttagtataatattaaggcttactagtatcactgctttttccttagcttaatgacttacttagaatttatcctttattttaaatgatctgtactatctagtgtctaaaacactattctccagaaaaatcaatcattttctagccctctccctcagtcctttattgtccattccaatacattgaacacatttcctttaccctccacacacttcttccaaaaggaagcacccgttgagtccttttgagggtgatttgtcttacaactgactgacttagcaggaatttaattaggtcatatttggtgatgagacttatggagtgtgcctctctctcccaactgctgcttaaaatgcaaggacaagcaattagaagccatcctaaggtgcttacctcacacgccacccatgaggcttgtggccacagtggcacttgggtgtggctcctctgttatttgtcctcatgtgagaaagcagatcatctccaaatcttgccatttgtatacttttggtggagacttggatgtcatatcttctttgttttgggttttcttccctagcttattttgtggcttttaaagaagtggattgtattgtgagatcctgtgattcctggtggccagtatcctggattcctctaagatcttgcctctttcctcctcatgaaagcagcacacattgtgttaacttatgtctcttgttaaatgagcttaatgtctttgtgttttgtccaaaactgtattgaaaaaatattgtttaatgcaaatgaaggaatgcaataaagagtaaatatacttgaaaaaaaaaaaagaccagt

SEQ ID NO: 455785 - DNA, 2643 bp, Homo sapiens
  misc_feature (2602)..(2602): n is a, c, g, or t
gcgggggcgggctttgccgagcgcagagctgcagccgccgagccggacgtgtgcgcgaagatggcgggccggagcatgcaagcggcaagatgtcctacagatgaattatctttaaccaattgtgcagttgtgaatgaaaaggatttccagtctggccagcatgtgattgtgaggacctctcccaatcacaggtacacatttacactgaagacacatccatcggtggttccagggagcattgcattcagtttacctcagagaaaatgggctgggctttctattgggcaagaaatagaagtctccttatatacatttgacaaagccaaacagtgtattggcacaatgaccatcgagattgatttcctgcagaaaaaaagcattgactccaacccttatgacaccgacaagatggcagcagaatttattcagcaattcaacaaccaggccttctcagtgggacaacagcttgtctttagcttcaatgaaaagctttttggcttactggtgaaggacattgaatccatggatcctagcatcctgaagggagagcctgcgacagggaaaaggcagaagattgaagtaggactggttgttggaaacagtcaagttgcatttgaaaaagcagaaaattcgtcacttaatcttattggcaaagctaaaaccaaggaaaatcgccaatcaattatcaatcctgactggaactttgaaaaaatgggaataggaggtctagacaaggaattttcagatattttccgacgagcatttgccttcccgagtatttcctccagagattgtggagcagatgggttgtatacatgttaaaggcatcctgttatatggacccccaggttgtggtaagactctcttggctcgacagattggcaagatgttgaatgcaagagagcccaaagtggtcaatgggccagaaatccttaacaaatatgtgggagaatcagaggctaacattcgcaaactttttgctgatgctgaagaggagcaaaggaggcttggtgctaacagtggtttgcacatcatcatctttgatgaaattgatgccatctgcaagcagagagggagcatggctggtagcacgggagttcatgacactgttgtcaaccagttgctgtccaaaattgatggcgtggagcagctaaacaacatcctagtcattggaatgaccaatagaccagatctgatagatgaggctcttcttagacctggaagactggaagttaaaatggagataggcttgccagatgagaaaggccgactacagattcttcacatccacacagcaagaatgagagggcatcagttactctctgctgatgtagacattaaagaactggccgtggagaccaagaatttcagtggtgctgaattggagggtctggtgcgagcagcccagtccactgctatgaatagacacataaaggccagtactaaagtggaagtggacatggagaaagcagaaagcctgcaagtgacgagaggagacttccttgcttctttggagaatgatatcaaaccagcctttggcacaaaccaagaagattatgcaagttacattatgaacggtatcatcaaatggggtgacccagttactcgagttctagatgatggggagctgctggtgcagcagactaagaacagtgaccgcacaccattggtcagcgtgcttctggaaggccctcctcacagtgggaagactgctttagctgcaaaaattgcagaggaatccaacttcccgttcatcaagatctgttctcctgataaaatgattggcttttctgaaacagccaaatgtcaggccatgaagaagatctttgatgatgcgtacaaatcccagctcagttgtgtggttgtggatgacattgagagattgcttgattacgtccctattggccctcgattttcaaatcttgtattacaggctcttctcgttttactgaaaaaggcacctcctcagggccgcaagcttcttatcattgggaccactagccgcaaagatgtccttcaggagatggaaatgcttaacgctttcagcaccaccatccacgtgcccaacattgccacaggagagcagctgttggaagctttggagcttttgggcaacttcaaggataaggaacgcaccacaattgcacagcaagtcaaagggaagaaggtctggataggaatcaagaagttactaatgctgatcgagatgtccctacagatggatcctgaataccgtgtgagaaaattcttggccctcttaagagaagaaggagctagcccccttgattttgattgaaaatgaactatttgaaacacacagtgaccaagggaagtgaccaagcttattttgtggcttttaaagaagtggattgtattgtgagatcctgtgattcctggtggccagtatcctggattcctctaagatcttgcctctttcctcctcatgaaagcagcacacattgtgttaacttatgtctcttgttaaatgagcttaatgtctttgtgttttgtccaaaactgtattgaaaaaatattgtttaatgcaaatgaaggaatgcaataaagtggcctcgttggcctcagcggtggagctctgcggcanagaaattaatataaaaataaataatcgatattatcaataat

SEQ ID NO: 455786 - DNA, 353 bp, Homo sapiens
cttttctgaaacagccaaatgtcaggccatgaagaaggtatcaagattttactttcattttaatttcctatctcttaaatgtgtgtgtgtgtgcacatatatatgcctttgtacatgtatacatataaacccatagcaactatgttcttctcaagtggaaccaaattatcagcagaatatgggggaagcagtgactgttttagattttctaactttgtaatgtattttattgagtacctttaccttctaaattatgctttgtttaatacatattaagtttcattgcctagttttgtatcaatttgattaaaagagttatagttgaaagtgtttgaataaagtggacaaattca

SEQ ID NO: 455787 - DNA, 3952 bp, Homo sapiens
gcgggggcgggctttgccgagcgcagagctgcagccgccgagccggacgtgtgcgcgaagatggcgggccggagcatgcaagcggcaagatgtcctacagatgaattatctttaaccaattgtgcagttgtgaatgaaaaggatttccagtctggccagcatgtgattgtgaggacctctcccaatcacaggtacacatttacactgaagacacatccatcggtggttccagggagcattgcattcagtttacctcagagaaaatgggctgggctttctattgggcaagaaatagaagtctccttatatacatttgacaaagccaaacagtgtattggcacaatgaccatcgagattgatttcctgcagaaaaaaagcattgactccaacccttatgacaccgacaagatggcagcagaatttattcagcaattcaacaaccaggccttctcagtgggacaacagcttgtctttagcttcaatgaaaagctttttggcttactggtgaaggacattgaatccatggatcctagcatcctgaagggagagcctgcgacagggaaaaggcagaagattgaagtaggactggttgttggaaacagtcaagttgcatttgaaaaagcagaaaattcgtcacttaatcttattggcaaagctaaaaccaaggaaaatcgccaatcaattatcaatcctgactggaactttgaaaaaatgggaataggaggtctagacaaggaattttcagatattttccgacgagcatttgccttcccgagtatttcctccagagattgtggagcagatgggttgtatacatgttaaaggcatcctgttatatggacccccaggttgtggtaagactctcttggctcgacagattggcaagatgttgaatgcaagagagcccaaagtggtcaatgggccagaaatccttaacaaatatgtgggagaatcagaggctaacattcgcaaactttttgctgatgctgaagaggagcaaaggaggcttggtgctaacagtggtttgcacatcatcatctttgatgaaattgatgccatctgcaagcagagagggagcatggctggtagcacgggagttcatgacactgttgtcaaccagttgctgtccaaaattgatggcgtggagcagctaaacaacatcctagtcattggaatgaccaatagaccagatctgatagatgaggctcttcttagacctggaagactggaagttaaaatggagataggcttgccagatgagaaaggccgactacagattcttcacatccacacagcaagaatgagagggcatcagttactctctgctgatgtagacattaaagaactggccgtggagaccaagaatttcagtggtgctgaattggagggtctggtgcgagcagcccagtccactgctatgaatagacacataaaggccagtactaaagtggaagtggacatggagaaagcagaaagcctgcaagtgacgagaggagacttccttgcttctttggagaatgatatcaaaccagcctttggcacaaaccaagaagattatgcaagttacattatgaacggtatcatcaaatggggtgacccagttactcgagttctagatgatggggagctgctggtgcagcagactaagaacagtgaccgcacaccattggtcagcgtgcttctggaaggccctcctcacagtgggaagactgctttagctgcaaaaattgcagaggaatccaacttcccgttcatcaagatctgttctcctgataaaatgattggcttttctgaaacagccaaatgtcaggccatgaagaagatctttgatgatgcgtacaaatcccagctcagttgtgtggttgtggatgacattgagagattgcttgattacgtccctattggccctcgattttcaaatcttgtattacaggctcttctcgttttactgaaaaaggcacctcctcagggccgcaagcttcttatcattgggaccactagccgcaaagatgtccttcaggagatggaaatgcttaacgctttcagcaccaccatccacgtgcccaacattgccacaggagagcagctgttggaagctttggagcttttgggcaacttcaaggataaggaacgcaccacaattgcacagcaagtcaaagggaagaaggtctggataggaatcaagaagttactaatgctgatcgagatgtccctacagatggatcctgaataccgtgtgagaaaattcttggccctcttaagagaagaaggagctagcccccttgattttgattgaaaatgaactatttgaaacacacagtgaccaagggaagtgaccaaggtgaagatggcctaggatcttcactgtcttactcaagatactggactaagtggaacgttctctaccttcaacatgtgctcgctctgcatgattagtgcaataaaactcccttccttatgcatactgagatagcttagtgtctcgtggaaggtgtcaatttggtttagaatgctgcgcttaccttcccatgcaggctaaagtgattccttcttgctcagtccctctgggtgggaaccatccagtacttgtggacactacacgtttcaacctctctactagcaccatcacccttgaaaactctcagtcagtgtcatgaatgttgcatgacaacagttggccgattagaaggcagactttctacatgcaaatctggcttagtaaatcgaggtgtgggccagagatcctctgacagctgtcctgagctaacactaaaagtcactgggtatttggttaaaggtctcccacaagactggtattctctttgcctgaagaaacaaggcattgaatctctaaaatgctgttctcaatcattgtcagagatgttttcaagttgcagtcagaagatctttcttaatagaaagtcagatgactaccgtgttggttgtgacttccccttaagtataactaatttgctctgtggtaagagatatgctcattattaccacttagaagatgttgttaaaaacatgtgaaagataggtatggaaaaagcatacacccccaaacagaaaggagttattaaagtaatttacaaacctctcagcactaattagtgtccaactccaagtgggtcaattccttagtataatattaaggcttactagtatcactgctttttccttagcttaatgacttacttagaatttatcctttattttaaatgatctgtactatctagtgtctaaaacactattctccagaaaaatcaatcattttctagccctctccctcagtcctttattgtccattccaatacattgaacacatttcctttaccctccacacacttcttccaaaaggaagcacccgttgagtccttttgagggtgatttgtcttacaactgactgacttagcaggaatttaattaggtcatatttggtgatgagacttatggagtgtgcctctctctcccaactgctgcttaaaatgcaaggacaagcaattagaagccatcctaaggtgcttacctcacacgccacccatgaggcttgtggccacagtggcacttgggtgtggctcctctgttatttgtcctcatgtgagaaagcagatcatctccaaatcttgccatttgtatacttttggtggagacttggatgtcatatcttctttgttttgggttttcttccctagcttattttgtggcttttaaagaagtggattgtattgtgagatcctgtgattcctggtggccagtatcctggattcctctaagatcttgcctctttcctcctcatgaaagcagcacacattgtgttaacttatgtctcttgttaaatgagcttaatgtctttgtgttttgtccaaaactgtattgaaaaaatattgtttaatgcaaatgaaggaatgcaataaagagtaaatatacttgaaaaaaaaaaaagaccagt

SEQ ID NO: 455788 - DNA, 3898 bp, Homo sapiens
gcgggggcgggctttgccgagcgcagagctgcagccgccgagccggacgtgtgcgcgaagatggcgggccggagcatgcaagcggcaagatgtcctacagatgaattatctttaaccaattgtgcagttgtgaatgaaaaggatttccagtctggccagcatgtgattgtgaggacctctcccaatcacaggtacacatttacactgaagacacatccatcggtggttccagggagcattgcattcagtttacctcagagaaaatgggctgggctttctattgggcaagaaatagaagtctccttatatacatttgacaaagccaaacagtgtattggcacaatgaccatcgagattgatttcctgcagaaaaaaagcattgactccaacccttatgacaccgacaagatggcagcagaatttattcagcaattcaacaaccaggccttctcagtgggacaacagcttgtctttagcttcaatgaaaagctttttggcttactggtgaaggacattgaatccatggatcctagcatcctgaagggagagcctgcgacagggaaaaggcagaagattgaagtaggactggttgttggaaacagtcaagttgcatttgaaaaagcagaaaattcgtcacttaatcttattggcaaagctaaaaccaaggaaaatcgccaatcaattatcaatcctgactggaactttgaaaaaatgggaataggaggtctagacaaggaattttcagatattttccgacgagcatttgccttcccgagtatttcctccagagattgtggagcagatgggttgtatacatgttaaaggcatcctgttatatggacccccaggttgtggtaagactctcttggctcgacagattggcaagatgttgaatgcaagagagcccaaagtggtcaatgggccagaaatccttaacaaatatgtgggagaatcagaggctaacattcgcaaactttttgctgatgctgaagaggagcaaaggaggcttggtgctaacagtggtttgcacatcatcatctttgatgaaattgatgccatctgcaagcagagagggagcatggctggtagcacgggagttcatgacactgttgtcaaccagttgctgtccaaaattgatggcgtggagcagctaaacaacatcctagtcattggaatgaccaatagaccagatctgatagatgaggctcttcttagacctggaagactggaagttaaaatggagataggcttgccagatgagaaaggccgactacagattcttcacatccacacagcaagaatgagagggcatcagttactctctgctgatgtagacattaaagaactggccgtggagaccaagaatttcagtggtgctgaattggagggtctggtgcgagcagcccagtccactgctatgaatagacacataaaggccagtactaaagtggaagtggacatggagaaagcagaaagcctgcaagtgacgagaggagacttccttgcttctttggagaatgatatcaaaccagcctttggcacaaaccaagaagattatgcaagttacattatgaacggtatcatcaaatggggtgacccagttactcgagttctagatgatggggagctgctggtgcagcagactaagaacagtgaccgcacaccattggtcagcgtgcttctggaaggccctcctcacagtgggaagactgctttagctgcaaaaattgcagaggaatccaacttcccgttcatcaagatctgttctcctgataaaatgattggcttttctgaaacagccaaatgtcaggccatgaagaagatctttgatgatgcgtacaaatcccagctcagttgtgtggttgtggatgacattgagagattgcttgattacgtccctattggccctcgattttcaaatcttgtattacaggctcttctcgttttactgaaaaaggcacctcctcagggccgcaagcttcttatcattgggaccactagccgcaaagatgtccttcaggagatggaaatgcttaacgctttcagcaccaccatccacgtgcccaacattgccacaggagagcagctgttggaagctttggagcttttgggcaacttcaaggataaggaacgcaccacaattgcacagcaagtcaaagggaagaaggtctggataggaatcaagaagttactaatgctgatcgagatgtccctacagatggatcctgaataccgtgtgagaaaattcttggccctcttaagagaagaaggagctagcccccttgattttgattgaaaatgaactatttgaaacacacagtgaccaagggaagtgaccaaggtgaagatggcctaggatcttcactgtcttactcaagatactggactaagtggaacgttctctaccttcaacatgtgctcgctctgcatgattagtgcaataaaactcccttccttatgcatactgagatagcttagtgtctcgtggaaggtgtcaatttggtttagaatgctgcgcttaccttcccatgcaggctaaagtgattccttcttgctcagtccctctgggtgggaaccatccagtacttgtggacactacacgtttcaacctctctactagcaccatcacccttgagcagactttctacatgcaaatctggcttagtaaatcgaggtgtgggccagagatcctctgacagctgtcctgagctaacactaaaagtcactgggtatttggttaaaggtctcccacaagactggtattctctttgcctgaagaaacaaggcattgaatctctaaaatgctgttctcaatcattgtcagagatgttttcaagttgcagtcagaagatctttcttaatagaaagtcagatgactaccgtgttggttgtgacttccccttaagtataactaatttgctctgtggtaagagatatgctcattattaccacttagaagatgttgttaaaaacatgtgaaagataggtatggaaaaagcatacacccccaaacagaaaggagttattaaagtaatttacaaacctctcagcactaattagtgtccaactccaagtgggtcaattccttagtataatattaaggcttactagtatcactgctttttccttagcttaatgacttacttagaatttatcctttattttaaatgatctgtactatctagtgtctaaaacactattctccagaaaaatcaatcattttctagccctctccctcagtcctttattgtccattccaatacattgaacacatttcctttaccctccacacacttcttccaaaaggaagcacccgttgagtccttttgagggtgatttgtcttacaactgactgacttagcaggaatttaattaggtcatatttggtgatgagacttatggagtgtgcctctctctcccaactgctgcttaaaatgcaaggacaagcaattagaagccatcctaaggtgcttacctcacacgccacccatgaggcttgtggccacagtggcacttgggtgtggctcctctgttatttgtcctcatgtgagaaagcagatcatctccaaatcttgccatttgtatacttttggtggagacttggatgtcatatcttctttgttttgggttttcttccctagcttattttgtggcttttaaagaagtggattgtattgtgagatcctgtgattcctggtggccagtatcctggattcctctaagatcttgcctctttcctcctcatgaaagcagcacacattgtgttaacttatgtctcttgttaaatgagcttaatgtctttgtgttttgtccaaaactgtattgaaaaaatattgtttaatgcaaatgaaggaatgcaataaagagtaaatatacttgaaaaaaaaaaaagaccagt

SEQ ID NO: 455789 - DNA, 3848 bp, Homo sapiens
  misc_feature (3848)..(3848): n is a, c, g, or t
gcgggggcgggctttgccgagcgcagagctgcagccgccgagccggacgtgtgcgcgaagatggcgggccggagcatgcaagcggcaagatgtcctacagatgaattatctttaaccaattgtgcagttgtgaatgaaaaggatttccagtctggccagcatgtgattgtgaggacctctcccaatcacaggtacacatttacactgaagacacatccatcggtggttccagggagcattgcattcagtttacctcagagaaaatgggctgggctttctattgggcaagaaatagaagtctccttatatacatttgacaaagccaaacagtgtattggcacaatgaccatcgagattgatttcctgcagaaaaaaagcattgactccaacccttatgacaccgacaagatggcagcagaatttattcagcaattcaacaaccaggccttctcagtgggacaacagcttgtctttagcttcaatgaaaagctttttggcttactggtgaaggacattgaatccatggatcctagcatcctgaagggagagcctgcgacagggaaaaggcagaagattgaagtaggactggttgttggaaacagtcaagttgcatttgaaaaagcagaaaattcgtcacttaatcttattggcaaagctaaaaccaaggaaaatcgccaatcaattatcaatcctgactggaactttgaaaaaatgggaataggaggtctagacaaggaattttcagatattttccgacgagcatttgccttcccgagtatttcctccagagattgtggagcagatgggttgtatacatgttaaaggcatcctgttatatggacccccaggttgtggtaagactctcttggctcgacagattggcaagatgttgaatgcaagagagcccaaagtggtcaatgggccagaaatccttaacaaatatgtgggagaatcagaggctaacattcgcaaactttttgctgatgctgaagaggagcaaaggaggcttggtgctaacagtggtttgcacatcatcatctttgatgaaattgatgccatctgcaagcagagagggagcatggctggtagcacgggagttcatgacactgttgtcaaccagttgctgtccaaaattgatggcgtggagcagctaaacaacatcctagtcattggaatgaccaatagaccagatctgatagatgaggctcttcttagacctggaagactggaagttaaaatggagataggcttgccagatgagaaaggccgactacagattcttcacatccacacagcaagaatgagagggcatcagttactctctgctgatgtagacattaaagaactggccgtggagaccaagaatttcagtggtgctgaattggagggtctggtgcgagcagcccagtccactgctatgaatagacacataaaggccagtactaaagtggaagtggacatggagaaagcagaaagcctgcaagtgacgagaggagacttccttgcttctttggagaatgatatcaaaccagcctttggcacaaaccaagaagattatgcaagttacattatgaacggtatcatcaaatggggtgacccagttactcgagttctagatgatggggagctgctggtgcagcagactaagaacagtgaccgcacaccattggtcagcgtgcttctggaaggccctcctcacagtgggaagactgctttagctgcaaaaattgcagaggaatccaacttcccgttcatcaagatctgttctcctgataaaatgattggcttttctgaaacagccaaatgtcaggccatgaagaagatctttgatgatgcgtacaaatcccagctcagttgtgtggttgtggatgacattgagagattgcttgattacgtccctattggccctcgattttcaaatcttgtattacaggctcttctcgttttactgaaaaaggcacctcctcagggccgcaagcttcttatcattgggaccactagccgcaaagatgtccttcaggagatggaaatgcttaacgctttcagcaccaccatccacgtgcccaacattgccacaggagagcagctgttggaagctttggagcttttgggcaacttcaaggataaggaacgcaccacaattgcacagcaagtcaaagggaagaaggtctggataggaatcaagaagttactaatgctgatcgagatgtccctacagatggatcctgaataccgtgtgagaaaattcttggccctcttaagagaagaaggagctagcccccttgattttgattgaaaatgaactatttgaaacacacagtgaccaagggaagtgaccaaggtgaagatggcctaggatcttcactgtcttactcaagatactggactaagtggaacgttctctaccttcaacatgtgctcgctctgcatgattagtgcaataaaactcccttccttatgcatactgagatagcttagtgtctcgtggaaggtgtcaatttggtttagaatgctgcgcttaccttcccatgcaggctaaagtgattccttcttgctcagtccctctgggtgggaaccatccagtacttgtggacactacacgtttcaacctctctactagcaccatcacccttgaaaactctcagtcagtgtcatgaatgttgcatgacaacagttggccgattagaaggcagactttctacatgcaaatctggcttagtaaatcgaggtgtgggccagagatcctctgacagctgtcctgagctaacactaaaagtcactgggtatttggttaaaggtctcccacaagactggtattctctttgcctgaagaaacaaggcattgaatctctaaaatgctgttctcaatcattgtcagagatgttttcaagttgcagtcagaagatctttcttaatagaaagtcagatgactaccgtgttggttgtgacttccccttaagtataactaatttgctctgtggtaagagatatgctcattattaccacttagaagatgttgttaaaaacatgtgaaagataggtatggaaaaagcatacacccccaaacagaaaggagttattaaagtaatttacaaacctctcagcactaattagtgtccaactccaagtgggtcaattccttagtataatattaaggcttactagtatcactgctttttccttagcttaatgacttacttagaatttatcctttattttaaatgatctgtactatctagtgtctaaaacactattctccagaaaaatcaatcattttctagccctctccctcagtcctttattgtccattccaatacattgaacacatttcctttaccctccacacacttcttccaaaaggaagcacccgttgagtccttttgagggtgatttgtcttacaactgactgacttagcaggaatttaattaggtcatatttggtgatgagacttatggagtgtgcctctctctcccaactgctgcttaaaatgcaaggacaagcaattagaagccatcctaaggtgcttacctcacacgccacccatgaggcttgtggccacagtggcacttgggtgtggctcctctgttatttgtcctcatgtgagaaagcagatcatctccaaatcttgccatttgtatactttgggggactggttgctatctcttgttgggttctgcctagctattgggtttagactggtgttgggaccggactgggggcggtcggatcctgattgccctcccctgagggcctgggtttgctggggcgcgttggtgcccgtgagatgtgtgcgggggctttgaaaaaagggggtacgggccgggggtggtccggcgcggccgtcgtn

SEQ ID NO: 455790 - DNA, 1980 bp, Homo sapiens
  misc_feature (9)..(9): n is a, c, g, or t
  misc_feature (44)..(44): n is a, c, g, or t
  misc_feature (47)..(47): n is a, c, g, or t
  misc_feature (1565)..(1565): n is a, c, g, or t
  misc_feature (1748)..(1748): n is a, c, g, or t
  misc_feature (1760)..(1760): n is a, c, g, or t
  misc_feature (1766)..(1768): n is a, c, g, or t
  misc_feature (1771)..(1771): n is a, c, g, or t
  misc_feature (1777)..(1777): n is a, c, g, or t
  misc_feature (1784)..(1785): n is a, c, g, or t
  misc_feature (1792)..(1792): n is a, c, g, or t
  misc_feature (1797)..(1797): n is a, c, g, or t
  misc_feature (1799)..(1799): n is a, c, g, or t
  misc_feature (1804)..(1804): n is a, c, g, or t
  misc_feature (1808)..(1808): n is a, c, g, or t
  misc_feature (1814)..(1814): n is a, c, g, or t
  misc_feature (1820)..(1820): n is a, c, g, or t
  misc_feature (1825)..(1826): n is a, c, g, or t
  misc_feature (1834)..(1834): n is a, c, g, or t
  misc_feature (1839)..(1839): n is a, c, g, or t
  misc_feature (1841)..(1843): n is a, c, g, or t
  misc_feature (1848)..(1848): n is a, c, g, or t
  misc_feature (1858)..(1858): n is a, c, g, or t
  misc_feature (1862)..(1862): n is a, c, g, or t
  misc_feature (1866)..(1866): n is a, c, g, or t
  misc_feature (1869)..(1869): n is a, c, g, or t
  misc_feature (1877)..(1877): n is a, c, g, or t
  misc_feature (1888)..(1889): n is a, c, g, or t
  misc_feature (1894)..(1894): n is a, c, g, or t
  misc_feature (1896)..(1897): n is a, c, g, or t
  misc_feature (1904)..(1904): n is a, c, g, or t
  misc_feature (1907)..(1908): n is a, c, g, or t
  misc_feature (1915)..(1915): n is a, c, g, or t
  misc_feature (1920)..(1920): n is a, c, g, or t
  misc_feature (1926)..(1926): n is a, c, g, or t
  misc_feature (1932)..(1933): n is a, c, g, or t
  misc_feature (1937)..(1937): n is a, c, g, or t
  misc_feature (1939)..(1939): n is a, c, g, or t
  misc_feature (1945)..(1945): n is a, c, g, or t
  misc_feature (1961)..(1962): n is a, c, g, or t
  misc_feature (1968)..(1968): n is a, c, g, or t
gagaaggtntctttctctgttgcccaggctggagtgcagcggcngangctcggatcactacaacctctgcctctcgggttcaagcagttctcctgcctcagcctcccaagtagctgagattacagcatgcaagcggcaagatgtcctacagatgaattatctttaaccaattgtgcagttgtgaatgaaaaggatttccagtctggccagcatgtgattgtgaggacctctcccaatcacaggtacacatttacactgaagacacatccatcggtggttccagggagcattgcattcagtttacctcagagaaaatgggctgggctttctattgggcaagaaatagaagtctccttatatacatttgacaaagccaaacagtgtattggcacaatgaccatcgagattgatttcctgcagaaaaaaagcattgactccaacccttatgacaccgacaagatggcagcagaatttattcagcaattcaacaaccaggccttctcagtgggacaacaggtagtttttaattttctttcattcctttaactttataggtattctaatttctgcagttttccaaaattaattccaccttttaaaaagtgagaggggctttgcgtatcaactcgtatatccaaggtgagtgataaaagtgagggagatgtatttactgaacttcaaggagtctgttcagaaaaattctaaagtagcttttagattaaaatgtcatgtataattatagcagcttttccctcagcaaatttgggaaccctgtggacatatatatctgaaattcctttttatatcataggacatttgttttgcctctggaatgtctgtctctttcactaatatagttctgtagaaaatgtagctcttggccagacatggtggctcatgcctgtaatcccaacactttgggagactgagttgggaggatcgtttgagcccaggagctcaagatcagcttgggcaacaaagtgagaccctgtctctacaaaaatttttttaaaagtagctgcgtgtagtggtctcaactactcaagaggctgaggtgggaggacggcttgagcctgggaggttgaggctgcagtgagccatgattgtgccacggcactccagcctgggtgacagatcgagattgtctcaaaaaaaaaaaaaaagttcttattttggttatgggcttatttgagaatcttaaaaaactgaattcctgctagataggaaaaggatatagtacattattttaaaaagagtactagaattggaatgaacctcaagagattaccttatgtaactccacatatacaaatgaggaattttatttttttattttttaaaattttatttatttattcatttattttttgagatggtgtgttaccctgtcatccaggctggagtgcagcggcaccatctcagctcactgcaacctccgctttctgggttcaagtgattttcctgcctctgcctcccgagtaactgggataacaggcatgcgccaccacacccgactaattttgtacttttagtagagatggggtttcaccatgttaatcaggctngtctcgaactcatgagctcaggtgatccatccgccttgacctcccaaagtgctgagattacaggcatgagccaccatgcccaaccattttttttttgtatttttagtagagatggggttttgccatgttggccaggctggtcctgacctcaagtgatcctcccactcatgcctgtaatcccancactttgggagnctgagnnnggnggatcntttgagnncaggagntcaanancagcntggncaacanagtganacccnntctctacnaaaantnnnaaaantagctgcgtntgtngtcncanctactcangaggctgaggnnggagnanngcttganccnnggaggtngaggntgcagngagccnngatngngccacngcactccagcctgggnnacagancgagattgtctc

SEQ ID NO: 455791 - DNA, 138 bp, Homo sapiens
gcacagtggctccctggggatggggcccatggccacagagctggagcccctgtgcactccggtggtcacctgtactcccagctgcactgcttacacgtcttccttcgtcttcgggtcgtttggagatcctctagagcg

SEQ ID NO: 455792 - DNA, 2093 bp, Homo sapiens
aaagcagtggctgcggcgcctcgtactcgaaccgcatctgcagcgagcaactgagaagccaagactgagccggcggccgcggcgcagcgaacgagcagtgaccgtgctcctacccagctctgcttcacagcgcccacctgtctccgcccctcggcccctcgcccggctttgcctaaccgccacgatgatgttctcgggcttcaacgcagactacgaggcgtcatcctcccgctgcagcagcgcgtccccggccggggatagcctctcttactaccactcacccgcagactccttctccagcatgggctcgcctgtcaacgcgcaggtaaggctggcttcccgtcgccgcggggccgggggcttggggtcgcggaggaggagacaccgggcgggacgctccagtagatgagtagggggctcccttgtgcctggagggaggctgccgtggccggagcggtgccggctcgggggctcgggacttgctctgagcgcacgcacgcttgccatagtaagaattggttcccccttcgggaggcaggttcgttctgagcaacctctggtctgcactccaggacggatctctgacattagctggagcagacgtgtcccaagcacaaactcgctaactagagcctggcttctccggggaggtggcagaaagcggcaatcccccctcccccggcagcctggagcacggaggagggatgagggaggagggtgcagcgggcgggtgtgtaaggcagtttcattgataaaaagcgagttcattctggagactccggagcggcgcctgcgtcagcgcagacgtcagggatatttataacaaaccccctttcaagcaagtgatgctgaagggataacgggaacgcagcggcaggatggaagagacaggcactgcgctgcggaatgcctgggaggaaaagggggagacctttcatccaggatgagggacatttaagatgaaatgtccgtggcaggatcgtttctcttcactgctgcatgcggcactgggaactcgccccacctgtgtccggaacctgctcgctcacgtcggctttccccttctgttttgttctaggacttctgcacggacctggccgtctccagtgccaacttcattcccacggtcactgtactcccagctgcactgcttacacgtcttccttcgtcttcacctaccccgaggctgactccttccccagctgtgcagctgcccaccgcaagggcagcagcagcaatgagccttcctctgactcgctcagctcacccacgctgctggccctgtgagggggcagggaaggggaggcagccggcacccacaagtgccactgcccgagctggtgcattacagagaggagaaacacatcttccctagagggttcctgtagacctagggaggaccttatctgtgcgtgaaacacaccaggctgtgggcctcaaggacttgaaagcatccatgtgtggactcaagtccttacctcttccggagatgtagcaaaacgcatggagtgtgtattgttcccagtgacacttcagagagctggtagttagtagcatgttgagccaggcctgggtctgtgtctcttttctctttctccttagtcttctcatagcattaactaatctattgggttcattattggaattaacctggtgctggatattttcaaattgtatctagtgcagctgattttaacaataactactgtgttcctggcaatagtgtgttctgattagaaatgaccaatattatactaagaaaagatacgactttattttctggtagatagaaataaatagctatatccatgtactgtagtttttcttcaacatcaatgttcattgtaatgttactgatcatgcattgttgaggtggtctgaatgttctgacattaacagttttccatgaaaacgttttattgtgtttttaatttatttattaagatggattctcagatatttatatttttattttatttttttctaccttgaggtcttttgacatgtggaaagtgaatttgaatgaaaaatttaagcattgtttgcttattgttccaagacattgtcaataaaagcatttaagttgaatgcga

SEQ ID NO: 455793 - DNA, 1340 bp, Homo sapiens
aaagcagtggctgcggcgcctcgtactcgaaccgcatctgcagcgagcaactgagaagccaagactgagccggcggccgcggcgcagcgaacgagcagtgaccgtgctcctacccagctctgcttcacagcgcccacctgtctccgcccctcggcccctcgcccggctttgcctaaccgccacgatgatgttctcgggcttcaacgcagactacgaggcgtcatcctcccgctgcagcagcgcgtccccggccggggatagcctctcttactaccactcacccgcagactccttctccagcatgggctcgcctgtcaacgcgcaggacttctgcacggacctggccgtctccagtgccaacttcattcccacggtcactgtactcccagctgcactgcttacacgtcttccttcgtcttcacctaccccgaggctgactccttccccagctgtgcagctgcccaccgcaagggcagcagcagcaatgagccttcctctgactcgctcagctcacccacgctgctggccctgtgagggggcagggaaggggaggcagccggcacccacaagtgccactgcccgagctggtgcattacagagaggagaaacacatcttccctagagggttcctgtagacctagggaggaccttatctgtgcgtgaaacacaccaggctgtgggcctcaaggacttgaaagcatccatgtgtggactcaagtccttacctcttccggagatgtagcaaaacgcatggagtgtgtattgttcccagtgacacttcagagagctggtagttagtagcatgttgagccaggcctgggtctgtgtctcttttctctttctccttagtcttctcatagcattaactaatctattgggttcattattggaattaacctggtgctggatattttcaaattgtatctagtgcagctgattttaacaataactactgtgttcctggcaatagtgtgttctgattagaaatgaccaatattatactaagaaaagatacgactttattttctggtagatagaaataaatagctatatccatgtactgtagtttttcttcaacatcaatgttcattgtaatgttactgatcatgcattgttgaggtggtctgaatgttctgacattaacagttttccatgaaaacgttttattgtgtttttaatttatttattaagatggattctcagatatttatatttttattttatttttttctaccttgaggtcttttgacatgtggaaagtgaatttgaatgaaaaatttaagcattgtttgcttattgttccaagacattgtcaataaaagcatttaagttgaatgcga

SEQ ID NO: 455794 - DNA, 1580 bp, Homo sapiens
aaagcagtggctgcggcgcctcgtactcgaaccgcatctgcagcgagcaactgagaagccaagactgagccggcggccgcggcgcagcgaacgagcagtgaccgtgctcctacccagctctgcttcacagcgcccacctgtctccgcccctcggcccctcgcccggctttgcctaaccgccacgatgatgttctcgggcttcaacgcagactacgaggcgtcatcctcccgctgcagcagcgcgtccccggccggggatagcctctcttactaccactcacccgcagactccttctccagcatgggctcgcctgtcaacgcgcaggacttctgcacggacctggccgtctccagtgccaacttcattcccacggtcactgccatctcgaccagtccggacctgcagtggctggtgcagcccgccctcgtctcctctgtggccccatcgcagaccagagcccctcaccctttcggagtccccgccccctccgctggggcttactccagggctggcgttgtgaagaccatgacaggaggccgagcgcagagcattggcaggaggggcaaggtggaacagttatctccagaagaagaagagaaaaggagaatccgaagggaaaggaataagatggctgcagccaaatgccgcaaccggaggagggagctgactgatacactccaagcggagacagaccaactagaagatgagaagtctgctttgcagaccgagattgccaacctgctgaaggagaaggaaaaactagagttcatcctggcagctcaccgacctgcctgcaagatccctgatgacctgggcttcccagaagagatgtctgtgggcttcccttgatcttgactgggggcctgccagaggttgccaccccggagtctgaggaggccttcaccctgcctctcctcaatgaccctgaggcccaagccctcaggggaacctgtcaagagcatcaggagcatggagctgaagaccggagcccttgatgacttcctgttcccatgacacttcagagagctggtagttagtagcatgttgagccaggcctgggtctgtgtctcttttctctttctccttagtcttctcatagcattaactaatctattgggttcattattggaattaacctggtgctggatattttcaaattgtatctagtgcagctgattttaacaataactactgtgttcctggcaatagtgtgttctgattagaaatgaccaatattatactaagaaaagatacgactttattttctggtagatagaaataaatagctatatccatgtactgtagtttttcttcaacatcaatgttcattgtaatgttactgatcatgcattgttgaggtggtctgaatgttctgacattaacagttttccatgaaaacgttttattgtgtttttaatttatttattaagatggattctcagatatttatatttttattttatttttttctaccttgaggtcttttgacatgtggaaagtgaatttgaatgaaaaatttaagcattgtttgcttattgttccaagacattgtcaataaaagcatttaagttgaatgcga

SEQ ID NO: 455795 - DNA, 818 bp, Homo sapiens
cttcctccttagccagaacgccactcccttcccacatccccttcttctctccgccttctccacatctcctaggagatgtggagaaacacatcttccctagagggttcctgtagacctagggaggaccttatctgtgcgtgaaacacaccaggctgtgggcctcaaggacttgaaagcatccatgtgtggactcaagtccttacctcttccggagatgtagcaaaacgcatggagtgtgtattgttcccagtgacacttcagagagctggtagttagtagcatgttgagccaggcctgggtctgtgtctcttttctctttctccttagtcttctcatagcattaactaatctattgggttcattattggaattaacctggtgctggatattttcaaattgtatctagtgcagctgattttaacaataactactgtgttcctggcaatagtgtgttctgattagaaatgaccaatattatactaagaaaagatacgactttattttctggtagatagaaataaatagctatatccatgtactgtagtttttcttcaacatcaatgttcattgtaatgttactgatcatgcattgttgaggtggtctgaatgttctgacattaacagttttccatgaaaacgttttattgtgtttttaatttatttattaagatggattctcagatatttatatttttattttatttttttctaccttgaggtcttttgacatgtggaaagtgaatttgaatgaaaaatttaagcattgtttgcttattgttccaagacattgtcaataaaagcatttaagttgaatgcga

SEQ ID NO: 455796 - DNA, 2128 bp, Homo sapiens
aaagcagtggctgcggcgcctcgtactcgaaccgcatctgcagcgagcaactgagaagccaagactgagccggcggccgcggcgcagcgaacgagcagtgaccgtgctcctacccagctctgcttcacagcgcccacctgtctccgcccctcggcccctcgcccggctttgcctaaccgccacgatgatgttctcgggcttcaacgcagactacgaggcgtcatcctcccgctgcagcagcgcgtccccggccggggatagcctctcttactaccactcacccgcagactccttctccagcatgggctcgcctgtcaacgcgcaggacttctgcacggacctggccgtctccagtgccaacttcattcccacggtcactgccatctcgaccagtccggacctgcagtggctggtgcagcccgccctcgtctcctctgtggccccatcgcagaccagagcccctcaccctttcggagtccccgccccctccgctggggcttactccagggctggcgttgtgaagaccatgacaggaggccgagcgcagagcattggcaggaggggcaaggtggaacaggtgaggaactctagcgtactcttcctgggaatgtgggggctgggtgggaagcagccccggagatgcaggagcccagtacagaggatgaagccactgatggggctggctgcacatccgtaactgggagccctggctccaagcccattccatcccaactcagactctgagtctcaccctaagaagtactctcatagtttcttccctaagtttcttaccgcatgctttcagactgggctcttctttgttctcttgctgaggatcttattttaaatgcaagtcacacctagtctgcaactgcaggtcagaaatggtttcacagtggggtgccaggaagcagggaagctgcaggagccagttctactggggtgggtgaatggaggtgatggcagacacttttactgaatgtcggtctttttttgtgattattctagttttatctccagaagaagaagagaaaaggagaatccgaagggaaaggaataagatggctgcagccaaatgccgcaaccggaggagggagctgactgatacactccaagcggtaggtactctgtgggttgctcctttttaaaacttaagggaaagttggagattgagcataagggcccttgagtaagactgtgtcttatgctttcctttatccctctgtatacagggagacagaccaactagaagatgagaagtctgctttgcagaccgagattgccaacctgctgaaggagaaggaaaaactagagttcatcctggcagctcaccgacctgcctgcaagatccctgatgacctgggcttcccagaagagatgtctgtgggcttcccttgatcttgactgggggcctgccagaggttgccaccccggagtctgaggaggccttcaccctgcctctcctcaatgaccctgaggcccaagccctcaggggaacctgtcaagagcatcaggagcatggagctgaagaccggagcccttgatgacttcctgttcccatgacacttcagagagctggtagttagtagcatgttgagccaggcctgggtctgtgtctcttttctctttctccttagtcttctcatagcattaactaatctattgggttcattattggaattaacctggtgctggatattttcaaattgtatctagtgcagctgattttaacaataactactgtgttcctggcaatagtgtgttctgattagaaatgaccaatattatactaagaaaagatacgactttattttctggtagatagaaataaatagctatatccatgtactgtagtttttcttcaacatcaatgttcattgtaatgttactgatcatgcattgttgaggtggtctgaatgttctgacattaacagttttccatgaaaacgttttattgtgtttttaatttatttattaagatggattctcagatatttatatttttattttatttttttctaccttgaggtcttttgacatgtggaaagtgaatttgaatgaaaaatttaagcattgtttgcttattgttccaagacattgtcaataaaagcatttaagttgaatgcga

SEQ ID NO: 455797 - DNA, 865 bp, Homo sapiens
gcacagaggttgcagtgagccgagatcaagccactgcactccagcctggcgacaaagtgatactccgcctcaagaaaaaaaaaaagtatggtaaatacccaaagcaaatcaaaataaaacagtgaaaagacttggaactggctatctctagggagaaataaataagcaccccccttatctgtgcgtgaaacacaccaggctgtgggcctcaaggacttgaaagcatccatgtgtggactcaagtccttacctcttccggagatgtagcaaaacgcatggagtgtgtattgttcccagtgacacttcagagagctggtagttagtagcatgttgagccaggcctgggtctgtgtctcttttctctttctccttagtcttctcatagcattaactaatctattgggttcattattggaattaacctggtgctggatattttcaaattgtatctagtgcagctgattttaacaataactactgtgttcctggcaatagtgtgttctgattagaaatgaccaatattatactaagaaaagatacgactttattttctggtagatagaaataaatagctatatccatgtactgtagtttttcttcaacatcaatgttcattgtaatgttactgatcatgcattgttgaggtggtctgaatgttctgacattaacagttttccatgaaaacgttttattgtgtttttaatttatttattaagatggattctcagatatttatatttttattttatttttttctaccttgaggtcttttgacatgtggaaagtgaatttgaatgaaaaatttaagcattgtttgcttattgttccaagacattgtcaataaaagcatttaagttgaatgcga

SEQ ID NO: 455798 - DNA, 725 bp, Homo sapiens
  misc_feature (7)..(7): n is a, c, g, or t
gggctgnctagaggatcccaaacgacccgaagccttatctgtgcgtgaaacacaccaggctgtgggcctcaaggacttgaaagcatccatgtgtggactcaagtccttacctcttccggagatgtagcaaaacgcatggagtgtgtattgttcccagtgacacttcagagagctggtagttagtagcatgttgagccaggcctgggtctgtgtctcttttctctttctccttagtcttctcatagcattaactaatctattgggttcattattggaattaacctggtgctggatattttcaaattgtatctagtgcagctgattttaacaataactactgtgttcctggcaatagtgtgttctgattagaaatgaccaatattatactaagaaaagatacgactttattttctggtagatagaaataaatagctatatccatgtactgtagtttttcttcaacatcaatgttcattgtaatgttactgatcatgcattgttgaggtggtctgaatgttctgacattaacagttttccatgaaaacgttttattgtgtttttaatttatttattaagatggattctcagatatttatatttttattttatttttttctaccttgaggtcttttgacatgtggaaagtgaatttgaatgaaaaatttaagcattgtttgcttattgttccaagacattgtcaataaaagcatttaagttgaatgcga

SEQ ID NO: 455799 - DNA, 2013 bp, Homo sapiens
aaagcagtggctgcggcgcctcgtactcgaaccgcatctgcagcgagcaactgagaagccaagactgagccggcggccgcggcgcagcgaacgagcagtgaccgtgctcctacccagctctgcttcacagcgcccacctgtctccgcccctcggcccctcgcccggctttgcctaaccgccacgatgatgttctcgggcttcaacgcagactacgaggcgtcatcctcccgctgcagcagcgcgtccccggccggggatagcctctcttactaccactcacccgcagactccttctccagcatgggctcgcctgtcaacgcgcaggacttctgcacggacctggccgtctccagtgccaacttcattcccacggtcactgccatctcgaccagtccggacctgcagtggctggtgcagcccgccctcgtctcctctgtggccccatcgcagaccagagcccctcaccctttcggagtccccgccccctccgctggggcttactccagggctggcgttgtgaagaccatgacaggaggccgagcgcagagcattggcaggaggggcaaggtggaacaggtgaggaactctagcgtactcttcctgggaatgtgggggctgggtgggaagcagccccggagatgcaggagcccagtacagaggatgaagccactgatggggctggctgcacatccgtaactgggagccctggctccaagcccattccatcccaactcagactctgagtctcaccctaagaagtactctcatagtttcttccctaagtttcttaccgcatgctttcagactgggctcttctttgttctcttgctgaggatcttattttaaatgcaagtcacacctagtctgcaactgcaggtcagaaatggtttcacagtggggtgccaggaagcagggaagctgcaggagccagttctactggggtgggtgaatggaggtgatggcagacacttttactgaatgtcggtctttttttgtgattattctagttttatctccagaagaagaagagaaaaggagaatccgaagggaaaggaataagatggctgcagccaaatgccgcaaccggaggagggagctgactgatacactccaagcggagacagaccaactagaagatgagaagtctgctttgcagaccgagattgccaacctgctgaaggagaaggaaaaactagagttcatcctggcagctcaccgacctgcctgcaagatccctgatgacctgggcttcccagaagagatgtctgtgggcttcccttgatcttgactgggggcctgccagaggttgccaccccggagtctgaggaggccttcaccctgcctctcctcaatgaccctgaggcccaagccctcaggggaacctgtcaagagcatcaggagcatggagctgaagaccggagcccttgatgacttcctgttcccatgacacttcagagagctggtagttagtagcatgttgagccaggcctgggtctgtgtctcttttctctttctccttagtcttctcatagcattaactaatctattgggttcattattggaattaacctggtgctggatattttcaaattgtatctagtgcagctgattttaacaataactactgtgttcctggcaatagtgtgttctgattagaaatgaccaatattatactaagaaaagatacgactttattttctggtagatagaaataaatagctatatccatgtactgtagtttttcttcaacatcaatgttcattgtaatgttactgatcatgcattgttgaggtggtctgaatgttctgacattaacagttttccatgaaaacgttttattgtgtttttaatttatttattaagatggattctcagatatttatatttttattttatttttttctaccttgaggtcttttgacatgtggaaagtgaatttgaatgaaaaatttaagcattgtttgcttattgttccaagacattgtcaataaaagcatttaagttgaatgcga

SEQ ID NO: 455800 - DNA, 1959 bp, Homo sapiens
aaagcagtggctgcggcgcctcgtactcgaaccgcatctgcagcgagcaactgagaagccaagactgagccggcggccgcggcgcagcgaacgagcagtgaccgtgctcctacccagctctgcttcacagcgcccacctgtctccgcccctcggcccctcgcccggctttgcctaaccgccacgatgatgttctcgggcttcaacgcagactacgaggcgtcatcctcccgctgcagcagcgcgtccccggccggggatagcctctcttactaccactcacccgcagactccttctccagcatgggctcgcctgtcaacgcgcaggacttctgcacggacctggccgtctccagtgccaacttcattcccacggtcactgccatctcgaccagtccggacctgcagtggctggtgcagcccgccctcgtctcctctgtggccccatcgcagaccagagcccctcaccctttcggagtccccgccccctccgctggggcttactccagggctggcgttgtgaagaccatgacaggaggccgagcgcagagcattggcaggaggggcaaggtggaacaggtgaggaactctagcgtactcttcctgggaatgtgggggctgggtgggaagcagccccggagatgcaggagcccagtacagaggatgaagccactgatggggctggctgcacatccgtaactgggagccctggctccaagcccattccatcccaactcagactctgagtctcaccctaagaagtactctcatagtttcttccctaagtttcttaccgcatgctttcagactgggctcttctttgttctcttgctgaggatcttattttaaatgcaagtcacacctagtctgcaactgcaggtcagaaatggtttcacagtggggtgccaggaagcagggaagctgcaggagccagttctactggggtgggtgaatggaggtgatggcagacacttttactgaatgtcggtctttttttgtgattattctagttttatctccagaagaagaagagaaaaggagaatccgaagggaaaggaataagatggctgcagccaaatgccgcaaccggaggagggagctgactgatacactccaagcggagacagaccaactagaagatgagaagtctgctttgcagaccgagattgccaacctgctgaaggagaaggacctgggcttcccagaagagatgtctgtgggcttcccttgatcttgactgggggcctgccagaggttgccaccccggagtctgaggaggccttcaccctgcctctcctcaatgaccctgaggcccaagccctcaggggaacctgtcaagagcatcaggagcatggagctgaagaccggagcccttgatgacttcctgttcccatgacacttcagagagctggtagttagtagcatgttgagccaggcctgggtctgtgtctcttttctctttctccttagtcttctcatagcattaactaatctattgggttcattattggaattaacctggtgctggatattttcaaattgtatctagtgcagctgattttaacaataactactgtgttcctggcaatagtgtgttctgattagaaatgaccaatattatactaagaaaagatacgactttattttctggtagatagaaataaatagctatatccatgtactgtagtttttcttcaacatcaatgttcattgtaatgttactgatcatgcattgttgaggtggtctgaatgttctgacattaacagttttccatgaaaacgttttattgtgtttttaatttatttattaagatggattctcagatatttatatttttattttatttttttctaccttgaggtcttttgacatgtggaaagtgaatttgaatgaaaaatttaagcattgtttgcttattgttccaagacattgtcaataaaagcatttaagttgaatgcga

SEQ ID NO: 455801 - DNA, 1093 bp, Homo sapiens
gcacagtggctccctggggatggggcccatggccacagagctggagcccctgtgcactccggtggtcacctgtactcccagctgcactgcttacacgtcttccttcgtcttcacctaccccgaggctgactccttccccagctgtgcagctgcccaccgcaagggcagcagcagcaatgagccttcctctgactcgctcagctcacccacgctgctggccctgtgagggggcagggaaggggaggcagccggcacccacaagtgccactgcccgagctggtgcattacagagaggagaaacacatcttccctagagggttcctgtagacctagggaggaccttatctgtgcgtgaaacacaccaggctgtgggcctcaaggacttgaaagcatccatgtgtggactcaagtccttacctcttccggagatgtagcaaaacgcatggagtgtgtattgttcccagtgacacttcagagagctggtagttagtagcatgttgagccaggcctgggtctgtgtctcttttctctttctccttagtcttctcatagcattaactaatctattgggttcattattggaattaacctggtgctggatattttcaaattgtatctagtgcagctgattttaacaataactactgtgttcctggcaatagtgtgttctgattagaaatgaccaatattatactaagaaaagatacgactttattttctggtagatagaaataaatagctatatccatgtactgtagtttttcttcaacatcaatgttcattgtaatgttactgatcatgcattgttgaggtggtctgaatgttctgacattaacagttttccatgaaaacgttttattgtgtttttaatttatttattaagatggattctcagatatttatatttttattttatttttttctaccttgaggtcttttgacatgtggaaagtgaatttgaatgaaaaatttaagcattgtttgcttattgttccaagacattgtcaataaaagcatttaagttgaatgcgaaaaaaatttctctttttcttctgctccccctcccccctccccctccccccctccctcctct

SEQ ID NO: 455802 - DNA, 1906 bp, Homo sapiens
aaagcagtggctgcggcgcctcgtactcgaaccgcatctgcagcgagcaactgagaagccaagactgagccggcggccgcggcgcagcgaacgagcagtgaccgtgctcctacccagctctgcttcacagcgcccacctgtctccgcccctcggcccctcgcccggctttgcctaaccgccacgatgatgttctcgggcttcaacgcagactacgaggcgtcatcctcccgctgcagcagcgcgtccccggccggggatagcctctcttactaccactcacccgcagactccttctccagcatgggctcgcctgtcaacgcgcaggacttctgcacggacctggccgtctccagtgccaacttcattcccacggtcactgccatctcgaccagtccggacctgcagtggctggtgcagcccgccctcgtctcctctgtggccccatcgcagaccagagcccctcaccctttcggagtccccgccccctccgctggggcttactccagggctggcgttgtgaagaccatgacaggaggccgagcgcagagcattggcaggaggggcaaggtggaacagttatctccagaagaagaagagaaaaggagaatccgaagggaaaggaataagatggctgcagccaaatgccgcaaccggaggagggagctgactgatacactccaagcggagacagaccaactagaagatgagaagtctgctttgcagaccgagattgccaacctgctgaaggagaaggaaaaactagagttcatcctggcagctcaccgacctgcctgcaagatccctgatgacctgggcttcccagaagagatgtctgtgggcttcccttgatcttgactgggggcctgccagaggttgccaccccggagtctgaggaggccttcaccctgcctctcctcaatgaccctgaggcccaagccctcaggggaacctgtcaagagcatcaggagcatggagctgaagaccggagcccttgatgacttcctgttcccatgacacttcagagagctggtagttagtagcatgttgagccaggcctgggtctgtgtctcttttctctttctccttagtcttctcatagcattaactaatctattgggttcattattggaattaacctggtgctggatattttcaaattgtatctagtgcagctgattttaacaataactactgtgttcctggcaatagtgtgttctgattagaaatgaccaatattatactaagaaaagatacgactttattttctggtagatagaaataaatagctatatccatgtactgtagtttttcttcaacatcaatgttcattgtaatgttactgatcatgcattgttgaggtggtctgaatgttctgacattaacagttttccatgaaaacgttttattgtgtttttaatttatttattaagatggattctcagatatttatatttttattttatttttttctaccttgaggtcttttgacatgtggaaagtgaatttgaatgaaaaatttaagcattgtttgcttattgttccaagacattgtcaataaaagcatttaagttgaatgcgaaaaaaaaaaaaaaaaaaaaaaaaaaaaaaaaaaaaaaaaaaaaaaaaaaaaaaaaaaaaaaaaaaaaaaaataaaaaaaaaaaaatccaaaaaaaaaaaaaaaaaatataaaatacaccttaaaaaaaaaaaaaaataaaaaaaaaaaattttgggccccttttctcccaaatttttttaaaactcggaaatttttttttccggccccaatattagggcctcttttggccatttcccctttaaggggtgcttttaaaatttaggggcccggttcttaacaacacctggtctgtgacctctgggtcccacaaatatccttcttgctc

SEQ ID NO: 455803 - DNA, 966 bp, Homo sapiens
gcacagtggctccctggggatggggcccatggccacagagctggagcccctgtgcactccggtggtcacctgtactcccagctgcactgcttacacgtcttccttcgtcttcacctaccccgaggctgactccttccccagctgtgcagctgcccaccgcaagggcagcagcagcaatgagccttcctctgactcgctcagctcacccacgctgctggccctgtgagggggcagggaaggggaggcagccggcacccacaagtgccactgcccgagctggtgcattacagagaggagaaacacatcttccctagagggttcctgtagacctagggaggatcaagtccttacctcttccggagatgtagcaaaacgcatggagtgtgtattgttcccagtgacacttcagagagctggtagttagtagcatgttgagccaggcctgggtctgtgtctcttttctctttctccttagtcttctcatagcattaactaatctattgggttcattattggaattaacctggtgctggatattttcaaattgtatctagtgcagctgattttaacaataactactgtgttcctggcaatagtgtgttctgattagaaatgaccaatattatactaagaaaagatacgactttattttctggtagatagaaataaatagctatatccatgtactgtagtttttcttcaacatcaatgttcattgtaatgttactgatcatgcattgttgaggtggtctgaatgttctgacattaacagttttccatgaaaacgttttattgtgtttttaatttatttattaagatggattctcagatatttatatttttattttatttttttctaccttgaggtcttttgacatgtggaaagtgaatttgaatgaaaaatttaagcattgtttgcttattgttccaagacattgtcaataaaagcatttaagttgaatgcga

SEQ ID NO: 455804 - DNA, 1499 bp, Homo sapiens
ggtctcctggttgcccaggtcttcaggcttgctcaggtctcctggcttgctcaggtctcctggcttgctcaggtctcctggcttgctcaggtctccatcccaactcagactctgagtctcaccctaagaagtactctcatagtttcttccctaagtttcttaccgcatgctttcagactgggctcttctttgttctcttgctgaggatcttattttaaatgcaagtcacacctagtctgcaactgcaggtcagaaatggtttcacagtggggtgccaggaagcagggaagctgcaggagccagttctactggggtgggtgaatggaggtgatggcagacacttttactgaatgtcggtctttttttgtgattattctagttttatctccagaagaagaagagaaaaggagaatccgaagggaaaggaataagatggctgcagccaaatgccgcaaccggaggagggagctgactgatacactccaagcggtaggtactctgtgggttgctcctttttaaaacttaagggaaagttggagattgagcataagggcccttgagtaagactgtgtcttatgctttcctttatccctctgtatacagggagacagaccaactagaagatgagaagtctgctttgcagaccgagattgccaacctgctgaaggagaaggaaaaactagagttcatcctggcagctcaccgacctgcctgcaagatccctgatgacctgggcttcccagaagagatgtctgtgggcttcccttgatcttgactgggggcctgccagaggttgccaccccggagtctgaggaggccttcaccctgcctctcctcaatgaccctgaggcccaagccctcaggggaacctgtcaagagcatcaggagcatggagctgaagaccggagcccttgatgacttcctgttcccatgacacttcagagagctggtagttagtagcatgttgagccaggcctgggtctgtgtctcttttctctttctccttagtcttctcatagcattaactaatctattgggttcattattggaattaacctggtgctggatattttcaaattgtatctagtgcagctgattttaacaataactactgtgttcctggcaatagtgtgttctgattagaaatgaccaatattatactaagaaaagatacgactttattttctggtagatagaaataaatagctatatccatgtactgtagtttttcttcaacatcaatgttcattgtaatgttactgatcatgcattgttgaggtggtctgaatgttctgacattaacagttttccatgaaaacgttttattgtgtttttaatttatttattaagatggattctcagatatttatatttttattttatttttttctaccttgaggtcttttgacatgtggaaagtgaatttgaatgaaaaatttaagcattgtttgcttattgttccaagacattgtcaataaaagcatttaagttgaatgcga

SEQ ID NO: 455805 - DNA, 2225 bp, Homo sapiens
aaagcagtggctgcggcgcctcgtactcgaaccgcatctgcagcgagcaactgagaagccaagactgagccggcggccgcggcgcagcgaacgagcagtgaccgtgctcctacccagctctgcttcacagcgcccacctgtctccgcccctcggcccctcgcccggctttgcctaaccgccacgatgatgttctcgggcttcaacgcagactacgaggcgtcatcctcccgctgcagcagcgcgtccccggccggggatagcctctcttactaccactcacccgcagactccttctccagcatgggctcgcctgtcaacgcgcaggtaaggctggcttcccgtcgccgcggggccgggggcttggggtcgcggaggaggagacaccgggcgggacgctccagtagatgagtagggggctcccttgtgcctggagggaggctgccgtggccggagcggtgccggctcgggggctcgggacttgctctgagcgcacgcacgcttgccatagtaagaattggttcccccttcgggaggcaggttcgttctgagcaacctctggtctgcactccaggacggatctctgacattagctggagcagacgtgtcccaagcacaaactcgctaactagagcctggcttctccggggaggtggcagaaagcggcaatcccccctcccccggcagcctggagcacggaggagggatgagggaggagggtgcagcgggcgggtgtgtaaggcagtttcattgataaaaagcgagttcattctggagactccggagcggcgcctgcgtcagcgcagacgtcagggatatttataacaaaccccctttcaagcaagtgatgctgaagggataacgggaacgcagcggcaggatggaagagacaggcactgcgctgcggaatgcctgggaggaaaagggggagacctttcatccaggatgagggacatttaagatgaaatgtccgtggcaggatcgtttctcttcactgctgcatgcggcactgggaactcgccccacctgtgtccggaacctgctcgctcacgtcggctttccccttctgttttgttctaggacttctgcacggacctggccgtctccagtgccaacttcattcccacggtcactgccatctcgaccagtccggacctgcagtggctggtgcagcccgccctcgtctcctctgtggccccatcgcagaccagagcccctcaccctttcggagtccccgccccctccgctggggcttactccagggctggcgttgtgaagaccatgacaggaggccgagcgcagagcattggcaggaggggcaaggtggaacaggagacagaccaactagaagatgagaagtctgctttgcagaccgagattgccaacctgctgaaggagaaggaaaaactagagttcatcctggcagctcaccgacctgcctgcaagatccctgatgacctgggcttcccagaagagatgtctgtgggcttcccttgatcttgactgggggcctgccagaggttgccaccccggagtctgaggaggccttcaccctgcctctcctcaatgaccctgaggcccaagccctcaggggaacctgtcaagagcatcaggagcatggagctgaagaccggagcccttgatgacttcctgttcccatgacacttcagagagctggtagttagtagcatgttgagccaggcctgggtctgtgtctcttttctctttctccttagtcttctcatagcattaactaatctattgggttcattattggaattaacctggtgctggatattttcaaattgtatctagtgcagctgattttaacaataactactgtgttcctggcaatagtgtgttctgattagaaatgaccaatattatactaagaaaagatacgactttattttctggtagatagaaataaatagctatatccatgtactgtagtttttcttcaacatcaatgttcattgtaatgttactgatcatgcattgttgaggtggtctgaatgttctgacattaacagttttccatgaaaacgttttattgtgtttttaatttatttattaagatggattctcagatatttatatttttattttatttttttctaccttgaggtcttttgacatgtggaaagtgaatttgaatgaaaaatttaagcattgtttgcttattgttccaagacattgtcaataaaagcatttaagttgaatgcga

SEQ ID NO: 455806 - DNA, 1144 bp, Homo sapiens
aaagcagtggctgcggcgcctcgtactcgaaccgcatctgcagcgagcaactgagaagccaagactgagccggcggccgcggcgcagcgaacgagcagtgaccgtgctcctacccagctctgcttcacagcgcccacctgtttatctccagaagaagaagagaaaaggagaatccgaagggaaaggaataagatggctgcagccaaatgccgcaaccggaggagggagctgactgatacactccaagcggagacagaccaactagaagatgagaagtctgctttgcagaccgagattgccaacctgctgaaggagaaggaaaaactagagttcatcctggcagctcaccgacctgcctgcaagatccctgatgacctgggcttcccagaagagatgtctgtgggcttcccttgatcttgactgggggcctgccagaggttgccaccccggagtctgaggaggccttcaccctgcctctcctcaatgaccctgaggcccaagccctcaggggaacctgtcaagagcatcaggagcatggagctgaagaccggagcccttgatgacttcctgttcccatgacacttcagagagctggtagttagtagcatgttgagccaggcctgggtctgtgtctcttttctctttctccttagtcttctcatagcattaactaatctattgggttcattattggaattaacctggtgctggatattttcaaattgtatctagtgcagctgattttaacaataactactgtgttcctggcaatagtgtgttctgattagaaatgaccaatattatactaagaaaagatacgactttattttctggtagatagaaataaatagctatatccatgtactgtagtttttcttcaacatcaatgttcattgtaatgttactgatcatgcattgttgaggtggtctgaatgttctgacattaacagttttccatgaaaacgttttattgtgtttttaatttatttattaagatggattctcagatatttatatttttattttatttttttctaccttgaggtcttttgacatgtggaaagtgaatttgaatgaaaaatttaagcattgtttgcttattgttccaagacattgtcaataaaagcatttaagttgaatgcga

SEQ ID NO: 455807 - DNA, 783 bp, Homo sapiens
ccccgagacagaagatcacctcatggaaatgaatctaagagtgctccaagctcccgaagccgaagtctcactttgctcccacatggaacacccaattctgcgtctccctgtagccagagacacctcagtgtgggggcccccggtgctgtcacaatcacgcatcacaagtcgcatgcagccgcccgaagagccaagagtcagtattccggccagcttgacacttcagagagctggtagttagtagcatgttgagccaggcctgggtctgtgtctcttttctctttctccttagtcttctcatagcattaactaatctattgggttcattattggaattaacctggtgctggatattttcaaattgtatctagtgcagctgattttaacaataactactgtgttcctggcaatagtgtgttctgattagaaatgaccaatattatactaagaaaagatacgactttattttctggtagatagaaataaatagctatatccatgtactgtagtttttcttcaacatcaatgttcattgtaatgttactgatcatgcattgttgaggtggtctgaatgttctgacattaacagttttccatgaaaacgttttattgtgtttttaatttatttattaagatggattctcagatatttatatttttattttatttttttctaccttgaggtcttttgacatgtggaaagtgaatttgaatgaaaaatttaagcattgtttgcttattgttccaagacattgtcaataaaagcatttaagttgaatgcga

SEQ ID NO: 455808 - DNA, 1707 bp, Homo sapiens
aaagcagtggctgcggcgcctcgtactcgaaccgcatctgcagcgagcaactgagaagccaagactgagccggcggccgcggcgcagcgaacgagcagtgaccgtgctcctacccagctctgcttcacagcgcccacctgtctccgcccctcggcccctcgcccggctttgcctaaccgccacgatgatgttctcgggcttcaacgcagactacgaggcgtcatcctcccgctgcagcagcgcgtccccggccggggatagcctctcttactaccactcacccgcagactccttctccagcatgggctcgcctgtcaacgcgcaggacttctgcacggacctggccgtctccagtgccaacttcattcccacggtcactgccatctcgaccagtccggacctgcagtggctggtgcagcccgccctcgtctcctctgtggccccatcgcagaccagagcccctcaccctttcggagtccccgccccctccgctggggcttactccagggctggcgttgtgaagaccatgacaggaggccgagcgcagagcattggcaggaggggcaaggtggaacagttatctccagaagaagaagagaaaaggagaatccgaagggaaaggaataagatggctgcagccaaatgccgcaaccggaggagggagctgactgatacactccaagcggagacagaccaactagaagatgagaagtctgctttgcagaccgagattgccaacctgctgaaggagaaggaaaaactagagttcatcctggcagctcaccgacctgcctgcaagatccctgatgacctgggcttcccagaagagatgtctgtgggcttcccttgatcttgactgggggcctgccagaggttgccaccccggagtctgaggaggccttcaccctgcctctcctcaatgaccctgaggcccaagccctcaggggaacctgtcaagagcatcaggagcatggagctgaagaccggagcccttgatgacttcctgttcccatgacacttcagagagctggtagttagtagcatgttgagccaggcctgggtctgtgtctcttttctctttctccttagtcttctcatagcattaactaatctattgggttcattattggaattaacctggtgctggatattttcaaattgtatctagtgcagctgattttaacaataactactgtgttcctggcaatagtgtgttctgattagaaatgaccaatattatactaagaaaagatacgactttattttctggtagatagaaataaatagctatatccatgtactgtagtttttcttcaacatcaatgttcattgtaatgttactgatcatgcattgttgaggtggtctgaatgattgcatttagactcactacttcttaaccgaccccacccaagaaaagaaaaatcgcgatacccgatattaacccttctaagtctaaattccatccttattgcctttagaccccaggtgtcttccagtgtccatcattaatttaaaaacactgaactattttcttgtgttgaattcctttttgaattaatcaccaaaaaaacgctctgaaattaccctggttctggttatttacggactattaatgttccattgcttcctcttcctggcttgtttttggaatttattgtccctttctccatggcattctatgcctttttcacggacttttttttttt

SEQ ID NO: 455809 - DNA, 1471 bp, Homo sapiens
aaagcagtggctgcggcgcctcgtactcgaaccgcatctgcagcgagcaactgagaagccaagactgagccggcggccgcggcgcagcgaacgagcagtgaccgtgctcctacccagctctgcttcacagcgcccacctgtctccgcccctcggcccctcgcccggctttgcctaaccgccacgatgatgttctcgggcttcaacgcagactacgaggcgtcatcctcccgctgcagcagcgcgtccccggccggggatagcctctcttactaccactcacccgcagactccttctccagcatgggctcgcctgtcaacgcgcaggacttctgcacggacctggccgtctccagtgccaacttcattcccacggtcactgccatctcgaccagtccggacctgcagtggctggtgcagcccgccctcgtctcctctgtggccccatcgcagaccagagcccctcaccctttcggagtccccgccccctccgctggggcttactccagggctggcgttgtgaagaccatgacaggaggccgagcgcagagcattggcaggaggggcaaggtggaacagttatctccagaagaagaagagaaaaggagaatccgaagggaaaggaataagatggctgcagccaaatgccgcaaccggaggagggagctgactgatacactccaagcggagacagaccaactagaagatgagaagtctgctttgcagaccgagattgccaacctgctgaaggagaaggaaaaactagagttcatcctggcagctcaccgacctgcctgcaagatccctgatgacctgggcttcccagaagagatgtctgtgggcttcccttgatcttgactgggggcctgccagaggttgccaccccggagtctgaggaggccttcaccctgcctctcctcaatgaccctgaggcccaagccctcaggggaacctgtcaagagcatcaggagcatggagctgaagaccggagcccttgatgacttcctgttcccatgacacttcagagagctggtagttagtagcatgttgagccaggcctgggtctgtgtctcttttctctttctccttagtcttctcatagcattaactaatctattgggttcattattggaattaacctggtgctggatattttcaaattgtatctagtgcagctgattttaacaataactactgtgttcctggcaatagtgtgttctgattagaaatgaccaatattatactaagaaaagatacgactttattttctggtagatagaaataaatagctatatccatgtactgtagtttttcttcaacatcaatgttcattgtaatgttactgatcatgcattgttgaggtggtctgaatgcaatatctgttgtttttttctttttctctaacttacctaggggtgtataatcacaatcacttaggaagttagagaaaaagaaaaatacaacaatgcctgg

SEQ ID NO: 455810 - DNA, 978 bp, Homo sapiens
gcacagtggctccctggggatggggcccatggccacagagctggagcccctgtgcactccggtggtcacctgtactcccagctgcactgcttacacgtcttccttcgtcttcacctaccccgaggctgactccttccccagctgtgcagctgcccaccgcaagggcagcagcagcaatgagccttcctctgactcgctcagctcacccacgctgctggccctgtgagggggcagggaaggggaggcagccggcacccacaagtgccactgcccgagctggtgcattacagagaggagaaacacatcttccctagagggttcctgtagacctagggaggaccttatctgtgcgtgaaacacaccaggctgtgggcctcaaggacttgaaagcatccatgtgtggactcaagtccttacctcttccggagatgtagcaaaacgcatggagtgtgtattgttcccagtgacacttcagagagctggtagttagtagcatgttgagccaggcctgggtctgtgtctcttttctctttctccttagtcttctcatagcattaactaatctattgggttcattattggaattaacctggtgctggatattttcaaattgtatctagtgcagctgattttaacaataactactgtgttcctggcaatagtgtgttctgattagaaatgaccaatattatactaagatgtagtttttcttcaacatcaatgttcattgtaatgttactgatcatgcattgttgaggtggtctgaatgttctgacattaacagttttccatgaaaacgttttattgtgtttttaatttatttattaagatggattctcagatatttatatttttattttatttttttctaccttgaggtcttttgacatgtggaaagtgaatttgaatgaaaaatttaagcattgtttgcttattgttccaagacattgtcaataaaagcatttaagttgaatgcga

SEQ ID NO: 455811 - DNA, 622 bp, Homo sapiens
tgatacacctccaagttggcactataccaccaacacaaatgggctaagacacagggtcatagggatagcaggcacctgagccaagccagaacttagatctcaactgttaatgcaggatgatttgtattgaaccatgaattttacactgcctctcaatggtggtatcagctataccacccctggtgctggatattttcaaattgtatctagtgcagctgattttaacaataactactgtgttcctggcaatagtgtgttctgattagaaatgaccaatattatactaagaaaagatacgactttattttctggtagatagaaataaatagctatatccatgtactgtagtttttcttcaacatcaatgttcattgtaatgttactgatcatgcattgttgaggtggtctgaatgttctgacattaacagttttccatgaaaacgttttattgtgtttttaatttatttattaagatggattctcagatatttatatttttattttatttttttctaccttgaggtcttttgacatgtggaaagtgaatttgaatgaaaaatttaagcattgtttgcttattgttccaagacattgtcaataaaagcatttaagttgaatgcga

SEQ ID NO: 455812 - DNA, 1258 bp, Homo sapiens
  misc_feature (1150)..(1151): n is a, c, g, or t
  misc_feature (1216)..(1216): n is a, c, g, or t
aaagcagtggctgcggcgcctcgtactcgaaccgcatctgcagcgagcaactgagaagccaagactgagccggcggccgcggcgcagcgaacgagcagtgaccgtgctcctacccagctctgcttcacagcgcccacctgtctccgcccctcggcccctcgcccggctttgcctaaccgccacgatgatgttctcgggcttcaacgcagactacgaggcgtcatcctcccgctgcagcagcgcgtccccggccggggatagcctctcttactaccactcacccgcagactccttctccagcatgggctcgcctgtcaacgcgcaggacttctgcacggacctggccgtctccagtgccaacttcattcccacggtcactgccatctcgaccagtccggacctgcagtggctggtgcagcccgccctcgtctcctctgtggccccatcgcagaccagagcccctcaccctttcggagtccccgccccctccgctggggcttactccagggctggcgttgtgaagaccatgacaggaggccgagcgcagagcattggcaggaggggcaaggtggaacaggtgaggaactctagcgtactcttcctgggaatgtgggggctgggtgggaagcagccccggagatgcaggagcccagtacagaggatgaagccactgatggggctggctgcacatccgtaactgggagccctggctccaagcccattccatcccaactcagactctgagtctcaccctaagaagtactctcatagtttcttccctaagtttcttaccgcatgctttcagactgggctcttctttgttctcttgctgaggatcttattttaaatgcaagtcacacctagtctgcaactgcaggtcagaaatggtttcacagtggggtgccaggaagcagggaagctgcaggagccagttctactggggtgggtgaatggaggtgatggcagacacttttactgaatgtcggtctttttttgtgattattctagttttatctccagaagaagaagagaaaaggagaatccgaagggaaaggaataagatggctgcagccaaatgccgcaaccggaggagggagctgactgatacactccaagcggtaggtactctgtgggttgctcctttttgttnncttatcctctgatacaggacagccacttgagatggaagctgtttgcgaccggatgcaactgctanggaggaaactgagtatctggagtaccactgctgagatctgaa

SEQ ID NO: 455813 - DNA, 445 bp, Homo sapiens
  misc_feature (46)..(46): n is a, c, g, or t
  misc_feature (48)..(48): n is a, c, g, or t
tgcaggtgcgaactctagaggagtcgccctgagttgcatttagacnancaataactactgtgttcctggcaatagtgtgttctgattagaaatgaccaatattatactaagaaaagatacgactttattttctggtagatagaaataaatagctatatccatgtactgtagtttttcttcaacatcaatgttcattgtaatgttactgatcatgcattgttgaggtggtctgaatgttctgacattaacagttttccatgaaaacgttttattgtgtttttaatttatttattaagatggattctcagatatttatatttttattttatttttttctaccttgaggtcttttgacatgtggaaagtgaatttgaatgaaaaatttaagcattgtttgcttattgttccaagacattgtcaataaaagcatttaagttgaatgcga

SEQ ID NO: 455814 - DNA, 410 bp, Homo sapiens
ctcgtgcgtagttccattaaacgatttttaaaatgtacacttgaaaaaaaaaaaaaaaaaaaaaaaaaacgcgagacaaagatacgactttattttctggtagatagaaataaatagctatatccatgtactgtagtttttcttcaacatcaatgttcattgtaatgttactgatcatgcattgttgaggtggtctgaatgttctgacattaacagttttccatgaaaacgttttattgtgtttttaatttatttattaagatggattctcagatatttatatttttattttatttttttctaccttgaggtcttttgacatgtggaaagtgaatttgaatgaaaaatttaagcattgtttgcttattgttccaagacattgtcaataaaagcatttaagttgaatgcga

SEQ ID NO: 455815 - DNA, 826 bp, Homo sapiens
aaagcagtggctgcggcgcctcgtactcgaaccgcatctgcagcgagcaactgagaagccaagactgagccggcggccgcggcgcagcgaacgagcagtgaccgtgctcctacccagctctgcttcacagcgcccacctgtctccgcccctcggcccctcgcccggctttgcctaaccgccacgatgatgttctcgggcttcaacgcagactacgaggcgtcatcctcccgctgcagcagcgcgtccccggccggggatagcctctcttactaccactcacccgcagactccttctccagcatgggctcgcctgtcaacgcgcaggtaaggctggcttcccgtcgccgcggggccgggggcttggggtcgcggaggaggagacaccgggcgggacgctccagtagatgagtagggggctcccttgtgcctggagggaggctgccgtggccggagcggtgccggctcgggggctcgggacttgctctgagcgcacgcacgcttgccatagtaagaattggttcccccttcgggaggcaggttcgttctgagcaacctctggtctgcactccaggacggatctctgacattagctggagcagacgtgtcccaagcacaaactcgctaactagagcctggcttctccggggaggtggcagaaagcggcaatcccccctcccccggcagcctggagcacggaggagggatgagggaggagggtgcagcgggcgggtgtgtaaggcagtttcattgataaatatccctgacgtctgcgctgacgcaggcgccgctccggagtctccagaatgaactcgctttttatcaatg

SEQ ID NO: 455816 - DNA, 1032 bp, Homo sapiens
gcacagtggctccctggggatggggcccatggccacagagctggagcccctgtgcactccggtggtcacctgtactcccagctgcactgcttacacgtcttccttcgtcttcacctaccccgaggctgactccttccccagctgtgcagctgcccaccgcaagggcagcagcagcaatgagccttcctctgactcgctcagctcacccacgctgctggccctgtgagggggcagggaaggggaggcagccggcacccacaagtgccactgcccgagctggtgcattacagagaggagaaacacatcttccctagagggttcctgtagacctagggaggaccttatctgtgcgtgaaacacaccaggctgtgggcctcaaggacttgaaagcatccatgtgtggactcaagtccttacctcttccggagatgtagcaaaacgcatggagtgtgtattgttcccagtgacacttcagagagctggtagttagtagcatgttgagccaggcctgggtctgtgtctcttttctctttctccttagtcttctcatagcattaactaatctattgggttcattattggaattaacctggtgctggatattttcaaattgtatctagtgcagctgattttaacaataactactgtgttcctggcaatagtgtgttctgattagaaatgaccaatattatactaagaaaagatacgactttattttctggtagatagaaataaatagctatatccatgtactgtagtttttcttcaacatcaatgttcattgtaatgttactgatcatgcattgttgaggtggtctgaatgttctgacattaacagttttccatgaaaacgttttattgtgtttttaatttatttattaagatggattctcagatatttatatttttattttatttttttctaccttgaggtcttttgacatgtggaaagtgaatttgaatgaaaaatttaagcattgtttgcttattgttccaagacattgtcaataaaagcatttaagttgaatgcga

SEQ ID NO: 455817 - DNA, 1008 bp, Homo sapiens
aaagcagtggctgcggcgcctcgtactcgaaccgcatctgcagcgagcaactgagaagccaagactgagccggcggccgcggcgcagcgaacgagcagtgaccgtgtccttccccagctgtgcagctgcccaccgcaagggcagcagcagcaatgagccttcctctgactcgctcagctcacccacgctgctggccctgtgagggggcagggaaggggaggcagccggcacccacaagtgccactgcccgagctggtgcattacagagaggagaaacacatcttccctagagggttcctgtagacctagggaggaccttatctgtgcgtgaaacacaccaggctgtgggcctcaaggacttgaaagcatccatgtgtggactcaagtccttacctcttccggagatgtagcaaaacgcatggagtgtgtattgttcccagtgacacttcagagagctggtagttagtagcatgttgagccaggcctgggtctgtgtctcttttctctttctccttagtcttctcatagcattaactaatctattgggttcattattggaattaacctggtgctggatattttcaaattgtatctagtgcagctgattttaacaataactactgtgttcctggcaatagtgtgttctgattagaaatgaccaatattatactaagaaaagatacgactttattttctggtagatagaaataaatagctatatccatgtactgtagtttttcttcaacatcaatgttcattgtaatgttactgatcatgcattgttgaggtggtctgaatgttctgacattaacagttttccatgaaaacgttttattgtgtttttaatttatttattaagatggattctcagatatttatatttttattttatttttttctaccttgaggtcttttgacatgtggaaagtgaatttgaatgaaaaatttaagcattgtttgcttattgttccaagacattgtcaataaaagcatttaagttgaatgcga

SEQ ID NO: 455818 - DNA, 1526 bp, Homo sapiens
aaagcagtggctgcggcgcctcgtactcgaaccgcatctgcagcgagcaactgagaagccaagactgagccggcggccgcggcgcagcgaacgagcagtgaccgtgctcctacccagctctgcttcacagcgcccacctgtctccgcccctcggcccctcgcccggctttgcctaaccgccacgatgatgttctcgggcttcaacgcagactacgaggcgtcatcctcccgctgcagcagcgcgtccccggccggggatagcctctcttactaccactcacccgcagactccttctccagcatgggctcgcctgtcaacgcgcaggacttctgcacggacctggccgtctccagtgccaacttcattcccacggtcactgccatctcgaccagtccggacctgcagtggctggtgcagcccgccctcgtctcctctgtggccccatcgcagaccagagcccctcaccctttcggagtccccgccccctccgctggggcttactccagggctggcgttgtgaagaccatgacaggaggccgagcgcagagcattggcaggaggggcaaggtggaacagttatctccagaagaagaagagaaaaggagaatccgaagggaaaggaataagatggctgcagccaaatgccgcaaccggaggagggagctgactgatacactccaagcggagacagaccaactagaagatgagaagtctgctttgcagaccgagattgccaacctgctgaaggagaaggacctgggcttcccagaagagatgtctgtgggcttcccttgatcttgactgggggcctgccagaggttgccaccccggagtctgaggaggccttcaccctgcctctcctcaatgaccctgaggcccaagccctcaggggaacctgtcaagagcatcaggagcatggagctgaagaccggagcccttgatgacttcctgttcccatgacacttcagagagctggtagttagtagcatgttgagccaggcctgggtctgtgtctcttttctctttctccttagtcttctcatagcattaactaatctattgggttcattattggaattaacctggtgctggatattttcaaattgtatctagtgcagctgattttaacaataactactgtgttcctggcaatagtgtgttctgattagaaatgaccaatattatactaagaaaagatacgactttattttctggtagatagaaataaatagctatatccatgtactgtagtttttcttcaacatcaatgttcattgtaatgttactgatcatgcattgttgaggtggtctgaatgttctgacattaacagttttccatgaaaacgttttattgtgtttttaatttatttattaagatggattctcagatatttatatttttattttatttttttctaccttgaggtcttttgacatgtggaaagtgaatttgaatgaaaaatttaagcattgtttgcttattgttccaagacattgtcaataaaagcatttaagttgaatgcga

SEQ ID NO: 455819 - DNA, 2881 bp, Homo sapiens
aaagcagtggctgcggcgcctcgtactcgaaccgcatctgcagcgagcaactgagaagccaagactgagccggcggccgcggcgcagcgaacgagcagtgaccgtgctcctacccagctctgcttcacagcgcccacctgtctccgcccctcggcccctcgcccggctttgcctaaccgccacgatgatgttctcgggcttcaacgcagactacgaggcgtcatcctcccgctgcagcagcgcgtccccggccggggatagcctctcttactaccactcacccgcagactccttctccagcatgggctcgcctgtcaacgcgcaggtaaggctggcttcccgtcgccgcggggccgggggcttggggtcgcggaggaggagacaccgggcgggacgctccagtagatgagtagggggctcccttgtgcctggagggaggctgccgtggccggagcggtgccggctcgggggctcgggacttgctctgagcgcacgcacgcttgccatagtaagaattggttcccccttcgggaggcaggttcgttctgagcaacctctggtctgcactccaggacggatctctgacattagctggagcagacgtgtcccaagcacaaactcgctaactagagcctggcttctccggggaggtggcagaaagcggcaatcccccctcccccggcagcctggagcacggaggagggatgagggaggagggtgcagcgggcgggtgtgtaaggcagtttcattgataaaaagcgagttcattctggagactccggagcggcgcctgcgtcagcgcagacgtcagggatatttataacaaaccccctttcaagcaagtgatgctgaagggataacgggaacgcagcggcaggatggaagagacaggcactgcgctgcggaatgcctgggaggaaaagggggagacctttcatccaggatgagggacatttaagatgaaatgtccgtggcaggatcgtttctcttcactgctgcatgcggcactgggaactcgccccacctgtgtccggaacctgctcgctcacgtcggctttccccttctgttttgttctaggacttctgcacggacctggccgtctccagtgccaacttcattcccacggtcactgccatctcgaccagtccggacctgcagtggctggtgcagcccgccctcgtctcctctgtggccccatcgcagaccagagcccctcaccctttcggagtccccgccccctccgctggggcttactccagggctggcgttgtgaagaccatgacaggaggccgagcgcagagcattggcaggaggggcaaggtggaacaggtgaggaactctagcgtactcttcctgggaatgtgggggctgggtgggaagcagccccggagatgcaggagcccagtacagaggatgaagccactgatggggctggctgcacatccgtaactgggagccctggctccaagcccattccatcccaactcagactctgagtctcaccctaagaagtactctcatagtttcttccctaagtttcttaccgcatgctttcagactgggctcttctttgttctcttgctgaggatcttattttaaatgcaagtcacacctagtctgcaactgcaggtcagaaatggtttcacagtggggtgccaggaagcagggaagctgcaggagccagttctactggggtgggtgaatggaggtgatggcagacacttttactgaatgtcggtctttttttgtgattattctagttttatctccagaagaagaagagaaaaggagaatccgaagggaaaggaataagatggctgcagccaaatgccgcaaccggaggagggagctgactgatacactccaagcggtaggtactctgtgggttgctcctttttaaaacttaagggaaagttggagattgagcataagggcccttgagtaagactgtgtcttatgctttcctttatccctctgtatacagggagacagaccaactagaagatgagaagtctgctttgcagaccgagattgccaacctgctgaaggagaaggaaaaactagagttcatcctggcagctcaccgacctgcctgcaagatccctgatgacctgggcttcccagaagagatgtctgtgggcttcccttgatcttgactgggggcctgccagaggttgccaccccggagtctgaggaggccttcaccctgcctctcctcaatgaccctgaggcccaagccctcaggggaacctgtcaagagcatcaggagcatggagctgaagaccggagcccttgatgacttcctgttcccatgacacttcagagagctggtagttagtagcatgttgagccaggcctgggtctgtgtctcttttctctttctccttagtcttctcatagcattaactaatctattgggttcattattggaattaacctggtgctggatattttcaaattgtatctagtgcagctgattttaacaataactactgtgttcctggcaatagtgtgttctgattagaaatgaccaatattatactaagaaaagatacgactttattttctggtagatagaaataaatagctatatccatgtactgtagtttttcttcaacatcaatgttcattgtaatgttactgatcatgcattgttgaggtggtctgaatgttctgacattaacagttttccatgaaaacgttttattgtgtttttaatttatttattaagatggattctcagatatttatatttttattttatttttttctaccttgaggtcttttgacatgtggaaagtgaatttgaatgaaaaatttaagcattgtttgcttattgttccaagacattgtcaataaaagcatttaagttgaatgcga

SEQ ID NO: 455820 - DNA, 1358 bp, Homo sapiens
gcacagtggctccctggggatggggcccatggccacagagctggagcccctgtgcactccggtggtcacctgtactcccagctgcactgcttacacgtcttccttcgtcttcacctaccccgaggctgactccttccccagctgtgcagctgcccaccgcaagggcagcagcagcaatgagccttcctctgactcgctcagctcacccacgctgctggccctgtgagggggcagggaaggggaggcagccggcacccacaagtgccactgcccgagctggtgcattacagagaggagaaacacatcttccctagagggttcctgtagacctagggaggaccttatctgtgcgtgaaacacaccaggctgtgggcctcaaggacttgaaagcatccatgtgtggactcaagtccttacctcttccggagatgtagcaaaacgcatggagtgtgtattgttcccagtgacacttcagagagctggtagttagtagcatgttgagccaggcctgggtctgtgtctcttttctctttctccttagtcttctcatagcattaactaatctattgggttcattattggaattaacctggtgctggatattttcaaattgtatctagtgcagctgattttaacaataactactgtgttcctggcaatagtgtgttctgattagaaatgaccaatattatactaagaaaagatacgactttattttctggtagatagaaataaatagctatatccatgtactgtagtttttcttcaacatcaatgttcattgtaatgttactgatcatgcattgttgaggtggtctgaatgttctgacattaacagttttccatgaaaacgttttattgtgtttttaatttatttattaagatggattctcagatatttatatttttattttatttttttctaccttgaggtcttttgacatgtggaaagtgaatttgaatgaaaaatttaagcattgtttgcttattgttccaagacattgtcaataaaagcatttaagttgaatgcgaaaaaaaaaaaaaaaaaaaaaaaaaaaaaaaaaaaaaaaaaaaaaaaaaaaaaaaaaaaaaaaaaaaaaaaataaaaaaaaaaaaatccaaaaaaaaaaaaaaaaaatataaaatacaccttaaaaaaaaaaaaaaataaaaaaaaaaaattttgggccccttttctcccaaatttttttaaaactcggaaatttttttttccggccccaatattagggcctcttttggccatttcccctttaaggggtgcttttaaaatttaggggcccggttcttaacaacacctggtctgtgacctctgggtcccacaaatatccttcttgctc

SEQ ID NO: 455821 - DNA, 2053 bp, Homo sapiens
aaagcagtggctgcggcgcctcgtactcgaaccgcatctgcagcgagcaactgagaagccaagactgagccggcggccgcggcgcagcgaacgagcagtgaccgtgctcctacccagctctgcttcacagcgcccacctgtctccgcccctcggcccctcgcccggctttgcctaaccgccacgatgatgttctcgggcttcaacgcagactacgaggcgtcatcctcccgctgcagcagcgcgtccccggccggggatagcctctcttactaccactcacccgcagactccttctccagcatgggctcgcctgtcaacgcgcaggacttctgcacggacctggccgtctccagtgccaacttcattcccacggtcactgccatctcgaccagtccggacctgcagtggctggtgcagcccgccctcgtctcctctgtggccccatcgcagaccagagcccctcaccctttcggagtccccgccccctccgctggggcttactccagggctggcgttgtgaagaccatgacaggaggccgagcgcagagcattggcaggaggggcaaggtggaacaggtgaggaactctagcgtactcttcctgggaatgtgggggctgggtgggaagcagccccggagatgcaggagcccagtacagaggatgaagccactgatggggctggctgcacatccgtaactgggagccctggctccaagcccattccatcccaactcagactctgagtctcaccctaagaagtactctcatagtttcttccctaagtttcttaccgcatgctttcagactgggctcttctttgttctcttgctgaggatcttattttaaatgcaagtcacacctagtctgcaactgcaggtcagaaatggtttcacagtggggtgccaggaagcagggaagctgcaggagccagttctactggggtgggtgaatggaggtgatggcagacacttttactgaatgtcggtctttttttgtgattattctagttcggaggagggagctgactgatacactccaagcggtaggtactctgtgggttgctcctttttaaaacttaagggaaagttggagattgagcataagggcccttgagtaagactgtgtcttatgctttcctttatccctctgtatacagggagacagaccaactagaagatgagaagtctgctttgcagaccgagattgccaacctgctgaaggagaaggaaaaactagagttcatcctggcagctcaccgacctgcctgcaagatccctgatgacctgggcttcccagaagagatgtctgtgggcttcccttgatcttgactgggggcctgccagaggttgccaccccggagtctgaggaggccttcaccctgcctctcctcaatgaccctgaggcccaagccctcaggggaacctgtcaagagcatcaggagcatggagctgaagaccggagcccttgatgacttcctgttcccatgacacttcagagagctggtagttagtagcatgttgagccaggcctgggtctgtgtctcttttctctttctccttagtcttctcatagcattaactaatctattgggttcattattggaattaacctggtgctggatattttcaaattgtatctagtgcagctgattttaacaataactactgtgttcctggcaatagtgtgttctgattagaaatgaccaatattatactaagaaaagatacgactttattttctggtagatagaaataaatagctatatccatgtactgtagtttttcttcaacatcaatgttcattgtaatgttactgatcatgcattgttgaggtggtctgaatgttctgacattaacagttttccatgaaaacgttttattgtgtttttaatttatttattaagatggattctcagatatttatatttttattttatttttttctaccttgaggtcttttgacatgtggaaagtgaatttgaatgaaaaatttaagcattgtttgcttattgttccaagacattgtcaataaaagcatttaagttgaatgcga

SEQ ID NO: 455822 - DNA, 1110 bp, Homo sapiens
  misc_feature (1038)..(1038): n is a, c, g, or t
  misc_feature (1098)..(1098): n is a, c, g, or t
gcacagtggctccctggggatggggcccatggccacagagctggagcccctgtgcactccggtggtcacctgtactcccagctgcactgcttacacgtcttccttcgtcttcacctaccccgaggctgactccttccccagctgtgcagctgcccaccgcaagggcagcagcagcaatgagccttcctctgactcgctcagctcacccacgctgctggccctgtgagggggcagggaaggggaggcagccggcacccacaagtgccactgcccgagctggtgcattacagagaggagaaacacatcttccctagagggttcctgtagacctagggaggaccttatctgtgcgtgaaacacaccaggctgtgggcctcaaggacttgaaagcatccatgtgtggactcaagtccttacctcttccggagatgtagcaaaacgcatggagtgtgtattgttcccagtgacacttcagagagctggtagttagtagcatgttgagccaggcctgggtctgtgtctcttttctctttctccttagtcttctcatagcattaactaatctattgggttcattattggaattaacctggtgctggatattttcaaattgtatctagtgcagctgattttaacaataactactgtgttcctggcaatagtgtgttctgattagaaatgaccaatattatactaagaaaagatacgactttattttctggtagatagaaataaatagctatatccatgtactgtagtttttcttcaacatcaatgttcattgtaatgttactgatcatgcattgttgaggtggtctgaatgttctgacattaacagttttccatgaaaacgttttattgtgtttttaatttatttattaagatggattctcagatatttatatttttattttatttttttctaccttgaggtcttttgacatgtggaaagtgaatttgaatgaaaaatttaagcattgtttgcttattgttccaagacattgtcaataaaagcatttaagttgaatgcgaaaaaanaaaagactatttaaaatctgcggccgatattcgagctcactgggccattcccgctatagngaggcgtttacc

SEQ ID NO: 455823 - DNA, 1076 bp, Homo sapiens
  misc_feature (7)..(7): n is a, c, g, or t
gggctgnctagaggatcccaaacgacccgaagactacttctccagcattggcaggaggggcaaggtggaacagttatctccagaagaagaagagaaaaggagaatccgaagggaaaggaataagatggctgcagccaaatgccgcaaccggaggagggagctgactgatacactccaagcggagacagaccaactagaagatgagaagtctgctttgcagaccgagattgccaacctgctgaaggagaaggaaaaactagagttcatcctggcagctcaccgacctgcctgcaagatccctgatgacctgggcttcccagaagagatgtctgtgggcttcccttgatcttgactgggggcctgccagaggttgccaccccggagtctgaggaggccttcaccctgcctctcctcaatgaccctgaggcccaagccctcaggggaacctgtcaagagcatcaggagcatggagctgaagaccggagcccttgatgacttcctgttcccatgacacttcagagagctggtagttagtagcatgttgagccaggcctgggtctgtgtctcttttctctttctccttagtcttctcatagcattaactaatctattgggttcattattggaattaacctggtgctggatattttcaaattgtatctagtgcagctgattttaacaataactactgtgttcctggcaatagtgtgttctgattagaaatgaccaatattatactaagaaaagatacgactttattttctggtagatagaaataaatagctatatccatgtactgtagtttttcttcaacatcaatgttcattgtaatgttactgatcatgcattgttgaggtggtctgaatgttctgacattaacagttttccatgaaaacgttttattgtgtttttaatttatttattaagatggattctcagatatttatatttttattttatttttttctaccttgaggtcttttgacatgtggaaagtgaatttgaatgaaaaatttaagcattgtttgcttattgttccaagacattgtcaataaaagcatttaagttgaatgcga

SEQ ID NO: 455824 - DNA, 1054 bp, Homo sapiens
tctagaggatcccggctgagcaagttggcaggaggggcagggttggaacagttatctccagaagaagaagagaaaaggagaatccgaagggaaaggaataagatggctgcagccaaatgccgcaaccggaggagggagctgactgatacactccaagcggagacagaccaactagaagatgagaagtctgctttgcagaccgagattgccaacctgctgaaggagaaggaaaaactagagttcatcctggcagctcaccgacctgcctgcaagatccctgatgacctgggcttcccagaagagatgtctgtgggcttcccttgatcttgactgggggcctgccagaggttgccaccccggagtctgaggaggccttcaccctgcctctcctcaatgaccctgaggcccaagccctcaggggaacctgtcaagagcatcaggagcatggagctgaagaccggagcccttgatgacttcctgttcccatgacacttcagagagctggtagttagtagcatgttgagccaggcctgggtctgtgtctcttttctctttctccttagtcttctcatagcattaactaatctattgggttcattattggaattaacctggtgctggatattttcaaattgtatctagtgcagctgattttaacaataactactgtgttcctggcaatagtgtgttctgattagaaatgaccaatattatactaagaaaagatacgactttattttctggtagatagaaataaatagctatatccatgtactgtagtttttcttcaacatcaatgttcattgtaatgttactgatcatgcattgttgaggtggtctgaatgttctgacattaacagttttccatgaaaacgttttattgtgtttttaatttatttattaagatggattctcagatatttatatttttattttatttttttctaccttgaggtcttttgacatgtggaaagtgaatttgaatgaaaaatttaagcattgtttgcttattgttccaagacattgtcaataaaagcatttaagttgaatgcga

SEQ ID NO: 455825 - DNA, 2039 bp, Homo sapiens
aaagcagtggctgcggcgcctcgtactcgaaccgcatctgcagcgagcaactgagaagccaagactgagccggcggccgcggcgcagcgaacgagcagtgaccgtgctcctacccagctctgcttcacagcgcccacctgtctccgcccctcggcccctcgcccggctttgcctaaccgccacgatgatgttctcgggcttcaacgcagactacgaggcgtcatcctcccgctgcagcagcgcgtccccggccggggatagcctctcttactaccactcacccgcagactccttctccagcatgggctcgcctgtcaacgcgcaggtaaggctggcttcccgtcgccgcggggccgggggcttggggtcgcggaggaggagacaccgggcgggacgctccagtagatgagtagggggctcccttgtgcctggagggaggctgccgtggccggagcggtgccggctcgggggctcgggacttgctctgagcgcacgcacgcttgccatagtaagaattggttcccccttcgggaggcaggttcgttctgagcaacctctggtctgcactccaggacggatctctgacattagctggagcagacgtgtcccaagcacaaactcgctaactagagcctggcttctccggggaggtggcagaaagcggcaatcccccctcccccggcagcctggagcacggaggagggatgagggaggagggtgcagcgggcgggtgtgtaaggcagtttcattgataaaaagcgagttcattctggagactccggagcggcgcctgcgtcagcgcagacgtcagggatatttataacaaaccccctttcaagcaagtgatgctgaagggataacgggaacgcagcggcaggatggaagagacaggcactgcgctgcggaatgcctgggaggaaaagggggagacctttcatccaggatgagggacatttaagatgaaatgtccgtggcaggatcgtttctcttcactgctgcatgcggcactgggaactcgccccacctgtgtccggaacctgctcgctcacgtcggctttccccttctgttttgttctaggacttctgcacggacctggccgtctccagtgccaacttcattcccacggtcactgtactcccagctgcactgcttacacgtcttccttcgtcttcacctaccccgaggctgactccttccccagctgtgcagctgcccaccgcaagggcagcagcagcaatgagccttcctctgactcgctcagctcacccacgctgctggccctgtgagggggcagggaaggggaggcagccggcacccacaagtgccactgcccgagctggtgcattacagagaggagaaacacatcttccctagagggttcctgtagacctagggaggaccttatctgtgcgtgaaacacaccaggctgtgggcctcaaggacttgaaagcatccatgtgtggactcaagtccttacctcttccggagatgtagcatagcatgttgagccaggcctgggtctgtgtctcttttctctttctccttagtcttctcatagcattaactaatctattgggttcattattggaattaacctggtgctggatattttcaaattgtatctagtgcagctgattttaacaataactactgtgttcctggcaatagtgtgttctgattagaaatgaccaatattatactaagaaaagatacgactttattttctggtagatagaaataaatagctatatccatgtactgtagtttttcttcaacatcaatgttcattgtaatgttactgatcatgcattgttgaggtggtctgaatgttctgacattaacagttttccatgaaaacgttttattgtgtttttaatttatttattaagatggattctcagatatttatatttttattttatttttttctaccttgaggtcttttgacatgtggaaagtgaatttgaatgaaaaatttaagcattgtttgcttattgttccaagacattgtcaataaaagcatttaagttgaatgcga

SEQ ID NO: 455826 - DNA, 988 bp, Homo sapiens
gcacagtggctccctggggatggggcccatggccacagagctggagcccctgtgcactccggtggtcacctgtactcccagctgcactgcttacacgtcttccttcgtcttcacctaccccgaggctgactccttccccagctgtgcagctgcccaccgcaagggcagcagcagcaatgagccttcctctgactcgctcagctcacccacgctgctggccctgtgagggggcagggaaggggaggcagccggcacccacaagtgccactgcccgagctggtgcattacagagaggagaaacacatcttccctagagggttcctgtagacctagggaggaccttatctgtgcgtgaaacacaccaggctgtgggcctcaaggacttgaaagcatccatgtgtggactcaagtccttacctcttccggagatgtagcaaaacgcatggagtgtgtattgttcccagtgacacttcagagagctggtagttagtagcatgttgagccaggcctgggtctgtgtctcttttctctttctccttagtcttctcatagcattaactaatctattgggttcattattggaattaacctggtgctggatattttcaaattgtatctagtgcagctgattttaacaataactactgtgttcctggcaatagtgtgttctgattagaaatgaccaatattatactaagaaaagatacgactttattttctggtagatagaaataaatagctatatccatgtactgtagtttttcttcaacatcaatgttcattgtaatgttactgatcatgcattgttgaggtggtctgaatgttctgacattaacagttttccatgtcagatatttatatttttattttatttttttctaccttgaggtcttttgacatgtggaaagtgaatttgaatgaaaaatttaagcattgtttgcttattgttccaagacattgtcaataaaagcatttaagttgaatgcga

SEQ ID NO: 455827 - DNA, 750 bp, Homo sapiens
aaagcagtggctgcggcgcctcgtactcgaaccgcatctgcagcgagcaactgagaagccaagactgagccggcggccgcggcgcagcgaacgagcagtgaccgtgctcctacccagctctgcttcacagcgcccacctgtctccgcccctcggcccctcgcccggctttgcctaaccgccacgatgatgttctcgggcttcaacgcagactacgaggcgtcatcctcccgctgcagcagcgcgtccccggccggggatagcctctcttactaccactcacccgcagactccttctccagcatgggctcgcctgtcaacgcgcaggacttctgcacggacctggccgtctccagtgccaacttcattcccacggtcactgccatctcgaccagtccggacctgcagtggctggtgcagcccgccctcgtctcctctgtggccccatcgcagaccagagcccctcaccctttcggagtccccgccccctccgctggggcttactccagggctggcgttgtgaagaccatgacaggaggccgagcgcagagcattggcaggaggggcaaggtggaacagttatctccagaagaagaagagaaaaggagaatccgaagggaaaggaataagatggctgcagccaaatgccgcaaccggaggagggagctgactgatacactccaagcgagaaaggcatggaacagatgctccttccagcctccagaaggagccaacgctgcgccctcgggtcc

SEQ ID NO: 455828 - DNA, 894 bp, Homo sapiens
aaagcagtggctgcggcgcctcgtactcgaaccgcatctgcagcgagcaactgagaagccaagactgagccggcggccgcggcgcagcgaacgagcagtgaccgtgctcctacccagctctgcttcacagcgcccacctgtctccgcccctcggcccctcgcccggctttgcctaaccgccacgatgatgttctcgggcttcaacgcagactacgaggcgtcatcctcccgctgcagcagcgcgtccccggccggggatagcctctcttactaccactcacccgcagactccttctccagcatgggctcgcctgtcaacgcgcaggacttctgcacggacctggccgtctccagtgccaacttcattcccacggtcactgccatctcgaccagtccggacctgcagtggctggtgcagcccgccctcgtctcctctgtggccccatcgcagaccagagcccctcaccctttcggagtccccgccccctccgctggggcttactccagggctggcgttgtgaagaccatgacaggaggccgagcgcagagcattggcaggaggggcaaggtggaacaggtgaggaactctagcgtactcttcctgggaatgtgggggctgggtgggaagcagccccggagatgcaggagcccagtacagaggatgaagccactgatggggctggctgcacatccgtaactgggagccctggctccaagcccattccatcccaactcagactctgagtctcaccctaagaagtactctcatagtttcttccctaagtttcttaccgcatgctttcagactgggctcttctttgttctcttgctgaggatcttatatcaacgcatgacacaccacgcggtaccggctcgattctatctgtctgcttt

SEQ ID NO: 455829 - DNA, 2792 bp, Homo sapiens
ggatccgtcgacggccattaccaatcgcgaaaccgctcgcgcgcgtgcatcccgcaccatcccccggccccgggccctggccggcgtcagaccgagctgccgccgccaccaccgcagcagcagcagtcggggagccaggcccagccagggccgcgggaggcgggggcgcccgggccctggatgtcccgcagcgcggcggccagcggcggaccccggaggcctgagcggcacctgcccccagccccctgtggggccccggggcccccagaaacctgcaggacggagccagacggggcgggcaccatgaacaagttacggcagagcctgcggcggaggaagccagcctacgtgcccgaggcgtcgcgcccgcaccagtggcaggcagacgaggacgcggtgcggaagggcacgtgcagcttcccggtcaggtacctgggtcacgtggaggtagaggagtcccggggaatgcacgtgtgtgaagatgcggtgaagaagctgaaggcgatgggccgaaagtccgtgaagtctgtcctgtgggtgtcagccgatgggctccgagtggtggacgacaaaaccaaggatcttctggtcgaccagaccatcgaaaaggtctccttttgtgctcctgaccgcaacctggacaaggctttctcctatatctgtcgtgacgggactacccgccgctggatctgccactgttttctggcactgaaggactccggcgagaggctgagccacgctgtgggctgtgcttttgccgcctgcctggagcgaaaacagcgacgggagaaggaatgtggggtcacggccgccttcgatgccagccgcaccagcttcgcccgcgagggctccttccgcctgtctgggggtgggcggcctgctgagcgagaggccccggacaagaagaaagcagaggcagcagctgcccccactgtggctcctggccctgcccagcctgggcacgtgtccccgacaccagccaccacatcccctggtgagaagggtgaggcaggcacccctgtggctgcaggcaccactgcggccgccatcccccggcgccatgcacccctggagcagctggttcgccagggctccttccgtgggttcccagcactcagccagaagaactcgcctttcaaacggcagctgagcctacggctgaatgagctgccatccacgctgcagcgccgcactgacttccaggtgaagggcacagtgcctgagatggagcctcctggtgccggcgacagtgacagcatcaacgctctgtgcacacagatcagttcatcttttgccagtgctggagcgccagcaccagggccaccacctgccacaacagggacttctgcctggggtgagccctccgtgccccctgcagctgccttccagcctgggcacaagcggacaccttcagaggctgagcgatggctggaggaggtgtcacaggtggccaaggcccagcagcagcagcagcagcaacagcaacagcagcagcagcagcagcagcaacagcagcaagcagcctcagtggccccagtgcccaccatgcctcctgccctgcagcctttccccgcccccgtggggccctttgacgctgcacctgcccaagtggccgtgttcctgccacccccacacatgcagcccccttttgtgcccgcctacccgggcttgggctacccaccgatgccccgggtgcccgtggtgggcatcacaccctcacagatggtggcaaacgccttctgctcagccgcccagctccagcctcagcctgccactctgcttgggaaagctggggccttcccgccccctgccatacccagtgcccctgggagccaggcccgccctcgccccaatggggccccctggccccctgagccagcgcctgccccagctccagagttggacccctttgaggcccagtgggcggcattagaaggcaaagccactgtagagaaaccctccaaccccttttctggcgacctgcaaaagacattcgagattgaactgtagcccgagccgccccacccactccatcatctccaggtgccccacgcctgggggtggaggcacaacctctcccctaaccctgctccctggggctgcgcccctcaacaccctctcaacacccccctccctcaaccaccccgacaaccactacagaaccaacattgtgacgcccaggttgcaacaggatggaattcagggacggacccagcctggctaagggaaccatttcactgccggacttaggctggcaatgcccccttccccaaccccagacacaggggttggccacaatcccactgaatgcccttggttcacactccatttcccagtttctgttgacccccaccttccagtgttggacaggatggaggggggacacttgcttaggggctctcctgggccccacaccagtgcccaccccaaatctggtcgtctcctccccccatgcacagcacaagctaagggctgccctctgcccacacgctgcgttcactgccaatgctgtactcacctccatcaccctccaactttggggcccatgtcttccttgggccaaggtctcatgggggctagggccaagttgggggcccaggaggcggggagggaggaggaggagaagatgcgcagttacctcatgtcggtgcccgctggggaggggtccgggaagaaggggaaggggtgcctggcgggtacttttctatcttttatttccagattttttttgtatctaaacttgaagatttgtattatacaaggacagccaataaaggaagaatataatggtg

SEQ ID NO: 455830 - DNA, 407 bp, Homo sapiens
tccccccaatttccaccgcggccaattcatggacaggaactaccccagcgccggcttcggggacccgctcggcgccggggcgggatggagttacgagaggtcagcgaaagctagcttggtttatggcagctccaggacctcgcaccccgagacggacatcttacaccgccaggcctatgcggccccccacccactgcaaagctatgccaccaaccaccacccggcaggcctctctggactcttcgacactggcctccaccacgcgggctcagcagggcccgacgcctccgtcatgaaccttatctcggccctggaatcccggggcccccagcctggcccctccgcctcctctctcctctcccagttccgcagtccttcctggcaaacaggcatgcacacgccaggcc

SEQ ID NO: 455831 - DNA, 2923 bp, Homo sapiens
  misc_feature (2795)..(2795): n is a, c, g, or t
aacggaatcctcccgggagccgaggaggctcgcgcgcgtgcatcccgcaccatcccccggccccgggccctggccggcgtcagaccgagctgccgccgccaccaccgcagcagcagcagtcggggagccaggcccagccagggccgcgggaggcgggggcgcccgggccctggatgtcccgcagcgcggcggccagcggcggaccccggaggcctgagcggcacctgcccccagccccctgtggggccccggggcccccagaaacctgcaggacggagccagacggggcgggcaccatgaacaagttacggcagagcctgcggcggaggaagccagcctacgtgcccgaggcgtcgcgcccgcaccagtggcaggcagacgaggacgcggtgcggaagggcacgtgcagcttcccggtcaggtacctgggtcacgtggaggtagaggagtcccggggaatgcacgtgtgtgaagatgcggtgaagaagctgaaggcgatgggccgaaagtccgtgaagtctgtcctgtgggtgtcagccgatgggctccgagtggtggacgacaaaaccaaggatcttctggtcgaccagaccatcgaaaaggtctccttttgtgctcctgaccgcaacctggacaaggctttctcctatatctgtcgtgacgggactacccgccgctggatctgccactgttttctggcactgaaggactccggcgagaggctgagccacgctgtgggctgtgcttttgccgcctgcctggagcgaaaacagcgacgggagaaggaatgtggggtcacggccgccttcgatgccagccgcaccagcttcgcccgcgagggctccttccgcctgtctgggggtgggcggcctgctgagcgagaggccccggacaagaagaaagcagaggcagcagctgcccccactgtggctcctggccctgcccagcctgggcacgtgtccccgacaccagccaccacatcccctggtgagaagggtgaggcaggcacccctgtggctgcaggcaccactgcggccgccatcccccggcgccatgcacccctggagcagctggttcgccagggctccttccgtgggttcccagcactcagccagaagaactcgcctttcaaacggcagctgagcctacggctgaatgagctgccatccacgctgcagcgccgcactgacttccaggtgaagggcacagtgcctgagatggagcctcctggtgccggcgacagtgacagcatcaacgctctgtgcacacagatcagttcatcttttgccagtgctggagcgccagcaccagggccaccacctgccacaacagggacttctgcctggggtgagccctccgtgccccctgcagctgccttccagcctgggcacaagcggacaccttcagaggctgagcgatggctggaggaggtgtcacaggtggccaaggcccagcagcagcagcagcagcaacagcaacagcagcagcagcagcagcagcaacagcagcaagcagcctcagtggccccagtgcccaccatgcctcctgccctgcagcctttccccgcccccgtggggccctttgacgctgcacctgcccaagtggccgtgttcctgccacccccacacatgcagcccccttttgtgcccgcctacccgggcttgggctacccaccgatgccccgggtgcccgtggtgggcatcacaccctcacagatggtggcaaacgccttctgctcagccgcccagctccagcctcagcctgccactctgcttgggaaagctggggccttcccgccccctgccatacccagtgcccctgggagccaggcccgccctcgccccaatggggccccctggccccctgagccagcgcctgccccagctccagagttggacccctttgaggcccagtgggcggcattagaaggcaaagccactgtagagaaaccctccaaccccttttctggcgacctgcaaaagacattcgagattgaactgtagcccgagccgccccacccactccatcatctccaggtgccccacgcctgggggtggaggcacaacctctcccctaaccctgctccctggggctgcgcccctcaacaccctctcaacacccccctccctcaaccaccccgacaaccactacagaaccaacattgtgacgcccaggttgcaacaggatggaattcagggacggacccagcctggctaagggaaccatttcactgccggacttaggctggcaatgcccccttccccaaccccagacacaggggttggccacaatcccactgaatgcccttggttcacactccatttcccagtttctgttgacccccaccttccagtgttggacaggatggaggggggacacttgcttaggggctctcctgggccccacaccagtgcccaccccaaatctggtcgtctcctccccccatgcacagcacaagctaagggctgccctctgcccacacgctgcgttcactgccaatgctgtactcacctccatcaccctccaactttggggcccatgtcttccttgggccaaggtctcatgggggctagggccaagttgggggcccaggaggcggggagggaggaggaggagaagatgcgcagttacctcatgtcggtgcccgctggggaggggtccgggaagaaggggaaggggtgcctggcgggtacttttctatcttttatttccagattttttttgtatctaaacttgaagatttgtattatacaaggacagccaataaaggaagaatataatggtgaaacaaacanaaaaggacaaaaaaaagaaacccgggggtttttgcgggggggaaaaaaggttaaaagggcacggtgcatgcttttccgcacccttttttaaaaggggaatgcggtcccaaagggggtaaatgaacgga

SEQ ID NO: 455832 - DNA, 3568 bp, Homo sapiens
aacggaatcctcccgggagccgaggaggctcgcgcgcgtgcatcccgcaccatcccccggccccgggccctggccggcgtcagaccgagctgccgccgccaccaccgcagcagcagcagtcggggagccaggcccagccagggccgcgggaggcgggggcgcccgggccctggatgtcccgcagcgcggcggccagcggcggaccccggaggcctgagcggcacctgcccccagccccctgtggggccccggggcccccagaaacctgcaggacggagccagacggggcgggcaccatgaacaagttacggcagagcctgcggcggaggaagccagcctacgtgcccgaggcgtcgcgcccgcaccagtggcaggcagacgaggacgcggtgcggaagggcacgtgcagcttcccggtcaggtacctgggtcacgtggaggtagaggagtcccggggaatgcacgtgtgtgaagatgcggtgaagaagctgaaggcgatgggccgaaagtccgtgaagtctgtcctgtgggtgtcagccgatgggctccgagtggtggacgacaaaaccaaggatcttctggtcgaccagaccatcgaaaaggtctccttttgtgctcctgaccgcaacctggacaaggctttctcctatatctgtcgtgacgggactacccgccgctggatctgccactgttttctggcactgaaggactccggcgagaggctgagccacgctgtgggctgtgcttttgccgcctgcctggagcgaaaacagcgacgggagaaggaatgtggggtcacggccgccttcgatgccagccgcaccagcttcgcccgcgagggctccttccgcctgtctgggggtgggcggcctgctgagcgagaggccccggacaagaagaaagcagaggcagcagctgcccccactgtggctcctggccctgcccagcctgggcacgtgtccccgacaccagccaccacatcccctggtgagaagggtgaggcaggcacccctgtggctgcaggcaccactgcggccgccatcccccggcgccatgcacccctggagcagctggttcgccagggctccttccgtgggttcccagcactcagccagaagaactcgcctttcaaacggcagctgagcctacggctgaatgagctgccatccacgctgcagcgccgcactgacttccaggtgaagggcacagtgcctgagatggagcctcctggtgccggcgacagtgacagcatcaacgctctgtgcacacagatcagttcatcttttgccagtgctggagcgccagcaccagggccaccacctgccacaacagggacttctgcctggggtgagccctccgtgccccctgcagctgccttccagcctgggcacaagcggacaccttcagaggctgagcgatggctggaggaggtgtcacaggtggccaaggcccagcagcagcagcagcagcaacagcaacagcagcagcagcagcagcagcaacagcagcaagcagcctcagtggccccagtgcccaccatgcctcctgccctgcagcctttccccgcccccgtggggccctttgacgctgcacctgcccaagtggccgtgttcctgccacccccacacatgcagcccccttttgtgcccgcctacccgggcttgggctacccaccgatgccccgggtgcccgtggtgggcatcacaccctcacagatggtggcaaacgccttctgctcagccgcccagctccagcctcagcctgccactctgcttgggaaagctggggccttcccgccccctgccatacccagtgcccctgggagccaggcccgccctcgccccaatggggccccctggccccctgagccagcgcctgccccagctccagagttggacccctttgaggcccagtgggcggcattagaaggcaaagccactgtagagaaaccctccaaccccttttctggcgacctgcaaaagacattcgagattgaactgtagcccgagccgccccacccactccatcatctccaggtgccccacgcctgggggtggaggcacaacctctcccctaaccctgctccctggggctgcgcccctcaacaccctctcaacacccccctccctcaaccaccccgacaaccactacagaaccaacattgtgacgcccaggttgcaacaggatggaattcagggacggacccagcctggctaagggaaccatttcactgccggacttaggctggcaatgcccccttccccaaccccagacacaggggttggccacaatcccactgaatgcccttggttcacactccatttcccagtttctgttgacccccaccttccagtgttggacaggatggaggggggacacttgcttaggggctctcctgggccccacaccagtgcccaccccaaatctggtcgtctcctccccccatgcacagcacaagctaagggctgccctctgcccacacgctgcgttcactgccaatgctgtactcacctccatcaccctccaactttggggcccatgtcttccttgggccaaggtctcatgggggctagggccaagttgggggcccaggaggcggggagggaggaggaggagaagatgcgcagttacctcatgtcggtgcccgctggggaggggtccgggaagaaggggaaggggtgcctggcgggtacttttctatcttttatttccagattttttttgtatctaaacttgaagatttgtattatacaaggacagccaataaaggaagaatataatggtgcccctcgggaaacgagggtgtgtgtagggcgctggtgaggccctagaacctttcctcctgagtcatggactgaaacagagtcagaaggatgtccctgagtgataacctctgagtcatagcgtggtaacaggtaccactgactcagcacctgccaggcgggtattaaaggagccaaaattaatcaccccatttctattccttacagagttagaatcaaggaataaaaaacaaatattatgaactgctggctgggcacagtggctcacgcctgtaatcccagcactttgggaggtcgaggcaggcagatcacttaaggtcaggagttcgagaccagcctggccgccatggagaaacccagtctctaccaaaaattcaaaaattagccgggcgtggtggcaggcgcctgtaattccaggaggctgaggcacaagaatcgcttgaacccgggcagcagaggttgcagtgacctgaggtcacaccattgcactcctgcctgggcaacagaatgagactctgtctcaaaaaaaaaaaaacaaaaaaaaaaaaactacttctaattagctcaatattaatattttaacaagttgggttggtaacagtatatctttgcccatgctggcaaattcttgttttgtcagcattttccataactctggccaaagtgtcacctgatgtggcaacgttttacagtcttgctattgtttcttgagtcctttaatctataagatgtatttttaaaaatatataacatataaattttgtttcgttatagctctttaaaat

SEQ ID NO: 455833 - DNA, 2579 bp, Homo sapiens
aacggaatcctcccgggagccgaggaggctcgcgcgcgtgcatcccgcaccatcccccggccccgggccctggccggcgtcagaccgagctgccgccgccaccaccgcagcagcagcagtcggggagccaggcccagccagggccgcgggaggcgggggcgcccgggccctggatgtcccgcagcgcggcggccagcggcggaccccggaggcctgagcggcacctgcccccagccccctgtggggccccggggcccccagaaacctgcaggacggagccagacggggcgggcaccatgaacaagttacggcagagcctgcggcggaggaagccagcctacgtgcccgaggcgtcgcgcccgcaccagtggcaggcagacgaggacgcggtgcggaagggcacgtgcagcttcccggtcaggtacctgggtcacgtggaggtagaggagtcccggggaatgcacgtgtgtgaagatgcggtgaagaagctgaaggcgatgggccgaaagtccgtgaagtctgtcctgtgggtgtcagccgatgggctccgagtggtggacgacaaaaccaaggatcttctggtcgaccagaccatcgaaaaggtctccttttgtgctcctgaccgcaacctggacaaggctttctcctatatctgtcgtgacgggactacccgccgctggatctgccactgttttctggcactgaaggactccggcgagaggctgagccacgctgtgggctgtgcttttgccgcctgcctggagcgaaaacagcgacgggagaaggaatgtggggtcacggccgccttcgatgccagccgcaccagcttcgcccgcgagggctccttccgcctgtctgggggtgggcggcctgctgagcgagaggccccggacaagaagaaagcagaggcagcagctgcccccactgtggctcctggccctgcccagcctgggcacgtgtccccgacaccagccaccacatcccctggtgagaagggtgaggcaggcacccctgtggctgcaggcaccactgcggccgccatcccccggcgccatgcacccctggagcagctggttcgccagggctccttccgtgggttcccagcactcagccagaagaactcgcctttcaaacggcagctgagcctacggctgaatgagctgccatccacgctgcagcgccgcactgacttccaggtgaagggcacagtgcctgagatggagcctcctggtgccggcgacagtgacagcatcaacgctctgtgcacacagatcagttcatcttttgccagtgctggagcgccagcaccagggccaccacctgccacaacagggacttctgcctggggtgagccctccgtgccccctgcagctgccttccagcctgggcacaagcggacaccttcagaggctgagcgatggctggaggaggtgtcacaggtggccaaggcccagcagcagcagcagcagcaacagcaacagcagcagcagcagcagcagcaacagcagcaagcagcctcagtggccccagtgcccaccatgcctcctgccctgcagcctttccccgcccccgtggggccctttgacgctgcacctgcccaagtggccgtgttcctgccacccccacacatgcagcccccttttgtgcccgcctacccgggcttgggctacccaccgatgccccgggtgcccgtggtgggcatcacaccctcacagatggtggcaaacgccttctgctcagccgcccagctccagcctcagcctgccactctgcttgggaaagctggggccttcccgccccctgccatacccagtgcccctgggagccaggcccgccctcgccccaatggggccccctggccccctgagccagcgcctgccccagctccagagttggacccctttgaggcccagtgggcggcattagaaggcaaagccactgtagagaaaccctccaaccccttttctggcgacctgcaaaagacattcgagattgaactgtagcccgagccgccccacccactccatcatctccaggtgccccacgcctgggggtggaggcacaacctctcccctaaccctgctccctggggctgcgcccctcaacaccctctcaacacccccctccctcaaccaccccgacaaccactacagaaccaacattgtgacgcccaggttgcaacaggatggaattcagggacggacccagcctggctaagggaaccatttcactgccggacttaggctggcaatgcccccttccccaaccccagacacaggggttggccacaatcccactgaatgcccttggttcacactccatttcccagtttctgttgacccccaccttccagtgttggacaggatggaggggggacacttgcttaggggcggggagggaggaggaggagaagatgcgcagttacctcatgtcggtgcccgctggggaggggtccgggaagaaggggaaggggtgcctggcgggtacttttctatcttttatttccagattttttttgtatctaaacttgaagatttgtattatacaaggacagccaataaaggaagaatataatggtg

SEQ ID NO: 455834 - DNA, 2009 bp, Homo sapiens
  misc_feature (2002)..(2003): n is a, c, g, or t
  misc_feature (2006)..(2006): n is a, c, g, or t
aacggaatcctcccgggagccgaggaggctcgcgcgcgtgcatcccgcaccatcccccggccccgggccctggccggcgtcagaccgagctgccgccgccaccaccgcagcagcagcagtcggggagccaggcccagccagggccgcgggaggcgggggcgcccgggccctggatgtcccgcagcgcggcggccagcggcggaccccggaggcctgagcggcacctgcccccagccccctgtggggccccggggcccccagaaacctgcaggacggagccagacggggcgggcaccatgaacaagttacggcagagcctgcggcggaggaagccagcctacgtgcccgaggcgtcgcgcccgcaccagtggcaggcagacgaggacgcggtgcggaagggcacgtgcagcttcccggtcaggtacctgggtcacgtggaggtagaggagtcccggggaatgcacgtgtgtgaagatgcggtgaagaagctgaaggcgatgggccgaaagtccgtgaagtctgtcctgtgggtgtcagccgatgggctccgagtggtggacgacaaaaccaaggatcttctggtcgaccagaccatcgaaaaggtctccttttgtgctcctgaccgcaacctggacaaggctttctcctatatctgtcgtgacgggactacccgccgctggatctgccactgttttctggcactgaaggactccggcgagaggctgagccacgctgtgggctgtgcttttgccgcctgcctggagcgaaaacagcgacgggagaaggaatgtggggtcacggccgccttcgatgccagccgcaccagcttcgcccgcgagggctccttccgcctgtctgggggtgggcggcctgctgagcgagaggccccggacaagaagaaagcagaggcagcagctgcccccactgtggctcctggccctgcccagcctgggcacgtgtccccgacaccagccaccacatcccctggtgagaagggtgaggcaggcacccctgtggctgcaggcaccactgcggccgccatcccccggcgccatgcacccctggagcagctggttcgccagggctccttccgtgggttcccagcactcagccagaagaactcgcctttcaaacggcagctgagcctacggctgaatgagctgccatccacgctgcagcgccgcactgacttccaggtgaagggcacagtgcctgagatggagcctcctggtgccggcgacagtgacagcatcaacgctctgtgcacacagatcagttcatcttttgccagtgctggagcgccagcaccagggccaccacctgccacaacagggacttctgcctggggtgagccctccgtgccccctgcagctgccttccagcctgggcacaagcggacaccttcagaggctgagcgatggctggaggaggtgtcacaggtggccaaggcccagcagcagcagcagcagcaacagcaacagcagcagcagcagcagcagcaacagcagcaagcagcctcagtggccccagtgcccaccatgcctcctgccctgcagcctttccccgcccccgtggggccctttgacgctgcacctgcccaagtggccgtgttcctgccacccccacacatgcagcccccttttgtgcccgcctacccgggcttgggctacccaccgatgccccgggtgcccgtggtgggcatcacaccctcacagatggtggcaaacgccttctgctcagccgcccagctccagcctcagcctgccactctgcttgggaaagctggggccttcccgccccctgccatacccagtgcccctgggagccaggcccgccctcgccccaatggggccccctggccccctgagccagcgcctgccccagctccagagttggacccctttgaggcccagtgggcggcattagaaggcaaagccactgtagagaaagccgctttccccctttccctccccttcaagcaccgcttgagatttggactttnntantag

SEQ ID NO: 455835 - DNA, 2702 bp, Homo sapiens
tccccccaatttccaccgcggccaattcatggacaggaactaccccagcgccggcttcggggacccgctcggcgccggggcgggatggagttacgagaggtcagcgaaagctagggcggaccccggaggcctgagcggcacctgcccccagccccctgtggggccccggggcccccagaaacctgcaggacggagccagacggggcgggcaccatgaacaagttacggcagagcctgcggcggaggaagccagcctacgtgcccgaggcgtcgcgcccgcaccagtggcaggcagacgaggacgcggtgcggaagggcacgtgcagcttcccggtcaggtacctgggtcacgtggaggtagaggagtcccggggaatgcacgtgtgtgaagatgcggtgaagaagctgaaggcgatgggccgaaagtccgtgaagtctgtcctgtgggtgtcagccgatgggctccgagtggtggacgacaaaaccaaggatcttctggtcgaccagaccatcgaaaaggtctccttttgtgctcctgaccgcaacctggacaaggctttctcctatatctgtcgtgacgggactacccgccgctggatctgccactgttttctggcactgaaggactccggcgagaggctgagccacgctgtgggctgtgcttttgccgcctgcctggagcgaaaacagcgacgggagaaggaatgtggggtcacggccgccttcgatgccagccgcaccagcttcgcccgcgagggctccttccgcctgtctgggggtgggcggcctgctgagcgagaggccccggacaagaagaaagcagaggcagcagctgcccccactgtggctcctggccctgcccagcctgggcacgtgtccccgacaccagccaccacatcccctggtgagaagggtgaggcaggcacccctgtggctgcaggcaccactgcggccgccatcccccggcgccatgcacccctggagcagctggttcgccagggctccttccgtgggttcccagcactcagccagaagaactcgcctttcaaacggcagctgagcctacggctgaatgagctgccatccacgctgcagcgccgcactgacttccaggtgaagggcacagtgcctgagatggagcctcctggtgccggcgacagtgacagcatcaacgctctgtgcacacagatcagttcatcttttgccagtgctggagcgccagcaccagggccaccacctgccacaacagggacttctgcctggggtgagccctccgtgccccctgcagctgccttccagcctgggcacaagcggacaccttcagaggctgagcgatggctggaggaggtgtcacaggtggccaaggcccagcagcagcagcagcagcaacagcaacagcagcagcagcagcagcagcaacagcagcaagcagcctcagtggccccagtgcccaccatgcctcctgccctgcagcctttccccgcccccgtggggccctttgacgctgcacctgcccaagtggccgtgttcctgccacccccacacatgcagcccccttttgtgcccgcctacccgggcttgggctacccaccgatgccccgggtgcccgtggtgggcatcacaccctcacagatggtggcaaacgccttctgctcagccgcccagctccagcctcagcctgccactctgcttgggaaagctggggccttcccgccccctgccatacccagtgcccctgggagccaggcccgccctcgccccaatggggccccctggccccctgagccagcgcctgccccagctccagagttggacccctttgaggcccagtgggcggcattagaaggcaaagccactgtagagaaaccctccaaccccttttctggcgacctgcaaaagacattcgagattgaactgtagcccgagccgccccacccactccatcatctccaggtgccccacgcctgggggtggaggcacaacctctcccctaaccctgctccctggggctgcgcccctcaacaccctctcaacacccccctccctcaaccaccccgacaaccactacagaaccaacattgtgacgcccaggttgcaacaggatggaattcagggacggacccagcctggctaagggaaccatttcactgccggacttaggctggcaatgcccccttccccaaccccagacacaggggttggccacaatcccactgaatgcccttggttcacactccatttcccagtttctgttgacccccaccttccagtgttggacaggatggaggggggacacttgcttaggggctctcctgggccccacaccagtgcccaccccaaatctggtcgtctcctccccccatgcacagcacaagctaagggctgccctctgcccacacgctgcgttcactgccaatgctgtactcacctccatcaccctccaactttggggcccatgtcttccttgggccaaggtctcatgggggctagggccaagttgggggcccaggaggcggggagggaggaggaggagaagatgcgcagttacctcatgtcggtgcccgctggggaggggtccgggaagaaggggaaggggtgcctggcgggtacttttctatcttttatttccagattttttttgtatctaaacttgaagatttgtattatacaaggacagccaataaaggaagaatataatggtg

SEQ ID NO: 455836 - DNA, 2785 bp, Homo sapiens
aacggaatcctcccgggagccgaggaggctcgcgcgcgtgcatcccgcaccatcccccggccccgggccctggccggcgtcagaccgagctgccgccgccaccaccgcagcagcagcagtcggggagccaggcccagccagggccgcgggaggcgggggcgcccgggccctggatgtcccgcagcgcggcggccagcggcggaccccggaggcctgagcggcacctgcccccagccccctgtggggccccggggcccccagaaacctgcaggacggagccagacggggcgggcaccatgaacaagttacggcagagcctgcggcggaggaagccagcctacgtgcccgaggcgtcgcgcccgcaccagtggcaggcagacgaggacgcggtgcggaagggcacgtgcagcttcccggtcaggtacctgggtcacgtggaggtagaggagtcccggggaatgcacgtgtgtgaagatgcggtgaagaagctgaaggcgatgggccgaaagtccgtgaagtctgtcctgtgggtgtcagccgatgggctccgagtggtggacgacaaaaccaaggatcttctggtcgaccagaccatcgaaaaggtctccttttgtgctcctgaccgcaacctggacaaggctttctcctatatctgtcgtgacgggactacccgccgctggatctgccactgttttctggcactgaaggactccggcgagaggctgagccacgctgtgggctgtgcttttgccgcctgcctggagcgaaaacagcgacgggagaaggaatgtggggtcacggccgccttcgatgccagccgcaccagcttcgcccgcgagggctccttccgcctgtctgggggtgggcggcctgctgagcgagaggccccggacaagaagaaagcagaggcagcagctgcccccactgtggctcctggccctgcccagcctgggcacgtgtccccgacaccagccaccacatcccctggtgagaagggtgaggcaggcacccctgtggctgcaggcaccactgcggccgccatcccccggcgccatgcacccctggagcagctggttcgccagggctccttccgtgggttcccagcactcagccagaagaactcgcctttcaaacggcagctgagcctacggctgaatgagctgccatccacgctgcagcgccgcactgacttccaggtgaagggcacagtgcctgagatggagcctcctggtgccggcgacagtgacagcatcaacgctctgtgcacacagatcagttcatcttttgccagtgctggagcgccagcaccagggccaccacctgccacaacagggacttctgcctggggtgagccctccgtgccccctgcagctgccttccagcctgggcacaagcggacaccttcagaggctgagcgatggctggaggaggtgtcacaggtggccaaggcccagcagcagcagcagcagcaacagcaacagcagcagcagcagcagcagcaacagcagcaagcagcctcagtggccccagtgcccaccatgcctcctgccctgcagcctttccccgcccccgtggggccctttgacgctgcacctgcccaagtggccgtgttcctgccacccccacacatgcagcccccttttgtgcccgcctacccgggcttgggctacccaccgatgccccgggtgcccgtggtgggcatcacaccctcacagatggtggcaaacgccttctgctcagccgcccagctccagcctcagcctgccactctgcttgggaaagctggggccttcccgccccctgccatacccagtgcccctgggagccaggcccgccctcgccccaatggggccccctggccccctgagccagcgcctgccccagctccagagttggacccctttgaggcccagtgggcggcattagaaggcaaagccactgtagagaaaccctccaaccccttttctggcgacctgcaaaagacattcgagattgaactgtagcccgagccgccccacccactccatcatctccaggtgccccacgcctgggggtggaggcacaacctctcccctaaccctgctccctggggctgcgcccctcaacaccctctcaacacccccctccctcaaccaccccgacaaccactacagaaccaacattgtgacgcccaggttgcaacaggatggaattcagggacggacccagcctggctaagggaaccatttcactgccggacttaggctggcaatgcccccttccccaaccccagacacaggggttggccacaatcccactgaatgcccttggttcacactccatttcccagtttctgttgacccccaccttccagtgttggacaggatggaggggggacacttgcttaggggctctcctgggccccacaccagtgcccaccccaaatctggtcgtctcctccccccatgcacagcacaagctaagggctgccctctgcccacacgctgcgttcactgccaatgctgtactcacctccatcaccctccaactttggggcccatgtcttccttgggccaaggtctcatgggggctagggccaagttgggggcccaggaggcggggagggaggaggaggagaagatgcgcagttacctcatgtcggtgcccgctggggaggggtccgggaagaaggggaaggggtgcctggcgggtacttttctatcttttatttccagattttttttgtatctaaacttgaagatttgtattatacaaggacagccaataaaggaagaatataatggtg

SEQ ID NO: 455837 - DNA, 3549 bp, Homo sapiens
aacggaatcctcccgggagccgaggaggctcgcgcgcgtgcatcccgcaccatcccccggccccgggccctggccggcgtcagaccgagctgccgccgccaccaccgcagcagcagcagtcggggagccaggcccagccagggccgcgggaggcgggggcgcccgggccctggatgtcccgcagcgcggcggccagcggcggaccccggaggcctgagcggcacctgcccccagccccctgtggggccccggggcccccagaaacctgcaggacggagccagacggggcgggcaccatgaacaagttacggcagagcctgcggcggaggaagccagcctacgtgcccgaggcgtcgcgcccgcaccagtggcaggcagacgaggacgcggtgcggaagggcacgtgcagcttcccggtcaggtacctgggtcacgtggaggtagaggagtcccggggaatgcacgtgtgtgaagatgcggtgaagaagctgaaggcgatgggccgaaagtccgtgaagtctgtcctgtgggtgtcagccgatgggctccgagtggtggacgacaaaaccaaggatcttctggtcgaccagaccatcgaaaaggtctccttttgtgctcctgaccgcaacctggacaaggctttctcctatatctgtcgtgacgggactacccgccgctggatctgccactgttttctggcactgaaggactccggcgagaggctgagccacgctgtgggctgtgcttttgccgcctgcctggagcgaaaacagcgacgggagaaggaatgtggggtcacggccgccttcgatgccagccgcaccagcttcgcccgcgagggctccttccgcctgtctgggggtgggcggcctgctgagcgagaggccccggacaagaagaaagcagaggcagcagctgcccccactgtggctcctggccctgcccagcctgggcacgtgtccccgacaccagccaccacatcccctggtgagaagggtgaggcaggcacccctgtggctgcaggcaccactgcggccgccatcccccggcgccatgcacccctggagcagctggttcgccagggctccttccgtgggttcccagcactcagccagaagaactcgcctttcaaacggcagctgagcctacggctgaatgagctgccatccacgctgcagcgccgcactgacttccaggtgaagggcacagtgcctgagatggagcctcctggtgccggcgacagtgacagcatcaacgctctgtgcacacagatcagttcatcttttgccagtgctggagcgccagcaccagggccaccacctgccacaacagggacttctgcctggggtgagccctccgtgccccctgcagctgccttccagcctgggcacaagcggacaccttcagaggctgagcgatggctggaggaggtgtcacaggtggccaaggcccagcagcagcagcagcagcaacagcaacagcagcagcagcagcagcagcaacagcagcaagcagcctcagtggccccagtgcccaccatgcctcctgccctgcagcctttccccgcccccgtggggccctttgacgctgcacctgcccaagtggccgtgttcctgccacccccacacatgcagcccccttttgtgcccgcctacccgggcttgggctacccaccgatgccccgggtgcccgtggtgggcatcacaccctcacagatggtggcaaacgccttctgctcagccgcccagctccagcctcagcctgccactctgcttgggaaagctggggccttcccgccccctgccatacccagtgcccctgggagccaggcccgccctcgccccaatggggccccctggccccctgagccagcgcctgccccagctccagagttggacccctttgaggcccagtgggcggcattagaaggcaaagccactgtagagaaaccctccaaccccttttctggcgacctgcaaaagacattcgagattgaactgtagcccgagccgccccacccactccatcatctccaggtgccccacgcctgggggtggaggcacaacctctcccctaaccctgctccctggggctgcgcccctcaacaccctctcaacacccccctccctcaaccaccccgacaaccactacagaaccaacattgtgacgcccaggttgcaacaggatggaattcagggacggacccagcctggctaagggaaccatttcactgccggacttaggctggcaatgcccccttccccaaccccagacacaggggttggccacaatcccactgaatgcccttggttcacactccatttcccagtttctgttgacccccaccttccagtgttggacaggatggaggggggacacttgcttaggggctctcctgggccccacaccagtgcccaccccaaatctggtcgtctcctccccccatgcacagcacaagctaagggctgccctctgcccacacgctgcgttcactgccaatgctgtactcacctccatcaccctccaactttggggcccatgtcttccttgggccaaggtctcatgggggctagggccaagttgggggcccaggaggcggggagggaggaggaggagaagatgcgcagttacctcatgtcggtgcccgctggggaggggtccgggaagaaggggaaggggtgcctggcgggtacttttctatcttttatttccagattttttttgtatctaaacttgaagatttgtattatacaaggacagccaataaaggaagaatataatggtgcccctcgggaaacgagggtgtgtgtagggcgctggtgaggccctagaacctttcctcctgagtcatggactgaaacagagtcagaaggatgtccctgagtgataacctctgagtcatagcgtggtaacaggtaccactgactcagcacctgccaggcgggtattaaaggagccaaaattaatcaccccatttctattccttacagagttagaatcaaggaataaaaaacaaatattatgaactgctggctgggcacagtggctcacgcctgtaatcccagcactttgggaggtcgaggcaggcagatcacttaaggtcaggagttcgagaccagcctggccgccatggagaaacccagtctctaccaaaaattcaaaaattagccgggcgtggtggcaggcgcctgtaattccaggaggctgaggcacaagaatcgcttgaacccgggcagcagaggttgcagtgacctgaggtcacaccattgcactcctgcctgggcaacagaatgagactctgtctcaaaaaaaaatacttctaattagctcaatattaatattttaacaagttgggttggtaacagtatatctttgcccatgctggcaaattcttgttttgtcagcattttccataactctggccaaagtgtcacctgatgtggcaacgttttacagtcttgctattgtttcttgagtcctttaatctataagatgtatttttaaaaatatataacatataaattttgtttcgttatagctctttaaaat

SEQ ID NO: 455838 - DNA, 2623 bp, Homo sapiens
agcgggcggtgacggtgacggcggctttgtgtgtgggcggaccccggaggcctgagcggcacctgcccccagccccctgtggggccccggggcccccagaaacctgcaggacggagccagacggggcgggcaccatgaacaagttacggcagagcctgcggcggaggaagccagcctacgtgcccgaggcgtcgcgcccgcaccagtggcaggcagacgaggacgcggtgcggaagggcacgtgcagcttcccggtcaggtacctgggtcacgtggaggtagaggagtcccggggaatgcacgtgtgtgaagatgcggtgaagaagctgaaggcgatgggccgaaagtccgtgaagtctgtcctgtgggtgtcagccgatgggctccgagtggtggacgacaaaaccaaggatcttctggtcgaccagaccatcgaaaaggtctccttttgtgctcctgaccgcaacctggacaaggctttctcctatatctgtcgtgacgggactacccgccgctggatctgccactgttttctggcactgaaggactccggcgagaggctgagccacgctgtgggctgtgcttttgccgcctgcctggagcgaaaacagcgacgggagaaggaatgtggggtcacggccgccttcgatgccagccgcaccagcttcgcccgcgagggctccttccgcctgtctgggggtgggcggcctgctgagcgagaggccccggacaagaagaaagcagaggcagcagctgcccccactgtggctcctggccctgcccagcctgggcacgtgtccccgacaccagccaccacatcccctggtgagaagggtgaggcaggcacccctgtggctgcaggcaccactgcggccgccatcccccggcgccatgcacccctggagcagctggttcgccagggctccttccgtgggttcccagcactcagccagaagaactcgcctttcaaacggcagctgagcctacggctgaatgagctgccatccacgctgcagcgccgcactgacttccaggtgaagggcacagtgcctgagatggagcctcctggtgccggcgacagtgacagcatcaacgctctgtgcacacagatcagttcatcttttgccagtgctggagcgccagcaccagggccaccacctgccacaacagggacttctgcctggggtgagccctccgtgccccctgcagctgccttccagcctgggcacaagcggacaccttcagaggctgagcgatggctggaggaggtgtcacaggtggccaaggcccagcagcagcagcagcagcaacagcaacagcagcagcagcagcagcagcaacagcagcaagcagcctcagtggccccagtgcccaccatgcctcctgccctgcagcctttccccgcccccgtggggccctttgacgctgcacctgcccaagtggccgtgttcctgccacccccacacatgcagcccccttttgtgcccgcctacccgggcttgggctacccaccgatgccccgggtgcccgtggtgggcatcacaccctcacagatggtggcaaacgccttctgctcagccgcccagctccagcctcagcctgccactctgcttgggaaagctggggccttcccgccccctgccatacccagtgcccctgggagccaggcccgccctcgccccaatggggccccctggccccctgagccagcgcctgccccagctccagagttggacccctttgaggcccagtgggcggcattagaaggcaaagccactgtagagaaaccctccaaccccttttctggcgacctgcaaaagacattcgagattgaactgtagcccgagccgccccacccactccatcatctccaggtgccccacgcctgggggtggaggcacaacctctcccctaaccctgctccctggggctgcgcccctcaacaccctctcaacacccccctccctcaaccaccccgacaaccactacagaaccaacattgtgacgcccaggttgcaacaggatggaattcagggacggacccagcctggctaagggaaccatttcactgccggacttaggctggcaatgcccccttccccaaccccagacacaggggttggccacaatcccactgaatgcccttggttcacactccatttcccagtttctgttgacccccaccttccagtgttggacaggatggaggggggacacttgcttaggggctctcctgggccccacaccagtgcccaccccaaatctggtcgtctcctccccccatgcacagcacaagctaagggctgccctctgcccacacgctgcgttcactgccaatgctgtactcacctccatcaccctccaactttggggcccatgtcttccttgggccaaggtctcatgggggctagggccaagttgggggcccaggaggcggggagggaggaggaggagaagatgcgcagttacctcatgtcggtgcccgctggggaggggtccgggaagaaggggaaggggtgcctggcgggtacttttctatcttttatttccagattttttttgtatctaaacttgaagatttgtattatacaaggacagccaataaaggaagaatataatggtg

SEQ ID NO: 455839 - DNA, 519 bp, Homo sapiens
tatctaaccatccatctcccccatgtctccagcagaggcagcagctgcccccactgtggctcctggccctgcccagcctgggcacgtgtccccgacaccagccaccacatcccctggtgagaagggtgaggcaggcacccctgtggctgcaggcaccactgcggccgccatcccccggcgccatgcacccctggagcagctggttcgccagggctccttccgtgggttcccagcactcagccagaagaactcgcctttcaaacggcagctgagcctacggctgaatgagctgccatccacgctgcagcgccgcactgacttccaggtgaagggcacaggtgagccctgggcccagtgggaaacggcgttggaatcaattggcactatctgatgtgggcaagggatggaggcgagatggttcacactgtgattgatttgcactgtctgccatgggcaaaggagagagagtgggaacatgtcatgatcgattagcagtgggcaagggagaggaaagagata

SEQ ID NO: 455840 - DNA, 3153 bp, Homo sapiens
acgcatgcacgcacgcacgcacgcggcggccggcggggccgcaggctcgcgcccgggctcgccccgcgccgctccagaggctcgcgcactcagcaggttgggctgcggcggcggcggcagctgtggaagctcaggcgctgcgcgtgagaggtcccagatacgtctgcggttccggctccgccaccctcagcttctcttccccaggtctgggagccgagtgcggaaggagggaacggccctagctttgggaagccagaggacacccctggctcctgccgacaccgccctccttcccttcccagccgcgggcctcgctcggtgctaggctactctgccgggaggcggcggcggctgccagtctgtggagagtcctgctgccctccagccgggctcctccaccgggccttgcaggggccgagagagctcggtgcccgcccttccgctcgcctttttcgtcagctggctggagcagcatcggtccgggaggtctctaggctgaggcggcggccgctcctctagttccacaatgtccacgggcggagacttcgggaatccgctgaggaaattcaagctggtgttcctgggggagcaaagcgttggaaagacatctttgatcaccagattcatgtatgacagttttgacaacacctatcaggcaacaattggcattgactttttatcaaaaactatgtacttggaggatcgaacagtacgattgcaattatgggacacagcaggtcaagagcggttcaggagcttgattcctagctacattcgtgactccactgtggcagttgttgtttatgatatcacaaatgttaactcattccagcaaactacaaagtggattgatgatgtcagaacagaaagaggaagtgatgttatcatcatgctagtaggaaataaaacagatcttgctgacaagaggcaagtgtcaattgaggagggagagaggaaagccaaagagctgaatgttatgtttattgaaactagtgcaaaagctggatacaatgtaaagcagctctttcgacgtgtagcagcagctttgccgggaatggaaagcacacaggacagaagcagagaagatatgattgacataaaactggaaaagcctcaggagcaaccagtcagtgaaggaggctgttcctgctaatctcccatgtcatcttcaaccttcttcagaagctcactgctttggcccccttactctttcattgactgcagtgtgaatattggcttgaaccttttcccttcagtaataacgtattgcaattcatcattgctgcctgtctcgtggagatgatctattagcttcacaagcacaacaaaagtcagtgtcttcattatttatattttacaaaaagccaaaatatttcagcatattccagtgataactttaaaaattagatacattttcttaacatttttttcttttttaatgttatgataatgtacttcaaaatgatggaaatctcaacagtatgagtatggcttggttaacgagcggtatgttcacagcctactttatctctccttgcttttctcacctctcacttacccccattccctattaccctattcttacctagcctcccccgacttcctcaaaacaaacaagagatggcaaagcagcagttctaccaagcccattggaattatcctttaattttacagataccacttgctgtaggctacggaccaagatgtccaaaattattcttgagcactgataaaaattacggtcttctttgaggtcaaaattcagccatcatggtaggcagtgcttgaatgagaaaaggctcctggtgcatcttcaaaatgagtcctaaagaacatactgagtacttagaagtagaagaacataagatgtatttctgactaaaacaaatggctctttcacatgtgctttattagactctgggagagaaaattaaccaagtgcttcagaacaggtttttagtatttaattcttcacggtaagaaaatgaagttctaatgaactgtttctcccaaggttttaaaattgtcaagagttattctgtttgtttaaaaaataagaaacctctttaagcaatagatttgcttgggttttcttttttaaaaacataatactgtgcaggcaaggcactgtaaaagttttaattccttccagaagaaccagtggaagaatttaaatttggcgctacgatcaaaactactgaattagtagaaataatgatgtctaaagcttaccaacaaaagaaccctcagcagaataacaaaaactttgctcaggacatttgaggtcaaattgaagacggaaaccggaaaccgttttcttgtaagcccctagaggcagatcaggtaaagcatacatagtagagggaaaggagagaatggaaataaaactcaatattatgcagatttatgccttattttttagcattttttaaggttgggtctttcaggctggttttggtttgtattagatctgtatagtttaattaactggtgatttagttttatatttaagctacaattaatcttttttctttggtgatatttatttctttgccttttttttttttaacaactttcaatcttcagatgtttcgttgaatctatttagagcttcaccatggcaatatgtatttcccttaaaacactgcaaacaaatatactaggagtgtgcccttttaatctttactagttattgtgagattgctgtgtaagctaataaacacatttgtaaatacattgtttgcaggacgaaaacttctgagttacagctcaggaaaagcctgctgaatttatgttgtaagcattacttaacacagtataaagatgaaaagacaacaaaaatatcttcatacttcctcatcccctcattggaacaaaaccttaaactgggagaaccttagtcccctctctttcctcttcctcctccacttcccacttattgtcaccttgtaatattcagagagcacttggattatggatctgaatagagaaatgcttacagataatcattagcccacataccagtaactatacttaaagatgggatggagttgtaaagtgcttttataatacaatataattgttaaaggcaagggttgactctttgttttattttgacatggcatgtcctgaaataaatattgattcaatatg

SEQ ID NO: 455841 - DNA, 613 bp, Homo sapiens
ctggagtgcagtgatgtggtggcctaataatggcctgctgcagcctcaacattcctgggctcgagcatcctcaagctattaagtttgtaaaagtaaaaaaattacaggatgagcccagtcaagtgaaagcaaatcagtaacaaaaaaaagtctttaaaaaaatgttaagtatacacacacagaaacacacaaatttcaagagtgtggcagattaatgaatttttaaactaatgtgacctgtataaccagtccttatatcaaggaaagttattttcagagctttctttataatctttataatactgcctcatgtctcaaaagtaagaagtttgtttgtttctttacaggcaagtgtcaattgaggagggagagaggaaagccaaagagctgaatgttatgtttattgaaactagtgcaaaagctggatacaatgtaaagcaggtaagttgagttgaggttaccaaattgaaaaaatatgaaataattgtgtgagtattctattctctggtgtataggtttccttccacctggcaagagcaggccttacaaactagcagtatattttcaaacagtgaaaaatataaatgtggcatagtttttggaaaaagagaaa

SEQ ID NO: 455842 - DNA, 3387 bp, Homo sapiens
acgcatgcacgcacgcacgcacgcggcggccggcggggccgcaggctcgcgcccgggctcgccccgcgccgctccagaggctcgcgcactcagcaggttgggctgcggcggcggcggcagctgtggaagctcaggcgctgcgcgtgagaggtcccagatacgtctgcggttccggctccgccaccctcagcttctcttccccaggtctgggagccgagtgcggaaggagggaacggccctagctttgggaagccagaggacacccctggctcctgccgacaccgccctccttcccttcccagccgcgggcctcgctcggtgctaggctactctgccgggaggcggcggcggctgccagtctgtggagagtcctgctgccctccagccgggctcctccaccgggccttgcaggggccgagagagctcggtgcccgcccttccgctcgcctttttcgtcagctggctggagcagcatcggtccgggaggtctctaggctgaggcggcggccgctcctctagttccacaatgtccacgggcggagacttcgggaatccgctgaggaaattcaagctggtgttcctgggggagcaaagcgttggaaagacatctttgatcaccagattcatgtatgacagttttgacaacacctatcaggcaacaattggcattgactttttatcaaaaactatgtacttggaggatcgaacagtacgattgcaattatgggacacagcaggtcaagagcggttcaggagcttgattcctagctacattcgtgactccactgtggcagttgttgtttatgatatcacaaatgttaactcattccagcaaactacaaagtggattgatgatgtcagaacagaaagaggaagtgatgttatcatcatgctagtaggaaataaaacagatcttgctgacaagaggcaagtgtcaattgaggagggagagaggaaagccaaagagctgaatgttatgtttattgaaactagtgcaaaagctggatacaatgtaaagcagctctttcgacgtgtagcagcagctttgccgggaatggaaagcacacaggacagaagcagagaagatatgattgacataaaactggaaaagcctcaggagcaaccagtcagtgaaggaggctgttcctgctaatctcccatgtcatcttcaaccttcttcagaagctcactgctttggcccccttactctttcattgactgcagtgtgaatattggcttgaaccttttcccttcagtaataacgtattgcaattcatcattgctgcctgtctcgtggagatgatctattagcttcacaagcacaacaaaagtcagtgtcttcattatttatattttacaaaaagccaaaatatttcagcatattccagtgataactttaaaaattagatacattttcttaacatttttttcttttttaatgttatgataatgtacttcaaaatgatggaaatctcaacagtatgagtatggcttggttaacgagcggtatgttcacagcctactttatctctccttgcttttctcacctctcacttacccccattccctattaccctattcttacctagcctcccccgacttcctcaaaacaaacaagagatggcaaagcagcagttctaccaagcccattggaattatcctttaattttacagataccacttgctgtaggctacggaccaagatgtccaaaattattcttgagcactgataaaaattacggtcttctttgaggtcaaaattcagccatcatggtaggcagtgcttgaatgagaaaaggctcctggtgcatcttcaaaatgagtcctaaagaacatactgagtacttagaagtagaagaacataagatgtatttctgactaaaacaaatggctctttcacatgtgctttattagactctgggagagaaaattaaccaagtgcttcagaacaggtttttagtatttaattcttcacggtaagaaaatgaagttctaatgaactgtttctcccaaggttttaaaattgtcaagagttattctgtttgtttaaaaaataagaaacctctttaagcaatagatttgcttgggttttcttttttaaaaacataatactgtgcaggcaaggcactgtaaaagttttaattccttccagaagaaccagtggaagaatttaaatttggcgctacgatcaaaactactgaattagtagaaataatgatgtctaaagcttaccaacaaaagaaccctcagcagaataacaaaaactttgctcaggacatttgaggtcaaattgaagacggaaaccggaaaccgttttcttgtaagcccctagaggcagatcaggtaaagcatacatagtagagggaaaggagagaatggaaataaaactcaatattatgcagatttatgccttattttttagcattttttaaggttgggtctttcaggctggttttggtttgtattagatctgtatagtttaattaactggtgatttagttttatatttaagctacaattaatcttttttctttggtgatatttatttctttgccttttttttttttaacaactttcaatcttcagatgtttcgttgaatctatttagagcttcaccatggcaatatgtatttcccttaaaacactgcaaacaaatatactaggagtgtgcccttttaatctttactagttattgtgagattgctgtgtaagctaataaacacatttgtaaatacattgtttgcaggacgaaaacttctgagttacagctcaggaaaagcctgctgaatttatgttgtaagcattacttaacacagtataaagatgaaaagacaacaaaaatatcttcatacttcctcatcccctcattggaacaaaaccttaaactgggagaaccttagtcccctctctttcctcttcctcctccacttcccacttattgtcaccttgtaatattcagagagcacttggattatggatctgaatagagaaatgcttacagataatcattagcccacataccagtaactatacttaaagatgggatggagttgtaaagtgcttttataatacaatataattgttaaaggcaagggttgactctttgttttattttgacatggcatgtcctgaaataaatattgattcaatatgaaaaacaaaaccaacaccaacaacaacactttttgcggcgccgggccccgaaaaatttttcaaaccccttttggcgcgcggccccataggttacgcaaaacgcgcacacaggtgtccaaagaaaacaccggccaaacaagcgcgtggttctccccaaaaaaagacgcggggacccaacttttaaaacaccacagaggtccggggacaggggactcaacggaggccagagaccga

SEQ ID NO: 455843 - DNA, 3772 bp, Homo sapiens
acgcatgcacgcacgcacgcacgcggcggccggcggggccgcaggctcgcgcccgggctcgccccgcgccgctccagaggctcgcgcactcagcaggttgggctgcggcggcggcggcagctgtggaagctcaggcgctgcgcgtgagaggtcccagatacgtctgcggttccggctccgccaccctcagcttctcttccccaggtctgggagccgagtgcggaaggagggaacggccctagctttgggaagccagaggacacccctggctcctgccgacaccgccctccttcccttcccagccgcgggcctcgctcggtgctaggctactctgccgggaggcggcggcggctgccagtctgtggagagtcctgctgccctccagccgggctcctccaccgggccttgcaggggccgagagagctcggtgcccgcccttccgctcgcctttttcgtcagctggctggagcagcatcggtccgggaggtctctaggctgaggcggcggccgctcctctagttccacaatgtccacgggcggagacttcgggaatccgctgaggaaattcaagctggtgttcctgggggagcaaagcgttggaaagacatctttgatcaccagattcatgtatgacagttttgacaacacctatcaggcaacaattggcattgactttttatcaaaaactatgtacttggaggatcgaacagtacgattgcaattatgggacacagcaggtcaagagcggttcaggagcttgattcctagctacattcgtgactccactgtggcagttgttgtttatgatatcacaaatgttaactcattccagcaaactacaaagtggattgatgatgtcagaacagaaagaggaagtgatgttatcatcatgctagtaggaaataaaacagatcttgctgacaagaggcaagtgtcaattgaggagggagagaggaaagccaaagagctgaatgttatgtttattgaaactagtgcaaaagctggatacaatgtaaagcagctctttcgacgtgtagcagcagctttgccgggaatggaaagcacacaggacagaagcagagaagatatgattgacataaaactggaaaagcctcaggagcaaccagtcagtgaaggaggctgttcctgctaatctcccatgtcatcttcaaccttcttcagaagctcactgctttggcccccttactctttcattgactgcagtgtgaatattggcttgaaccttttcccttcagtaataacgtattgcaattcatcattgctgcctgtctcgtggagatgatctattagcttcacaagcacaacaaaagtcagtgtcttcattatttatattttacaaaaagccaaaatatttcagcatattccagtgataactttaaaaattagatacattttcttaacatttttttcttttttaatgttatgataatgtacttcaaaatgatggaaatctcaacagtatgagtatggcttggttaacgagcggtatgttcacagcctactttatctctccttgcttttctcacctctcacttacccccattccctattaccctattcttacctagcctcccccgacttcctcaaaacaaacaagagatggcaaagcagcagttctaccaagcccattggaattatcctttaattttacagataccacttgctgtaggctacggaccaagatgtccaaaattattcttgagcactgataaaaattacggtcttctttgaggtcaaaattcagccatcatggtaggcagtgcttgaatgagaaaaggctcctggtgcatcttcaaaatgagtcctaaagaacatactgagtacttagaagtagaagaacataagatgtatttctgactaaaacaaatggctctttcacatgtgctttattagactctgggagagaaaattaaccaagtgcttcagaacaggtttttagtatttaattcttcacggtaagaaaatgaagttctaatgaactgtttctcccaaggttttaaaattgtcaagagttattctgtttgtttaaaaaataagaaacctctttaagcaatagatttgcttgggttttcttttttaaaaacataatactgtgcaggcaaggcactgtaaaagttttaattccttccagaagaaccagtggaagaatttaaatttggcgctacgatcaaaactactgaattagtagaaataatgatgtctaaagcttaccaacaaaagaaccctcagcagaataacaaaaactttgctcaggacatttgaggtcaaattgaagacggaaaccggaaaccgttttcttgtaagcccctagaggcagatcaggtaaagcatacatagtagagggaaaggagagaatggaaataaaactcaatattatgcagatttatgccttattttttagcattttttaaggttgggtctttcaggctggttttggtttgtattagatctgtatagtttaattaactggtgatttagttttatatttaagctacaattaatcttttttctttggtgatatttatttctttgccttttttttttttaacaactttcaatcttcagatgtttcgttgaatctatttagagcttcaccatggcaatatgtatttcccttaaaacactgcaaacaaatatactaggagtgtgcccttttaatctttactagttattgtgagattgctgtgtaagctaataaacacatttgtaaatacattgtttgcaggacgaaaacttctgagttacagctcaggaaaagcctgctgaatttatgttgtaagcattacttaacacagtataaagatgaaaagacaacaaaaatatcttcatacttcctcatcccctcattggaacaaaaccttaaactgggagaaccttagtcccctctctttcctcttcctcctccacttcccacttattgtcaccttgtaatattcagagagcacttggattatggatctgaatagagaaatgcttacagataatcattagcccacataccagtaactatacttaaagatgggatggagttgtaaagtgcttttataatacaatataattgttaaaggcaagggttgactctttgttttattttgacatggcatgtcctgaaataaatattgattcaatatgaaaaaaaaaaaaaaaaaaaaaaaaaaaaaaaaaaaaaaaaaaaaaaaaaaaaaaaaaaaaaaaaaaaaaaaaaaaaaaaaaaaaaaaaaaaaaaaacttttgggcccctttggcccaagggattttaaacttgggcaagttttttctttgggcccaaatttgggcttatttggccaattcccccttaaggggggggttttaaaattaaatggcccgggttttaaaaaggtggaactggaaaaaccctggggttacccaatttaaaccccttggaaaaaaacccctttttgccaagtggggtaaaaacaaaaaggccccaaccgatgggcttttccaaaaattggccaaccttaatgggcaatggaaattgtaagccgtaaatttttggtaaaattccgggtaaatttttggtaaaccacttattttttaaccaattggcccaaatccggaaaatccctttaaaataaaaggattcccccgaaaaaggttagagggtttcacatttggaaccaaggagccctttttaagaaacggggcctcaaaggtggggcaacggtatataaggcaatggcccctttacgtgacccattcccttaacggtttttggctccaggggccg

SEQ ID NO: 455844 - DNA, 3268 bp, Homo sapiens
  misc_feature (1436)..(1436): n is a, c, g, or t
  misc_feature (1483)..(1483): n is a, c, g, or t
acgcatgcacgcacgcacgcacgcggcggccggcggggccgcaggctcgcgcccgggctcgccccgcgccgctccagaggctcgcgcactcagcaggttgggctgcggcggcggcggcagctgtggaagctcaggcgctgcgcgtgagaggtcccagatacgtctgcggttccggctccgccaccctcagcttctcttccccaggtctgggagccgagtgcggaaggagggaacggccctagctttgggaagccagaggacacccctggctcctgccgacaccgccctccttcccttcccagccgcgggcctcgctcggtgctaggctactctgccgggaggcggcggcggctgccagtctgtggagagtcctgctgccctccagccgggctcctccaccgggccttgcaggggccgagagagctcggtgcccgcccttccgctcgcctttttcgtcagctggctggagcagcatcggtccgggaggtctctaggctgaggcggcggccgctcctctagttccacaatgtccacgggcggagacttcgggaatccgctgaggaaattcaagctggtgttcctgggggagcaaagcgttggaaagacatctttgatcaccagattcatgtatgacagttttgacaacacctatcaggcaacaattggcattgactttttatcaaaaactatgtacttggaggatcgaacagtacgattgcaattatgggacacagcaggtcaagagcggttcaggagcttgattcctagctacattcgtgactccactgtggcagttgttgtttatgatatcacaaatgttaactcattccagcaaactacaaagtggattgatgatgtcagaacagaaagaggaagtgatgttatcatcatgctagtaggaaataaaacagatcttgctgacaagaggcaagtgtcaattgaggagggagagaggaaagccaaagagctgaatgttatgtttattgaaactagtgcaaaagctggatacaatgtaaagcagctctttcgacgtgtagcagcagctttgccgggaatggaaagcacacaggacagaagcagagaagatatgattgacataaaactggaaaagcctcaggagcaaccagtcagtgaaggaggctgttcctgctaatctcccatgtcatcttcaaccttcttcagaagctcactgctttggcccccttactctttcattgactgcagtgtgaatattggcttgaaccttttcccttcagtaataacgtattgcaattcatcattgctgcctgtctcgtggagatgatctattagcttcacaagcacaacaaaagtcagtgtcttcattatttatattttacaaaaagccaaaatatttcagcatattccagtgataactttaaaaattagatacacttcttcctttacacccaactttnctatctcgtgttctcccgttctcctgcttctgtcaacaacgctggcnttactcaccttcgcaacctttaacaaccgttctggcttttacccccttttttcccaaaaaatcaaccaaactttgcaaatttggggggcaacaaaaaacttccctccaacagtatgagtatggcttggttaacgagcggtatgttcacagcctactttatctctccttgcttttctcacctctcacttacccccattccctattaccctattcttacctagcctcccccgacttcctcaaaacaaacaagagatggcaaagcagcagttctaccaagcccattggaattatcctttaattttacagataccacttgctgtaggctacggaccaagatgtccaaaattattcttgagcactgataaaaattacggtcttctttgaggtcaaaattcagccatcatggtaggcagtgcttgaatgagaaaaggctcctggtgcatcttcaaaatgagtcctaaagaacatactgagtacttagaagtagaagaacataagatgtatttctgactaaaacaaatggctctttcacatgtgctttattagactctgggagagaaaattaaccaagtgcttcagaacaggtttttagtatttaattcttcacggtaagaaaatgaagttctaatgaactgtttctcccaaggttttaaaattgtcaagagttattctgtttgtttaaaaaataagaaacctctttaagcaatagatttgcttgggttttcttttttaaaaacataatactgtgcaggcaaggcactgtaaaagttttaattccttccagaagaaccagtggaagaatttaaatttggcgctacgatcaaaactactgaattagtagaaataatgatgtctaaagcttaccaacaaaagaaccctcagcagaataacaaaaactttgctcaggacatttgaggtcaaattgaagacggaaaccggaaaccgttttcttgtaagcccctagaggcagatcaggtaaagcatacatagtagagggaaaggagagaatggaaataaaactcaatattatgcagatttatgccttattttttagcattttttaaggttgggtctttcaggctggttttggtttgtattagatctgtatagtttaattaactggtgatttagttttatatttaagctacaattaatcttttttctttggtgatatttatttctttgccttttttttttttaacaactttcaatcttcagatgtttcgttgaatctatttagagcttcaccatggcaatatgtatttcccttaaaacactgcaaacaaatatactaggagtgtgcccttttaatctttactagttattgtgagattgctgtgtaagctaataaacacatttgtaaatacattgtttgcaggacgaaaacttctgagttacagctcaggaaaagcctgctgaatttatgttgtaagcattacttaacacagtataaagatgaaaagacaacaaaaatatcttcatacttcctcatcccctcattggaacaaaaccttaaactgggagaaccttagtcccctctctttcctcttcctcctccacttcccacttattgtcaccttgtaatattcagagagcacttggattatggatctgaatagagaaatgcttacagataatcattagcccacataccagtaactatacttaaagatgggatggagttgtaaagtgcttttataatacaatataattgttaaaggcaagggttgactctttgttttattttgacatggcatgtcctgaaataaatattgattcaatatg

SEQ ID NO: 455845 - DNA, 2847 bp, Homo sapiens
acgcatgcacgcacgcacgcacgcggcggccggcggggccgcaggctcgcgcccgggctcgccccgcgccgctccagaggctcgcgcactcagcaggttgggctgcggcggcggcggcagctgtggaagctcaggcgctgcgcgtgagaggtcccagatacgtctgcggttccggctccgccaccctcagcttctcttccccaggtctgggagccgagtgcggaaggagggaacggccctagctttgggaagccagaggacacccctggctcctgccgacaccgccctccttcccttcccagccgcgggcctcgctcggtgctaggctactctgccgggaggcggcggcggctgccagtctgtggagagtcctgctgccctccagccgggctcctccaccgggccttgcaggggccgagagagctcggtgcccgcccttccgctcgcctttttcgtcagctggctggagcagcatcggtccgggaggtctctaggctgaggcggcggccgctcctctagttccacaatgtccacgggcggagacttcgggaatccgctgaggaaattcaagctggtgttcctgggggagcaaagcgttggaaagacatctttgatcaccagattcatgtatgacagttttgacaacacctatcaggcaacaattggcattgactttttatcaaaaactatgtacttggaggatcgaacagtacgattgcaattatgggacacagcaggtcaagagcggttcaggagcttgattcctagctacattcgtgactccactgtggcagttgttgtttatgatatcacaaatgttaactcattccagcaaactacaaagtggattgatgatgtcagaacagaaagaggaagtgatgttatcatcatgctagtaggaaataaaacagatcttgctgacaagaggcaagtgtcaattgaggagggagagaggaaagccaaagagctgaatgttatgtttattgaaactagtgcaaaagctggatacaatgtaaagcagctctttcgacgtgtagcagcagctttgccgggaatggaaagcacacaggacagaagcagagaagatatgattgacataaaactggaaaagcctcaggagcaaccagtcagtgaaggaggctgttcctgctaatctcccatgtcatcttcaaccttcttcagaagctcactgctttggcccccttactctttcattgactgcagtgtgaatattggcttgaaccttttcccttcagtaataacgtattgcaattcatcattgctgcctgtctcgtggagatgatctattagcttcacaagcacaacaaaagtcagtgtcttcattatttatattttacaaaaagccaaaatatttcagcatattccagtgataactttaaaaattagatacattttcttaacatttttttcttttttaatgttatgataatgtacttcaaaatgatggaaatctcaacagtatgagtatggcttggttaacgagcggtatgttcacagcctactttatctctccttgcttttctcacctctcacttacccccattccctattaccctattcttacctagcctcccccgacttcctcaaaacaaacaagagatggcaaagcagcagttctaccaagcccattggaattatcctttaattttacagataccacttgctgtaggctacggaccaagatgtccaaaattattcttgagcactgataaaaattacggtcttctttgaggtcaaaattcagccatcatggtaggcagtgcttgaatgagaaaaggctcctggtgcatcttcaaaatgagtcctaaagaacatactgagtacttagaagtagaagaacataagatgtatttctgactaaaacaaatggctctttcacatgtgctttattagactctgggagagaaaattaaccaagtgcttcagaacaggtttttagtatttaattcttcacggtaagaaaatgaagttctaatgaactgtttctcccaaggttttaaaattgtcaagagttattctgtttgtttaaaaaataagaaacctctttaagcaatagatttgcttgggttttcttttttaaaaacataatactgtgcaggcaaggcactgtaaaagttttaattccttccagaagaaccagtggaagaatttaaatttggcgctacgatcaaaactactgaattagtagaaataatgatgtctaaagcttaccaacaaaagaaccctcagcagaataacaaaaactttgctcaggacatttgaggtcaaattgaagacggaaaccggaaaccgttttcttgtaagcccctagaggcagatcaggtaaagcatacatagtagagggaaaggagagaatggaaataaaactcaatattatgcagatttatgccttattttttagcattttttaaggttgggtctttcaggctggttttggtttgtattagatctgtatagtttaattaactggtgatttagttttatatttaagctacaattaatcttttttctttggtgatatttatttctttgccttttttttttttaacaactttcaatcttcagatgtttcgttgaatctatttagagcttcaccatggcaatatgtatttcccttaaaacactgcaaacaaatatactaggagtgtgcccttttaatctttactagttattgtgagattgctgtgtaagctaataaacacatttgtaaatacattgtttgcaggacgaaaacttctgagttacagctcaggaaaagcctgctgaatttatgttgtcttttcatctttatactgtgttaagtaatgcttacaacataagtcgacg

SEQ ID NO: 455846 - DNA, 3047 bp, Homo sapiens
acgcatgcacgcacgcacgcacgcggcggccggcggggccgcaggctcgcgcccgggctcgccccgcgccgctccagaggctcgcgcactcagcaggttgggctgcggcggcggcggcagctgtggaagctcaggcgctgcgcgtgagaggtcccagatacgtctgcggttccggctccgccaccctcagcttctcttccccaggtctgggagccgagtgcggaaggagggaacggccctagctttgggaagccagaggacacccctggctcctgccgacaccgccctccttcccttcccagccgcgggcctcgctcggtgctaggctactctgccgggaggcggcggcggctgccagtctgtggagagtcctgctgccctccagccgggctcctccaccgggccttgcaggggccgagagagctcggtgcccgcccttccgctcgcctttttcgtcagctggctggagcagcatcggtccgggaggtctctaggctgaggcggcggccgctcctctagttccacaatgtccacgggcggagacttcgggaatccgctgaggaaattcaagctggtgttcctgggggagcaaagcgttggaaagacatctttgatcaccagattcatgtatgacagttttgacaacacctatcaggcaacaattggcattgactttttatcaaaaactatgtacttggaggatcgaacaatgttaactcattccagcaaactacaaagtggattgatgatgtcagaacagaaagaggaagtgatgttatcatcatgctagtaggaaataaaacagatcttgctgacaagaggcaagtgtcaattgaggagggagagaggaaagccaaagagctgaatgttatgtttattgaaactagtgcaaaagctggatacaatgtaaagcagctctttcgacgtgtagcagcagctttgccgggaatggaaagcacacaggacagaagcagagaagatatgattgacataaaactggaaaagcctcaggagcaaccagtcagtgaaggaggctgttcctgctaatctcccatgtcatcttcaaccttcttcagaagctcactgctttggcccccttactctttcattgactgcagtgtgaatattggcttgaaccttttcccttcagtaataacgtattgcaattcatcattgctgcctgtctcgtggagatgatctattagcttcacaagcacaacaaaagtcagtgtcttcattatttatattttacaaaaagccaaaatatttcagcatattccagtgataactttaaaaattagatacattttcttaacatttttttcttttttaatgttatgataatgtacttcaaaatgatggaaatctcaacagtatgagtatggcttggttaacgagcggtatgttcacagcctactttatctctccttgcttttctcacctctcacttacccccattccctattaccctattcttacctagcctcccccgacttcctcaaaacaaacaagagatggcaaagcagcagttctaccaagcccattggaattatcctttaattttacagataccacttgctgtaggctacggaccaagatgtccaaaattattcttgagcactgataaaaattacggtcttctttgaggtcaaaattcagccatcatggtaggcagtgcttgaatgagaaaaggctcctggtgcatcttcaaaatgagtcctaaagaacatactgagtacttagaagtagaagaacataagatgtatttctgactaaaacaaatggctctttcacatgtgctttattagactctgggagagaaaattaaccaagtgcttcagaacaggtttttagtatttaattcttcacggtaagaaaatgaagttctaatgaactgtttctcccaaggttttaaaattgtcaagagttattctgtttgtttaaaaaataagaaacctctttaagcaatagatttgcttgggttttcttttttaaaaacataatactgtgcaggcaaggcactgtaaaagttttaattccttccagaagaaccagtggaagaatttaaatttggcgctacgatcaaaactactgaattagtagaaataatgatgtctaaagcttaccaacaaaagaaccctcagcagaataacaaaaactttgctcaggacatttgaggtcaaattgaagacggaaaccggaaaccgttttcttgtaagcccctagaggcagatcaggtaaagcatacatagtagagggaaaggagagaatggaaataaaactcaatattatgcagatttatgccttattttttagcattttttaaggttgggtctttcaggctggttttggtttgtattagatctgtatagtttaattaactggtgatttagttttatatttaagctacaattaatcttttttctttggtgatatttatttctttgccttttttttttttaacaactttcaatcttcagatgtttcgttgaatctatttagagcttcaccatggcaatatgtatttcccttaaaacactgcaaacaaatatactaggagtgtgcccttttaatctttactagttattgtgagattgctgtgtaagctaataaacacatttgtaaatacattgtttgcaggacgaaaacttctgagttacagctcaggaaaagcctgctgaatttatgttgtaagcattacttaacacagtataaagatgaaaagacaacaaaaatatcttcatacttcctcatcccctcattggaacaaaaccttaaactgggagaaccttagtcccctctctttcctcttcctcctccacttcccacttattgtcaccttgtaatattcagagagcacttggattatggatctgaatagagaaatgcttacagataatcattagcccacataccagtaactatacttaaagatgggatggagttgtaaagtgcttttataatacaatataattgttaaaggcaagggttgactctttgttttattttgacatggcatgtcctgaaataaatattgattcaatatg

SEQ ID NO: 455847 - DNA, 3055 bp, Homo sapiens
acgcatgcacgcacgcacgcacgcggcggccggcggggccgcaggctcgcgcccgggctcgccccgcgccgctccagaggctcgcgcactcagcaggttgggctgcggcggcggcggcagctgtggaagctcaggcgctgcgcgtgagaggtcccagatacgtctgcggttccggctccgccaccctcagcttctcttccccagccgcgggcctcgctcggtgctaggctactctgccgggaggcggcggcggctgccagtctgtggagagtcctgctgccctccagccgggctcctccaccgggccttgcaggggccgagagagctcggtgcccgcccttccgctcgcctttttcgtcagctggctggagcagcatcggtccgggaggtctctaggctgaggcggcggccgctcctctagttccacaatgtccacgggcggagacttcgggaatccgctgaggaaattcaagctggtgttcctgggggagcaaagcgttggaaagacatctttgatcaccagattcatgtatgacagttttgacaacacctatcaggcaacaattggcattgactttttatcaaaaactatgtacttggaggatcgaacaatcaggcttcagctgtgggatactgcgggtcaggaacgtttccgtagcctcattcccagttacatccgtgattctgctgcagctgtagtagtttacgatatcacaaatgttaactcattccagcaaactacaaagtggattgatgatgtcagaacagaaagaggaagtgatgttatcatcatgctagtaggaaataaaacagatcttgctgacaagaggcaagtgtcaattgaggagggagagaggaaagccaaagagctgaatgttatgtttattgaaactagtgcaaaagctggatacaatgtaaagcagctctttcgacgtgtagcagcagctttgccgggaatggaaagcacacaggacagaagcagagaagatatgattgacataaaactggaaaagcctcaggagcaaccagtcagtgaaggaggctgttcctgctaatctcccatgtcatcttcaaccttcttcagaagctcactgctttggcccccttactctttcattgactgcagtgtgaatattggcttgaaccttttcccttcagtaataacgtattgcaattcatcattgctgcctgtctcgtggagatgatctattagcttcacaagcacaacaaaagtcagtgtcttcattatttatattttacaaaaagccaaaatatttcagcatattccagtgataactttaaaaattagatacattttcttaacatttttttcttttttaatgttatgataatgtacttcaaaatgatggaaatctcaacagtatgagtatggcttggttaacgagcggtatgttcacagcctactttatctctccttgcttttctcacctctcacttacccccattccctattaccctattcttacctagcctcccccgacttcctcaaaacaaacaagagatggcaaagcagcagttctaccaagcccattggaattatcctttaattttacagataccacttgctgtaggctacggaccaagatgtccaaaattattcttgagcactgataaaaattacggtcttctttgaggtcaaaattcagccatcatggtaggcagtgcttgaatgagaaaaggctcctggtgcatcttcaaaatgagtcctaaagaacatactgagtacttagaagtagaagaacataagatgtatttctgactaaaacaaatggctctttcacatgtgctttattagactctgggagagaaaattaaccaagtgcttcagaacaggtttttagtatttaattcttcacggtaagaaaatgaagttctaatgaactgtttctcccaaggttttaaaattgtcaagagttattctgtttgtttaaaaaataagaaacctctttaagcaatagatttgcttgggttttcttttttaaaaacataatactgtgcaggcaaggcactgtaaaagttttaattccttccagaagaaccagtggaagaatttaaatttggcgctacgatcaaaactactgaattagtagaaataatgatgtctaaagcttaccaacaaaagaaccctcagcagaataacaaaaactttgctcaggacatttgaggtcaaattgaagacggaaaccggaaaccgttttcttgtaagcccctagaggcagatcaggtaaagcatacatagtagagggaaaggagagaatggaaataaaactcaatattatgcagatttatgccttattttttagcattttttaaggttgggtctttcaggctggttttggtttgtattagatctgtatagtttaattaactggtgatttagttttatatttaagctacaattaatcttttttctttggtgatatttatttctttgccttttttttttttaacaactttcaatcttcagatgtttcgttgaatctatttagagcttcaccatggcaatatgtatttcccttaaaacactgcaaacaaatatactaggagtgtgcccttttaatctttactagttattgtgagattgctgtgtaagctaataaacacatttgtaaatacattgtttgcaggacgaaaacttctgagttacagctcaggaaaagcctgctgaatttatgttgtaagcattacttaacacagtataaagatgaaaagacaacaaaaatatcttcatacttcctcatcccctcattggaacaaaaccttaaactgggagaaccttagtcccctctctttcctcttcctcctccacttcccacttattgtcaccttgtaatattcagagagcacttggattatggatctgaatagagaaatgcttacagataatcattagcccacataccagtaactatacttaaagatgggatggagttgtaaagtgcttttataatacaatataattgttaaaggcaagggttgactctttgttttattttgacatggcatgtcctgaaataaatattgattcaatatg

SEQ ID NO: 455848 - DNA, 2787 bp, Homo sapiens
acgcatgcacgcacgcacgcacgcggcggccggcggggccgcaggctcgcgcccgggctcgccccgcgccgctccagaggctcgcgcactcagcaggttgggctgcggcggcggcggcagctgtggaagctcaggcgctgcgcgtgagaggtcccagatacgtctgcggttccggctccgccaccctcagcttctcttccccaggtctgggagccgagtgcggaaggagggaacggccctagctttgggaagccagaggacacccctggctcctgccgacaccgccctccttcccttcccagccgcgggcctcgctcggtgctaggctactctgccgggaggcggcggcggctgccagtctgtggagagtcctgctgccctccagccgggctcctccaccgggccttgcaggggccgagagagctcggtgcccgcccttccgctcgcctttttcgtcagctggctggagcagcatcggtccgggaggtctctaggctgaggcggcggccgctcctctagttccacaatgtccacgggcggagacttcgggaatccgctgaggaaattcaagctggtgttcctgggggagcaaagcgttggaaagacatctttgatcaccagattcatgtatgacagttttgacaacacctatcagctctttcgacgtgtagcagcagctttgccgggaatggaaagcacacaggacagaagcagagaagatatgattgacataaaactggaaaagcctcaggagcaaccagtcagtgaaggaggctgttcctgctaatctcccatgtcatcttcaaccttcttcagaagctcactgctttggcccccttactctttcattgactgcagtgtgaatattggcttgaaccttttcccttcagtaataacgtattgcaattcatcattgctgcctgtctcgtggagatgatctattagcttcacaagcacaacaaaagtcagtgtcttcattatttatattttacaaaaagccaaaatatttcagcatattccagtgataactttaaaaattagatacattttcttaacatttttttcttttttaatgttatgataatgtacttcaaaatgatggaaatctcaacagtatgagtatggcttggttaacgagcggtatgttcacagcctactttatctctccttgcttttctcacctctcacttacccccattccctattaccctattcttacctagcctcccccgacttcctcaaaacaaacaagagatggcaaagcagcagttctaccaagcccattggaattatcctttaattttacagataccacttgctgtaggctacggaccaagatgtccaaaattattcttgagcactgataaaaattacggtcttctttgaggtcaaaattcagccatcatggtaggcagtgcttgaatgagaaaaggctcctggtgcatcttcaaaatgagtcctaaagaacatactgagtacttagaagtagaagaacataagatgtatttctgactaaaacaaatggctctttcacatgtgctttattagactctgggagagaaaattaaccaagtgcttcagaacaggtttttagtatttaattcttcacggtaagaaaatgaagttctaatgaactgtttctcccaaggttttaaaattgtcaagagttattctgtttgtttaaaaaataagaaacctctttaagcaatagatttgcttgggttttcttttttaaaaacataatactgtgcaggcaaggcactgtaaaagttttaattccttccagaagaaccagtggaagaatttaaatttggcgctacgatcaaaactactgaattagtagaaataatgatgtctaaagcttaccaacaaaagaaccctcagcagaataacaaaaactttgctcaggacatttgaggtcaaattgaagacggaaaccggaaaccgttttcttgtaagcccctagaggcagatcaggtaaagcatacatagtagagggaaaggagagaatggaaataaaactcaatattatgcagatttatgccttattttttagcattttttaaggttgggtctttcaggctggttttggtttgtattagatctgtatagtttaattaactggtgatttagttttatatttaagctacaattaatcttttttctttggtgatatttatttctttgccttttttttttttaacaactttcaatcttcagatgtttcgttgaatctatttagagcttcaccatggcaatatgtatttcccttaaaacactgcaaacaaatatactaggagtgtgcccttttaatctttactagttattgtgagattgctgtgtaagctaataaacacatttgtaaatacattgtttgcaggacgaaaacttctgagttacagctcaggaaaagcctgctgaatttatgttgtaagcattacttaacacagtataaagatgaaaagacaacaaaaatatcttcatacttcctcatcccctcattggaacaaaaccttaaactgggagaaccttagtcccctctctttcctcttcctcctccacttcccacttattgtcaccttgtaatattcagagagcacttggattatggatctgaatagagaaatgcttacagataatcattagcccacataccagtaactatacttaaagatgggatggagttgtaaagtgcttttataatacaatataattgttaaaggcaagggttgactctttgttttattttgacatggcatgtcctgaaataaatattgattcaatatg

SEQ ID NO: 455849 - DNA, 2573 bp, Homo sapiens
ctggagtgcagtgatgtggtggcctaataatggcctgctgcagcctcaacattcctgggctcgagcatcctcaagctattaagtttgtaaaagtaaaaaaattacaggatgagcccagtcaagtgaaagcaaatcagtaacaaaaaaaagtctttaaaaaaatgttaagtatacacacacagaaacacacaaatttcaagagtgtggcagattaatgaatttttaaactaatgtgacctgtataaccagtccttatatcaaggaaagttattttcagagctttctttataatctttataatactgcctcatgtctcaaaagtaagaagtttgtttgtttctttacaggcaagtgtcaattgaggagggagagaggaaagccaaagagctgaatgttatgtttattgaaactagtgcaaaagctggatacaatgtaaagcagctctttcgacgtgtagcagcagctttgccgggaatggaaagcacacaggacagaagcagagaagatatgattgacataaaactggaaaagcctcaggagcaaccagtcagtgaaggaggctgttcctgctaatctcccatgtcatcttcaaccttcttcagaagctcactgctttggcccccttactctttcattgactgcagtgtgaatattggcttgaaccttttcccttcagtaataacgtattgcaattcatcattgctgcctgtctcgtggagatgatctattagcttcacaagcacaacaaaagtcagtgtcttcattatttatattttacaaaaagccaaaatatttcagcatattccagtgataactttaaaaattagatacattttcttaacatttttttcttttttaatgttatgataatgtacttcaaaatgatggaaatctcaacagtatgagtatggcttggttaacgagcggtatgttcacagcctactttatctctccttgcttttctcacctctcacttacccccattccctattaccctattcttacctagcctcccccgacttcctcaaaacaaacaagagatggcaaagcagcagttctaccaagcccattggaattatcctttaattttacagataccacttgctgtaggctacggaccaagatgtccaaaattattcttgagcactgataaaaattacggtcttctttgaggtcaaaattcagccatcatggtaggcagtgcttgaatgagaaaaggctcctggtgcatcttcaaaatgagtcctaaagaacatactgagtacttagaagtagaagaacataagatgtatttctgactaaaacaaatggctctttcacatgtgctttattagactctgggagagaaaattaaccaagtgcttcagaacaggtttttagtatttaattcttcacggtaagaaaatgaagttctaatgaactgtttctcccaaggttttaaaattgtcaagagttattctgtttgtttaaaaaataagaaacctctttaagcaatagatttgcttgggttttcttttttaaaaacataatactgtgcaggcaaggcactgtaaaagttttaattccttccagaagaaccagtggaagaatttaaatttggcgctacgatcaaaactactgaattagtagaaataatgatgtctaaagcttaccaacaaaagaaccctcagcagaataacaaaaactttgctcaggacatttgaggtcaaattgaagacggaaaccggaaaccgttttcttgtaagcccctagaggcagatcaggtaaagcatacatagtagagggaaaggagagaatggaaataaaactcaatattatgcagatttatgccttattttttagcattttttaaggttgggtctttcaggctggttttggtttgtattagatctgtatagtttaattaactggtgatttagttttatatttaagctacaattaatcttttttctttggtgatatttatttctttgccttttttttttttaacaactttcaatcttcagatgtttcgttgaatctatttagagcttcaccatggcaatatgtatttcccttaaaacactgcaaacaaatatactaggagtgtgcccttttaatctttactagttattgtgagattgctgtgtaagctaataaacacatttgtaaatacattgtttgcaggacgaaaacttctgagttacagctcaggaaaagcctgctgaatttatgttgtaagcattacttaacacagtataaagatgaaaagacaacaaaaatatcttcatacttcctcatcccctcattggaacaaaaccttaaactgggagaaccttagtcccctctctttcctcttcctcctccacttcccacttattgtcaccttgtaatattcagagagcacttggattatggatctgaatagagaaatgcttacagataatcattagcccacataccagtaactatacttaaagatgggatggagttgtaaagtgcttttataatacaatataattgttaaaggcaagggttgactctttgttttattttgacatggcatgtcctgaaataaatattgattcaatatg

SEQ ID NO: 455850 - DNA, 2267 bp, Homo sapiens
  misc_feature (43)..(43): n is a, c, g, or t
  misc_feature (65)..(65): n is a, c, g, or t
aatggactgaggaccttccgcagtctctcccagagtccgtgcngcttgtgccctgtgtgaatttntgtattctagctctaagagtttccctgaggctcttcgttgtctcagcaactttcccatctcgtctcttctctagtaacaagagaagagacgagatgactaaacatggaaagctcacaggacagaagcagagaagatatgattgacataaaactggaaaagcctcaggagcaaccagtcagtgaaggaggctgttcctgctaatctcccatgtcatcttcaaccttcttcagaagctcactgctttggcccccttactctttcattgactgcagtgtgaatattggcttgaaccttttcccttcagtaataacgtattgcaattcatcattgctgcctgtctcgtggagatgatctattagcttcacaagcacaacaaaagtcagtgtcttcattatttatattttacaaaaagccaaaatatttcagcatattccagtgataactttaaaaattagatacattttcttaacatttttttcttttttaatgttatgataatgtacttcaaaatgatggaaatctcaacagtatgagtatggcttggttaacgagcggtatgttcacagcctactttatctctccttgcttttctcacctctcacttacccccattccctattaccctattcttacctagcctcccccgacttcctcaaaacaaacaagagatggcaaagcagcagttctaccaagcccattggaattatcctttaattttacagataccacttgctgtaggctacggaccaagatgtccaaaattattcttgagcactgataaaaattacggtcttctttgaggtcaaaattcagccatcatggtaggcagtgcttgaatgagaaaaggctcctggtgcatcttcaaaatgagtcctaaagaacatactgagtacttagaagtagaagaacataagatgtatttctgactaaaacaaatggctctttcacatgtgctttattagactctgggagagaaaattaaccaagtgcttcagaacaggtttttagtatttaattcttcacggtaagaaaatgaagttctaatgaactgtttctcccaaggttttaaaattgtcaagagttattctgtttgtttaaaaaataagaaacctctttaagcaatagatttgcttgggttttcttttttaaaaacataatactgtgcaggcaaggcactgtaaaagttttaattccttccagaagaaccagtggaagaatttaaatttggcgctacgatcaaaactactgaattagtagaaataatgatgtctaaagcttaccaacaaaagaaccctcagcagaataacaaaaactttgctcaggacatttgaggtcaaattgaagacggaaaccggaaaccgttttcttgtaagcccctagaggcagatcaggtaaagcatacatagtagagggaaaggagagaatggaaataaaactcaatattatgcagatttatgccttattttttagcattttttaaggttgggtctttcaggctggttttggtttgtattagatctgtatagtttaattaactggtgatttagttttatatttaagctacaattaatcttttttctttggtgatatttatttctttgccttttttttttttaacaactttcaatcttcagatgtttcgttgaatctatttagagcttcaccatggcaatatgtatttcccttaaaacactgcaaacaaatatactaggagtgtgcccttttaatctttactagttattgtgagattgctgtgtaagctaataaacacatttgtaaatacattgtttgcaggacgaaaacttctgagttacagctcaggaaaagcctgctgaatttatgttgtaagcattacttaacacagtataaagatgaaaagacaacaaaaatatcttcatacttcctcatcccctcattggaacaaaaccttaaactgggagaaccttagtcccctctctttcctcttcctcctccacttcccacttattgtcaccttgtaatattcagagagcacttggattatggatctgaatagagaaatgcttacagataatcattagcccacataccagtaactatacttaaagatgggatggagttgtaaagtgcttttataatacaatataattgttaaaggcaagggttgactctttgttttattttgacatggcatgtcctgaaataaatattgattcaatatg

SEQ ID NO: 455851 - DNA, 2551 bp, Homo sapiens
  misc_feature (2441)..(2441): n is a, c, g, or t
  misc_feature (2443)..(2443): n is a, c, g, or t
  misc_feature (2448)..(2449): n is a, c, g, or t
  misc_feature (2453)..(2453): n is a, c, g, or t
acgcatgcacgcacgcacgcacgcggcggccggcggggccgcaggctcgcgcccgggctcgccccgcgccgctccagaggctcgcgcactcagcaggttgggctgcggcggcggcggcagctgtggaagctcaggcgctgcgcgtgagaggtcccagatacgtctgcggttccggctccgccaccctcagcttctcttccccaggtctgggagccgagtgcggaaggagggaacggccctagctttgggaagccagaggacacccctggctcctgccgacaccgccctccttcccttcccagccgcgggcctcgctcggtgctaggctactctgccgggaggcggcggcggctgccagtctgtggagagtcctgctgccctccagccgggctcctccaccgggccttgcaggggccgagagagctcggtgcccgcccttccgctcgcctttttcgtcagctggctggagcagcatcggtccgggaggtctctaggctgaggcggcggccgctcctctagttccacaatgtccacgggcggagacttcgggaatccgctgaggaaattcaagctggtgttcctgggggagcaaagcgttggaaagacatctttgatcaccagattcatgtatgacagttttgacaacacctatcaggcaacaattggcattgactttttatcaaaaactatgtacttggaggatcgaacagtacgattgcaattatgggacacagcaggtcaagagcggttcaggagcttgattcctagctacattcgtgactccactgtggcagttgttgtttatgatatcacaaatgttaactcattccagcaaactacaaagtggattgatgatgtcagaacagaaagaggaagtgatgttatcatcatgctagtaggaaataaaacagatcttgctgacaagaggcaagtgtcaattgaggagggagagaggaaagccaaagagctgaatgttatgtttattgaaactagtgcaaaagctggatacaatgtaaagcagctctttcgacgtgtagcagcagctttgccgggaatggaaagcacacaggacagaagcagagaagatatgattgacataaaactggaaaagcctcaggagcaaccagtcagtgaaggaggctgttcctgctaatctcccatgtcatcttcaaccttcttcagaagctcactgctttggcccccttactctttcattgactgcagtgtgaatattggcttgaaccttttcccttcagtaataacgtattgcaattcatcattgctgcctgtctcgtggagatgatctattagcttcacaagcacaacaaaagtcagtgtcttcattatttatattttacaaaaagccaaaatatttcagcatattccagtgataactttaaaaattagatacattttcttaacatttttttcttttttaatgttatgataatgtacttcaaaatgatggaaatctcaacagtatgagtatggcttggttaacgagcggtatgttcacagcctactttatctctccttgcttttctcacctctcacttacccccattccctattaccctattcttacctagcctcccccgacttcctcaaaacaaacaagagatggcaaagcagcagttctaccaagcccattggaattatcctttaattttacagataccacttgctgtaggctacggaccaagatgtccaaaattattcttgagcactgataaaaattacggtcttctttgaggtcaaaattcagccatcatggtaggcagtgcttgaatgagaaaaggctcctggtgcatcttcaaaatgagtcctaaagaacatactgagtacttagaagtagaagaacataagatgtatttctgactaaaacaaatggctctttcacatgtgctttattagactctgggagagaaaattaaccaagtgcttcagaacaggtttttagtatttaattcttcacggtaagaaaatgaagttctaatgaactgtttctcccaaggttttaaaattgtcaagagttattctgtttgtttaaaaaataagaaacctctttaagcaatagatttgcttgggttttcttttttaaaaacataatactgtgcaggcaaggcactgtaaaagttttaattccttccagaagaaccagtggaagaatttaaatttggcgctacgatcaaaactactgaattagtagaaataatgatgtctaaagcttaccaacaaaagaaccctcagcagaataacaaaaactttgctcaggacatttgaggtcaaattgaagacggaaaccggaaaccgttttcttgtaagcccctagaggcagatcaggtaaagcatacatagtagagggaaaggagagaatggaaataaaactcaatattatgcagatttatgccttattttttagcattttttaaggttggctncngctgnntggntgatcaattgttgttattactgtttgtttttttgctcatactttcttgggttttctgctttttttaccttcttggttttcttatactgggcaatcgtt

SEQ ID NO: 455852 - DNA, 1578 bp, Homo sapiens
acgcatgcacgcacgcacgcacgcggcggccggcggggccgcaggctcgcgcccgggctcgccccgcgccgctccagaggctcgcgcactcagcaggttgggctgcggcggcggcggcagctgtggaagctcaggcgctgcgcgtgagaggtcccagatacgtctgcggttccggctccgccaccctcagcttctcttccccaggtctgggagccgagtgcggaaggagggaacggccctagctttgggaagccagaggacacccctggctcctgccgacaccgccctccttcccttcccagccgcgggcctcgctcggtgctaggctactctgccgggaggcggcggcggctgccagtctgtggagagtcctgctgccctccagccgggctcctccaccgggccttgcaggggccgagagagctcggtgcccgcccttccgctcgcctttttcgtcagctggctggagcagcatcggtccgggaggtctctaggctgaggcggcggccgctcctctagttccacaatgtccacgggcggagacttcgggaatccgctgaggaaattcaagctggtgttcctgggggagcaaagcgttggaaagacatctttgatcaccagattcatgtatgacagttttgacaacacctatcaggcaacaattggcattgactttttatcaaaaactatgtacttggaggatcgaacagtacgattgcaattatgggacacagcaggtcaagagcggttcaggagcttgattcctagctacattcgtgactccactgtggcagttgttgtttatgatatcacaaatgttaactcattccagcaaactacaaagtggattgatgatgtcagaacagaaagaggaagtgatgttatcatcatgctagtaggaaataaaacagatcttgctgacaagaggcaagtgtcaattgaggagggagagaggaaagccaaagagctgaatgttatgtttattgaaactagtgcaaaagctggatacaatgtaaagcagctctttcgacgtgtagcagcagctttgccgggaatggaaagcacacaggacagaagcagagaagatatgattgacataaaactggaaaagcctcaggagcaaccagtcagtgaaggaggctgttcctgctaatctcccatgtcatcttcaaccttcttcagaagctcactgctttggcccccttactctttcattgactgcagtgtgaatattggcttgaaccttttcccttcagtaataacgtattgcaattcatcattgctgcctgtctcgtggagatgatctattagcttcacaagcacaacaaaagtcagtgtcttcattatttatattttacaaaaagccaaaatatttcagcatattccagtgataactttaaaaattagatacattttcttaacatttttttcttttttaatgttatgataatgtacttcaaaatgatggaaatctcaacagtatgagtatggcttggttaaagaactgctgctttgccatctcttgtttgttttgaggaagtcgggggaggctaggtaagagtagggtaatagggaatg

SEQ ID NO: 455853 - DNA, 1199 bp, Homo sapiens
acgcatgcacgcacgcacgcacgcggcggccggcggggccgcaggctcgcgcccgggctcgccccgcgccgctccagaggctcgcgcactcagcaggttgggctgcggcggcggcggcagctgtggaagctcaggcgctgcgcgtgagaggtcccagatacgtctgcggttccggctccgccaccctcagcttctcttccccaggtctgggagccgagtgcggaaggagggaacggccctagctttgggaagccagaggacacccctggctcctgccgacaccgccctccttcccttcccagccgcgggcctcgctcggtgctaggctactctgccgggaggcggcggcggctgccagtctgtggagagtcctgctgccctccagccgggctcctccaccgggccttgcaggggccgagagagctcggtgcccgcccttccgctcgcctttttcgtcagctggctggagcagcatcggtccgggaggtctctaggctgaggcggcggccgctcctctagttccacaatgtccacgggcggagacttcgggaatccgctgaggaaattcaagctggtgttcctgggggagcaaagcgttggaaagacatctttgatcaccagattcatgtatgacagttttgacaacacctatcaggcaacaattggcattgactttttatcaaaaactatgtacttggaggatcgaacagtacgattgcaattatgggacacagcaggtcaagagcggttcaggagcttgattcctagctacattcgtgactccactgtggcagttgttgtttatgatatcacaaatgttaactcattccagcaaactacaaagtggattgatgatgtcagaacagaaagaggaagtgatgttatcatcatgctagtaggaaataaaacagatcttgctgacaagaggcaagtgtcaattgaggagggagagaggaaagccaaagagctgaatgttatgtttattgaaactagtgcaaaagctggatacaatgtaaagcagctctttcgacgtgtagcagcagctttgccgggaatggaaagcacacaggacagaagcagagaagatatgattgacataaaactggaaaagcctcaggagcaaccagtcagtgaaggaggctgttcctgctaatctcccgtcagtgaaggaggctgatcctgctaatgtccctagtcaa

SEQ ID NO: 455854 - DNA, 1100 bp, Homo sapiens
ctggtagtccgacgacgagactcgagcatcagattacgtccccgcccaggacataatactgtgcaggcaaggcactgtaaaagttttaattccttccagaagaaccagtggaagaatttaaatttggcgctacgatcaaaactactgaattagtagaaataatgatgtctaaagcttaccaacaaaagaaccctcagcagaataacaaaaactttgctcaggacatttgaggtcaaattgaagacggaaaccggaaaccgttttcttgtaagcccctagaggcagatcaggtaaagcatacatagtagagggaaaggagagaatggaaataaaactcaatattatgcagatttatgccttattttttagcattttttaaggttgggtctttcaggctggttttggtttgtattagatctgtatagtttaattaactggtgatttagttttatatttaagctacaattaatcttttttctttggtgatatttatttctttgccttttttttttttaacaactttcaatcttcagatgtttcgttgaatctatttagagcttcaccatggcaatatgtatttcccttaaaacactgcaaacaaatatactaggagtgtgcccttttaatctttactagttattgtgagattgctgtgtaagctaataaacacatttgtaaatacattgtttgcaggacgaaaacttctgagttacagctcaggaaaagcctgctgaatttatgttgtaagcattacttaacacagtataaagatgaaaagacaacaaaaatatcttcatacttcctcatcccctcattggaacaaaaccttaaactgggagaaccttagtcccctctctttcctcttcctcctccacttcccacttattgtcaccttgtaatattcagagagcacttggattatggatctgaatagagaaatgcttacagataatcattagcccacataccagtaactatacttaaagatgggatggagttgtaaagtgcttttataatacaatataattgttaaaggcaagggttgactctttgttttattttgacatggcatgtcctgaaataaatattgattcaatatg

SEQ ID NO: 455855 - DNA, 1030 bp, Homo sapiens
acgcatgcacgcacgcacgcacgcggcggccggcggggccgcaggctcgcgcccgggctcgccccgcgccgctccagaggctcgcgcactcagcaggttgggctgcggcggcggcggcagctgtggaagctcaggcgctgcgcgtgagaggtcccagatacgtctgcggttccggctccgccaccctcagcttctcttccccaggtctgggagccgagtgcggaaggagggaacggccctagctttgggaagccagaggacacccctggctcctgccgacaccgccctccttcccttcccagccgcgggcctcgctcggtgctaggctactctgccgggaggcggcggcggctgccagtctgtggagagtcctgctgccctccagccgggctcctccaccgggccttgcaggggccgagagagctcggtgcccgcccttccgctcgcctttttcgtcagctggctggagcagcatcggtccgggaggtctctaggctgaggcggcggccgctcctctagttccacaatgtccacgggcggagacttcgggaatccgctgaggaaattcaagctggtgttcctgggggagcaaagcgttggaaagacatctttgatcaccagattcatgtatgacagttttgacaacacctatcaggcaacaattggcattgactttttatcaaaaactatgtacttggaggatcgaacagtacgattgcaattatgggacacagcaggtcaagagcggttcaggagcttgattcctagctacattcgtgactccactgtggcagttgttgtttatgatatcacaaatgttaactcattccagcaaactacaaagtggattgatgatgtcagaacagaaagaggaagtgatgttatcatcatgctagtaggaaataaaacagatcttgctgacaagaggcaagtgtcaattgaggagggatttcggcctgagagcgggccgaggagattggcgacggtgtcgcccgtgttttcgttggcgggtgcctgggctggtgggaac

SEQ ID NO: 455856 - DNA, 1097 bp, Homo sapiens
acgcatgcacgcacgcacgcacgcggcggccggcggggccgcaggctcgcgcccgggctcgccccgcgccgctccagaggctcgcgcactcagcaggttgggctgcggcggcggcggcagctgtggaagctcaggcgctgcgcgtgagaggtcccagatacgtctgcggttccggctccgccaccctcagcttctcttccccaggtctgggagccgagtgcggaaggagggaacggccctagctttgggaagccagaggacacccctggctcctgccgacaccgccctccttcccttcccagccgcgggcctcgctcggtgctaggctactctgccgggaggcggcggcggctgccagtctgtggagagtcctgctgccctccagccgggctcctccaccgggccttgcaggggccgagagagctcggtgcccgcccttccgctcgcctttttcgtcagctggctggagcagcatcggtccgggaggtctctaggctgaggcggcggccgctcctctagttccacaatgtccacgggcggagacttcgggaatccgctgaggaaattcaagctggtgttcctgggggagcaaagcgttggaaagacatctttgatcaccagattcatgtatgacagttttgacaacacctatcaggtattttgtttttgccaatttatttgttgtctattttgtgttacaagtaatattcaagatatttttaaaaaattatttacttgcagttgtggatgtaaaagtactttctataatctgtaaaatgctgtataaatacaatgtgtaaatgattttgtccagtcctaggataaacttttatcatttgatttcttttgtctcttccaaagtctgttgaaatatatctccaatatcatctaggatggcattagaagtaatggtggatattctctatagattttgtccaagcctaggattctgtgacattttttatctacatttgaaattaagaataaatgaataatgaaattagaaatcattaacagaaggatatttggcacattcacaaatatgtgaaaattaaataatacactcctaaataattaatgtcaaagatgaaatcaca

SEQ ID NO: 455857 - DNA, 3515 bp, Homo sapiens
acgcatgcacgcacgcacgcacgcggcggccggcggggccgcaggctcgcgcccgggctcgccccgcgccgctccagaggctcgcgcactcagcaggttgggctgcggcggcggcggcagctgtggaagctcaggcgctgcgcgtgagaggtcccagatacgtctgcggttccggctccgccaccctcagcttctcttccccaggtctgggagccgagtgcggaaggagggaacggccctagctttgggaagccagaggacacccctggctcctgccgacaccgccctccttcccttcccagccgcgggcctcgctcggtgctaggctactctgccgggaggcggcggcggctgccagtctgtggagagtcctgctgccctccagccgggctcctccaccgggccttgcaggggccgagagagctcggtgcccgcccttccgctcgcctttttcgtcagctggctggagcagcatcggtccgggaggtctctaggctgaggcggcggccgctcctctagttccacaatgtccacgggcggagacttcgggaatccgctgaggaaattcaagctggtgttcctgggggagcaaagcgttggaaagacatctttgatcaccagattcatgtatgacagttttgacaacacctatcaggcaacaattggcattgactttttatcaaaaactatgtacttggaggatcgaacagtacgattgcaattatgggacacagcaggtcaagagcggttcaggagcttgattcctagctacattcgtgactccactgtggcagttgttgtttatgatatcacaaatgttaactcattccagcaaactacaaagtggattgatgatgtcagaacagaaagaggaagtgatgttatcatcatgctagtaggaaataaaacagatcttgctgacaagaggcaagtgtcaattgaggagggagagaggaaagccaaagagctgaatgttatgtttattgaaactagtgcaaaagctggatacaatgtaaagcagctctttcgacgtgtagcagcagctttgccgggaatggaaagcacacaggacagaagcagagaagatatgattgacataaaactggaaaagcctcaggagcaaccagtcagtgaaggaggctgttcctgctaatctcccatgtcatcttcaaccttcttcagaagctcactgctttggcccccttactctttcattgactgcagtgtgaatattggcttgaaccttttcccttcagtaataacgtattgcaattcatcattgctgcctgtctcgtggagatgatctattagcttcacaagcacaacaaaagtcagtgtcttcattatttatattttacaaaaagccaaaatatttcagcatattccagtgataactttaaaaattagatacattttcttaacatttttttcttttttaatgttatgataatgtacttcaaaatgatggaaatctcaacagtatgagtatggcttggttaacgagcggtatgttcacagcctactttatctctccttgcttttctcacctctcacttacccccattccctattaccctattcttacctagcctcccccgacttcctcaaaacaaacaagagatggcaaagcagcagttctaccaagcccattggaattatcctttaattttacagataccacttgctgtaggctacggaccaagatgtccaaaattattcttgagcactgataaaaattacggtcttctttgaggtcaaaattcagccatcatggtaggcagtgcttgaatgagaaaaggctcctggtgcatcttcaaaatgagtcctaaagaacatactgagtacttagaagtagaagaacataagatgtatttctgactaaaacaaatggctctttcacatgtgctttattagactctgggagagaaaattaaccaagtgcttcagaacaggtttttagtatttaattcttcacggtaagaaaatgaagttctaatgaactgtttctcccaaggttttaaaattgtcaagagttattctgtttgtttaaaaaataagaaacctctttaagcaatagatttgcttgggttttcttttttaaaaacataatactgtgcaggcaaggcactgtaaaagttttaattccttccagaagaaccagtggaagaatttaaatttggcgctacgatcaaaactactgaattagtagaaataatgatgtctaaagcttaccaacaaaagaaccctcagcagaataacaaaaactttgctcaggacatttgaggtcaaattgaagacggaaaccggaaaccgttttcttgtaagcccctagaggcagatcaggtaaagcatacatagtagagggaaaggagagaatggaaataaaactcaatattatgcagatttatgccttattttttagcattttttaaggttgggtctttcaggctggttttggtttgtattagatctgtatagtttaattaactggtgatttagttttatatttaagctacaattaatcttttttctttggtgatatttatttctttgccttttttttttttaacaactttcaatcttcagatgtttcgttgaatctatttagagcttcaccatggcaatatgtatttcccttaaaacactgcaaacaaatatactaggagtgtgcccttttaatctttactagttattgtgagattgctgtgtaagctaataaacacatttgtaaatacattgtttgcaggacgaaaacttctgagttacagctcaggaaaagcctgctgaatttatgttgtaagcattacttaacacagtataaagatgaaaagacaacaaaaatatcttcatacttcctcatcccctcattggaacaaaaccttaaactgggagaaccttagtcccctctctttcctcttcctcctccacttcccacttattgtcaccttgtaatattcagagagcacttggattatggatctgaatagagaaatgcttacagataatcattagcccacataccagtaactatacttaaagatgggatggagttgtaaagtgcttttataatacaatataattgttaaaggcaagggttgactctttgttttattttgacatggcatgtcctgaaataaatattgattcaatatgaaaaaaaaaaaaaaaaaaaaaaaaaaaaaaaaaaaaaaaaaaaaaaaaaaaaggggggggagcgcgcaaaaaaaaatacacccaagagggggccacaaatagtaaacacaaccaaggcgtttgtagaaaaaaggggggcccacaaaggagaggcagcagataaaaacaagagacgaagaggaaacacaatataacaagagcgcgagaagaggggaaaaaaggcgaaaaacgggaaacaacagagaagggagccacataacgcgggcgggagagcacaaagcgggcaaacaccacacgcgaggagcattacacgcgcccaggggggaaaactagcaacaccacagcgggacaacgggagaaac

SEQ ID NO: 455858 - DNA, 3414 bp, Homo sapiens
acgcatgcacgcacgcacgcacgcggcggccggcggggccgcaggctcgcgcccgggctcgccccgcgccgctccagaggctcgcgcactcagcaggttgggctgcggcggcggcggcagctgtggaagctcaggcgctgcgcgtgagaggtcccagatacgtctgcggttccggctccgccaccctcagcttctcttccccaggtctgggagccgagtgcggaaggagggaacggccctagctttgggaagccagaggacacccctggctcctgccgacaccgccctccttcccttcccagccgcgggcctcgctcggtgctaggctactctgccgggaggcggcggcggctgccagtctgtggagagtcctgctgccctccagccgggctcctccaccgggccttgcaggggccgagagagctcggtgcccgcccttccgctcgcctttttcgtcagctggctggagcagcatcggtccgggaggtctctaggctgaggcggcggccgctcctctagttccacaatgtccacgggcggagacttcgggaatccgctgaggaaattcaagctggtgttcctgggggagcaaagcgttggaaagacatctttgatcaccagattcatgtatgacagttttgacaacacctatcaggcaacaattggcattgactttttatcaaaaactatgtacttggaggatcgaacagtacgattgcaattatgggacacagcaggtcaagagcggttcaggagcttgattcctagctacattcgtgactccactgtggcagttgttgtttatgatatcacaaatgttaactcattccagcaaactacaaagtggattgatgatgtcagaacagaaagaggaagtgatgttatcatcatgctagtaggaaataaaacagatcttgctgacaagaggcaagtgtcaattgaggagggagagaggaaagccaaagagctgaatgttatgtttattgaaactagtgcaaaagctggatacaatgtaaagcagctctttcgacgtgtagcagcagctttgccgggaatggaaagcacacaggacagaagcagagaagatatgattgacataaaactggaaaagcctcaggagcaaccagtcagtgaaggaggctgttcctgctaatctcccatgtcatcttcaaccttcttcagaagctcactgctttggcccccttactctttcattgactgcagtgtgaatattggcttgaaccttttcccttcagtaataacgtattgcaattcatcattgctgcctgtctcgtggagatgatctattagcttcacaagcacaacaaaagtcagtgtcttcattatttatattttacaaaaagccaaaatatttcagcatattccagtgataactttaaaaattagatacattttcttaacatttttttcttttttaatgttatgataatgtacttcaaaatgatggaaatctcaacagtatgagtatggcttggttaacgagcggtatgttcacagcctactttatctctccttgcttttctcacctctcacttacccccattccctattaccctattcttacctagcctcccccgacttcctcaaaacaaacaagagatggcaaagcagcagttctaccaagcccattggaattatcctttaattttacagataccacttgctgtaggctacggaccaagatgtccaaaattattcttgagcactgataaaaattacggtcttctttgaggtcaaaattcagccatcatggtaggcagtgcttgaatgagaaaaggctcctggtgcatcttcaaaatgagtcctaaagaacatactgagtacttagaagtagaagaacataagatgtatttctgactaaaacaaatggctctttcacatgtgctttattagactctgggagagaaaattaaccaagtgcttcagaacaggtttttagtatttaattcttcacggtaagaaaatgaagttctaatgaactgtttctcccaaggttttaaaattgtcaagagttattctgtttgtttaaaaaataagaaacctctttaagcaatagatttgcttgggttttcttttttaaaaacataatactgtgcaggcaaggcactgtaaaagttttaattccttccagaagaaccagtggaagaatttaaatttggcgctacgatcaaaactactgaattagtagaaataatgatgtctaaagcttaccaacaaaagaaccctcagcagaataacaaaaactttgctcaggacatttgaggtcaaattgaagacggaaaccggaaaccgttttcttgtaagcccctagaggcagatcaggtaaagcatacatagtagagggaaaggagagaatggaaataaaactcaatattatgcagatttatgccttattttttagcattttttaaggttgggtctttcaggctggttttggtttgtattagatctgtatagtttaattaactggtgatttagttttatatttaagctacaattaatcttttttctttggtgatatttatttctttgccttttttttttttaacaactttcaatcttcagatgtttcgttgaatctatttagagcttcaccatggcaatatgtatttcccttaaaacactgcaaacaaatatactaggagtgtgcccttttaatctttactagttattgtgagattgctgtgtaagctaataaacacatttgtaaatacattgtttgcaggacgaaaacttctgagttacagctcaggaaaagcctgctgaatttatgttgtaagcattacttaacacagtataaagatgaaaagacaacaaaaatatcttcatacttcctcatcccctcattggaacaaaaccttaaactgggagaaccttagtcccctctctttcctcttcctcctccacttcccacttattgtcaccttgtaatattcagagagcacttggattatggatctgaatagagaaatgcttacagataatcattagcccacataccagtaactatacttaaagatgggatggagttgtaaagtgcttttataatacaatataattgttaaaggcaagggttgactctttgttttattttgacatggcatgtcctgaaataaatattgattcaatatggcagatgggtcatattctttatttggaagaagttgtgacttctgacatgggtgtgattgtcttcctacactgttgcatttgattctttttatgtatttttaagaaagtaaccagttatactgcttttaatattgattggtctttttatttggcttggagttcttcaaagcattgaagtgtgttcatagtccaggttttttttttaataaacacaattttgctgccaaaaatatataaataaaacacgaaagaaaacaatta

SEQ ID NO: 455859 - DNA, 3153 bp, Homo sapiens
acgcatgcacgcacgcacgcacgcggcggccggcggggccgcaggctcgcgcccgggctcgccccgcgccgctccagaggctcgcgcactcagcaggttgggctgcggcggcggcggcagctgtggaagctcaggcgctgcgcgtgagaggtcccagatacgtctgcggttccggctccgccaccctcagcttctcttccccaggtctgggagccgagtgcggaaggagggaacggccctagctttgggaagccagaggacacccctggctcctgccgacaccgccctccttcccttcccagccgcgggcctcgctcggtgctaggctactctgccgggaggcggcggcggctgccagtctgtggagagtcctgctgccctccagccgggctcctccaccgggccttgcaggggccgagagagctcggtgcccgcccttccgctcgcctttttcgtcagctggctggagcagcatcggtccgggaggtctctaggctgaggcggcggccgctcctctagttccacaatgtccacgggcggagacttcgggaatccgctgaggaaattcaagctggtgttcctgggggagcaaagcgttggaaagacatctttgatcaccagattcatgtatgacagttttgacaacacctatcaggcaacaattggcattgactttttatcaaaaactatgtacttggaggatcgaacaatcaggcttcagctgtgggatactgcgggtcaggaacgtttccgtagcctcattcccagttacatccgtgattctgctgcagctgtagtagtttacgatatcacaaatgttaactcattccagcaaactacaaagtggattgatgatgtcagaacagaaagaggaagtgatgttatcatcatgctagtaggaaataaaacagatcttgctgacaagaggcaagtgtcaattgaggagggagagaggaaagccaaagagctgaatgttatgtttattgaaactagtgcaaaagctggatacaatgtaaagcagctctttcgacgtgtagcagcagctttgccgggaatggaaagcacacaggacagaagcagagaagatatgattgacataaaactggaaaagcctcaggagcaaccagtcagtgaaggaggctgttcctgctaatctcccatgtcatcttcaaccttcttcagaagctcactgctttggcccccttactctttcattgactgcagtgtgaatattggcttgaaccttttcccttcagtaataacgtattgcaattcatcattgctgcctgtctcgtggagatgatctattagcttcacaagcacaacaaaagtcagtgtcttcattatttatattttacaaaaagccaaaatatttcagcatattccagtgataactttaaaaattagatacattttcttaacatttttttcttttttaatgttatgataatgtacttcaaaatgatggaaatctcaacagtatgagtatggcttggttaacgagcggtatgttcacagcctactttatctctccttgcttttctcacctctcacttacccccattccctattaccctattcttacctagcctcccccgacttcctcaaaacaaacaagagatggcaaagcagcagttctaccaagcccattggaattatcctttaattttacagataccacttgctgtaggctacggaccaagatgtccaaaattattcttgagcactgataaaaattacggtcttctttgaggtcaaaattcagccatcatggtaggcagtgcttgaatgagaaaaggctcctggtgcatcttcaaaatgagtcctaaagaacatactgagtacttagaagtagaagaacataagatgtatttctgactaaaacaaatggctctttcacatgtgctttattagactctgggagagaaaattaaccaagtgcttcagaacaggtttttagtatttaattcttcacggtaagaaaatgaagttctaatgaactgtttctcccaaggttttaaaattgtcaagagttattctgtttgtttaaaaaataagaaacctctttaagcaatagatttgcttgggttttcttttttaaaaacataatactgtgcaggcaaggcactgtaaaagttttaattccttccagaagaaccagtggaagaatttaaatttggcgctacgatcaaaactactgaattagtagaaataatgatgtctaaagcttaccaacaaaagaaccctcagcagaataacaaaaactttgctcaggacatttgaggtcaaattgaagacggaaaccggaaaccgttttcttgtaagcccctagaggcagatcaggtaaagcatacatagtagagggaaaggagagaatggaaataaaactcaatattatgcagatttatgccttattttttagcattttttaaggttgggtctttcaggctggttttggtttgtattagatctgtatagtttaattaactggtgatttagttttatatttaagctacaattaatcttttttctttggtgatatttatttctttgccttttttttttttaacaactttcaatcttcagatgtttcgttgaatctatttagagcttcaccatggcaatatgtatttcccttaaaacactgcaaacaaatatactaggagtgtgcccttttaatctttactagttattgtgagattgctgtgtaagctaataaacacatttgtaaatacattgtttgcaggacgaaaacttctgagttacagctcaggaaaagcctgctgaatttatgttgtaagcattacttaacacagtataaagatgaaaagacaacaaaaatatcttcatacttcctcatcccctcattggaacaaaaccttaaactgggagaaccttagtcccctctctttcctcttcctcctccacttcccacttattgtcaccttgtaatattcagagagcacttggattatggatctgaatagagaaatgcttacagataatcattagcccacataccagtaactatacttaaagatgggatggagttgtaaagtgcttttataatacaatataattgttaaaggcaagggttgactctttgttttattttgacatggcatgtcctgaaataaatattgattcaatatg

SEQ ID NO: 455860 - DNA, 3111 bp, Homo sapiens
acgcatgcacgcacgcacgcacgcggcggccggcggggccgcaggctcgcgcccgggctcgccccgcgccgctccagaggctcgcgcactcagcaggttgggctgcggcggcggcggcagctgtggaagctcaggcgctgcgcgtgagaggtcccagatacgtctgcggttccggctccgccaccctcagcttctcttccccaggtctgggagccgagtgcggaaggagggaacggccctagctttgggaagccagaggacacccctggctcctgccgacaccgccctccttcccttcccagccgcgggcctcgctcggtgctaggctactctgccgggaggcggcggcggctgccagtctgtggagagtcctgctgccctccagccgggctcctccaccgggccttgcaggggccgagagagctcggtgcccgcccttccgctcgcctttttcgtcagctggctggagcagcatcggtccgggaggtctctaggctgaggcggcgggaatccgctgaggaaattcaagctggtgttcctgggggagcaaagcgttggaaagacatctttgatcaccagattcatgtatgacagttttgacaacacctatcaggcaacaattggcattgactttttatcaaaaactatgtacttggaggatcgaacagtacgattgcaattatgggacacagcaggtcaagagcggttcaggagcttgattcctagctacattcgtgactccactgtggcagttgttgtttatgatatcacaaatgttaactcattccagcaaactacaaagtggattgatgatgtcagaacagaaagaggaagtgatgttatcatcatgctagtaggaaataaaacagatcttgctgacaagaggcaagtgtcaattgaggagggagagaggaaagccaaagagctgaatgttatgtttattgaaactagtgcaaaagctggatacaatgtaaagcagctctttcgacgtgtagcagcagctttgccgggaatggaaagcacacaggacagaagcagagaagatatgattgacataaaactggaaaagcctcaggagcaaccagtcagtgaaggaggctgttcctgctaatctcccatgtcatcttcaaccttcttcagaagctcactgctttggcccccttactctttcattgactgcagtgtgaatattggcttgaaccttttcccttcagtaataacgtattgcaattcatcattgctgcctgtctcgtggagatgatctattagcttcacaagcacaacaaaagtcagtgtcttcattatttatattttacaaaaagccaaaatatttcagcatattccagtgataactttaaaaattagatacattttcttaacatttttttcttttttaatgttatgataatgtacttcaaaatgatggaaatctcaacagtatgagtatggcttggttaacgagcggtatgttcacagcctactttatctctccttgcttttctcacctctcacttacccccattccctattaccctattcttacctagcctcccccgacttcctcaaaacaaacaagagatggcaaagcagcagttctaccaagcccattggaattatcctttaattttacagataccacttgctgtaggctacggaccaagatgtccaaaattattcttgagcactgataaaaattacggtcttctttgaggtcaaaattcagccatcatggtaggcagtgcttgaatgagaaaaggctcctggtgcatcttcaaaatgagtcctaaagaacatactgagtacttagaagtagaagaacataagatgtatttctgactaaaacaaatggctctttcacatgtgctttattagactctgggagagaaaattaaccaagtgcttcagaacaggtttttagtatttaattcttcacggtaagaaaatgaagttctaatgaactgtttctcccaaggttttaaaattgtcaagagttattctgtttgtttaaaaaataagaaacctctttaagcaatagatttgcttgggttttcttttttaaaaacataatactgtgcaggcaaggcactgtaaaagttttaattccttccagaagaaccagtggaagaatttaaatttggcgctacgatcaaaactactgaattagtagaaataatgatgtctaaagcttaccaacaaaagaaccctcagcagaataacaaaaactttgctcaggacatttgaggtcaaattgaagacggaaaccggaaaccgttttcttgtaagcccctagaggcagatcaggtaaagcatacatagtagagggaaaggagagaatggaaataaaactcaatattatgcagatttatgccttattttttagcattttttaaggttgggtctttcaggctggttttggtttgtattagatctgtatagtttaattaactggtgatttagttttatatttaagctacaattaatcttttttctttggtgatatttatttctttgccttttttttttttaacaactttcaatcttcagatgtttcgttgaatctatttagagcttcaccatggcaatatgtatttcccttaaaacactgcaaacaaatatactaggagtgtgcccttttaatctttactagttattgtgagattgctgtgtaagctaataaacacatttgtaaatacattgtttgcaggacgaaaacttctgagttacagctcaggaaaagcctgctgaatttatgttgtaagcattacttaacacagtataaagatgaaaagacaacaaaaatatcttcatacttcctcatcccctcattggaacaaaaccttaaactgggagaaccttagtcccctctctttcctcttcctcctccacttcccacttattgtcaccttgtaatattcagagagcacttggattatggatctgaatagagaaatgcttacagataatcattagcccacataccagtaactatacttaaagatgggatggagttgtaaagtgcttttataatacaatataattgttaaaggcaagggttgactctttgttttattttgacatggcatgtcctgaaataaatattgattcaatatg

SEQ ID NO: 455861 - DNA, 2980 bp, Homo sapiens
acgcatgcacgcacgcacgcacgcggcggccggcggggccgcaggctcgcgcccgggctcgccccgcgccgctccagaggctcgcgcactcagcaggttgggctgcggcggcggcggcagctgtggaagctcaggcgctgcgcgtgagaggtcccagatacgtctgcggttccggctccgccaccctcagcttctcttccccaggtctgggagccgagtgcggaaggagggaacggccctagctttgggaagccagaggacacccctggctcctgccgacaccgccctccttcccttcccagccgcgggcctcgctcggtgctaggctactctgccgggaggcggcggcggctgccagtctgtggagagtcctgctgccctccagccgggctcctccaccgggccttgcaggggccgagagagctcggtgcccgcccttccgctcgcctttttcgtcagctggctggagcagcatcggtccgggaggtctctaggctgaggcggcggccgctcctctagttccacaatgtccacgggcggagacttcgggaatccgctgaggaaattcaagctggtgttcctgggggagcaaagcgttggaaagacatctttgatcaccagattcatgtatgacagttttgacaacacctatcaggcaacaattggcattgactttttatcaaaaactatgtacttggaggatcgaacaatgttaactcattccagcaaactacaaagtggattgatgatgtcagaacagaaagaggaagtgatgttatcatcatgctagtaggaaataaaacagatcttgctgacaagaggcaagtgtcaattgaggagggagagaggaaagccaaagagctgaatgttatgtttattgaaactagtgcaaaagctggatacaatgtaaagcagtgattgacataaaactggaaaagcctcaggagcaaccagtcagtgaaggaggctgttcctgctaatctcccatgtcatcttcaaccttcttcagaagctcactgctttggcccccttactctttcattgactgcagtgtgaatattggcttgaaccttttcccttcagtaataacgtattgcaattcatcattgctgcctgtctcgtggagatgatctattagcttcacaagcacaacaaaagtcagtgtcttcattatttatattttacaaaaagccaaaatatttcagcatattccagtgataactttaaaaattagatacattttcttaacatttttttcttttttaatgttatgataatgtacttcaaaatgatggaaatctcaacagtatgagtatggcttggttaacgagcggtatgttcacagcctactttatctctccttgcttttctcacctctcacttacccccattccctattaccctattcttacctagcctcccccgacttcctcaaaacaaacaagagatggcaaagcagcagttctaccaagcccattggaattatcctttaattttacagataccacttgctgtaggctacggaccaagatgtccaaaattattcttgagcactgataaaaattacggtcttctttgaggtcaaaattcagccatcatggtaggcagtgcttgaatgagaaaaggctcctggtgcatcttcaaaatgagtcctaaagaacatactgagtacttagaagtagaagaacataagatgtatttctgactaaaacaaatggctctttcacatgtgctttattagactctgggagagaaaattaaccaagtgcttcagaacaggtttttagtatttaattcttcacggtaagaaaatgaagttctaatgaactgtttctcccaaggttttaaaattgtcaagagttattctgtttgtttaaaaaataagaaacctctttaagcaatagatttgcttgggttttcttttttaaaaacataatactgtgcaggcaaggcactgtaaaagttttaattccttccagaagaaccagtggaagaatttaaatttggcgctacgatcaaaactactgaattagtagaaataatgatgtctaaagcttaccaacaaaagaaccctcagcagaataacaaaaactttgctcaggacatttgaggtcaaattgaagacggaaaccggaaaccgttttcttgtaagcccctagaggcagatcaggtaaagcatacatagtagagggaaaggagagaatggaaataaaactcaatattatgcagatttatgccttattttttagcattttttaaggttgggtctttcaggctggttttggtttgtattagatctgtatagtttaattaactggtgatttagttttatatttaagctacaattaatcttttttctttggtgatatttatttctttgccttttttttttttaacaactttcaatcttcagatgtttcgttgaatctatttagagcttcaccatggcaatatgtatttcccttaaaacactgcaaacaaatatactaggagtgtgcccttttaatctttactagttattgtgagattgctgtgtaagctaataaacacatttgtaaatacattgtttgcaggacgaaaacttctgagttacagctcaggaaaagcctgctgaatttatgttgtaagcattacttaacacagtataaagatgaaaagacaacaaaaatatcttcatacttcctcatcccctcattggaacaaaaccttaaactgggagaaccttagtcccctctctttcctcttcctcctccacttcccacttattgtcaccttgtaatattcagagagcacttggattatggatctgaatagagaaatgcttacagataatcattagcccacataccagtaactatacttaaagatgggatggagttgtaaagtgcttttataatacaatataattgttaaaggcaagggttgactctttgttttattttgacatggcatgtcctgaaataaatattgattcaatatg

SEQ ID NO: 455862 - DNA, 2281 bp, Homo sapiens
ttgcaggaccctgtggaatcgtggtgctgctgcaccccttctttgctggcaggaggcaagtgtcaattgaggagggagagaggaaagccaaagagctgaatgttatgtttattgaaactagtgcaaaagctggatacaatgtaaagcagctctttcgacgtgtagcagcagctttgccgggaatggaaagcacacaggacagaagcagagaagatatgattgacataaaactggaaaagcctcaggagcaaccagtcagtgaaggaggctgttcctgctaatctcccatgtcatcttcaaccttcttcagaagctcactgctttggcccccttactctttcattgactgcagtgtgaatattggcttgaaccttttcccttcagtaataacgtattgcaattcatcattgctgcctgtctcgtggagatgatctattagcttcacaagcacaacaaaagtcagtgtcttcattatttatattttacaaaaagccaaaatatttcagcatattccagtgataactttaaaaattagatacattttcttaacatttttttcttttttaatgttatgataatgtacttcaaaatgatggaaatctcaacagtatgagtatggcttggttaacgagcggtatgttcacagcctactttatctctccttgcttttctcacctctcacttacccccattccctattaccctattcttacctagcctcccccgacttcctcaaaacaaacaagagatggcaaagcagcagttctaccaagcccattggaattatcctttaattttacagataccacttgctgtaggctacggaccaagatgtccaaaattattcttgagcactgataaaaattacggtcttctttgaggtcaaaattcagccatcatggtaggcagtgcttgaatgagaaaaggctcctggtgcatcttcaaaatgagtcctaaagaacatactgagtacttagaagtagaagaacataagatgtatttctgactaaaacaaatggctctttcacatgtgctttattagactctgggagagaaaattaaccaagtgcttcagaacaggtttttagtatttaattcttcacggtaagaaaatgaagttctaatgaactgtttctcccaaggttttaaaattgtcaagagttattctgtttgtttaaaaaataagaaacctctttaagcaatagatttgcttgggttttcttttttaaaaacataatactgtgcaggcaaggcactgtaaaagttttaattccttccagaagaaccagtggaagaatttaaatttggcgctacgatcaaaactactgaattagtagaaataatgatgtctaaagcttaccaacaaaagaaccctcagcagaataacaaaaactttgctcaggacatttgaggtcaaattgaagacggaaaccggaaaccgttttcttgtaagcccctagaggcagatcaggtaaagcatacatagtagagggaaaggagagaatggaaataaaactcaatattatgcagatttatgccttattttttagcattttttaaggttgggtctttcaggctggttttggtttgtattagatctgtatagtttaattaactggtgatttagttttatatttaagctacaattaatcttttttctttggtgatatttatttctttgccttttttttttttaacaactttcaatcttcagatgtttcgttgaatctatttagagcttcaccatggcaatatgtatttcccttaaaacactgcaaacaaatatactaggagtgtgcccttttaatctttactagttattgtgagattgctgtgtaagctaataaacacatttgtaaatacattgtttgcaggacgaaaacttctgagttacagctcaggaaaagcctgctgaatttatgttgtaagcattacttaacacagtataaagatgaaaagacaacaaaaatatcttcatacttcctcatcccctcattggaacaaaaccttaaactgggagaaccttagtcccctctctttcctcttcctcctccacttcccacttattgtcaccttgtaatattcagagagcacttggattatggatctgaatagagaaatgcttacagataatcattagcccacataccagtaactatacttaaagatgggatggagttgtaaagtgcttttataatacaatataattgttaaaggcaagggttgactctttgttttattttgacatggcatgtcctgaaataaatattgattcaatatg

SEQ ID NO: 455863 - DNA, 1711 bp, Homo sapiens
ctcaacgctttatacttcctcagcttttctttctcaacgctttatacttctaagtactcgagcggtatgttcacagcctactttatctctccttgcttttctcacctctcacttacccccattccctattaccctattcttacctagcctcccccgacttcctcaaaacaaacaagagatggcaaagcagcagttctaccaagcccattggaattatcctttaattttacagataccacttgctgtaggctacggaccaagatgtccaaaattattcttgagcactgataaaaattacggtcttctttgaggtcaaaattcagccatcatggtaggcagtgcttgaatgagaaaaggctcctggtgcatcttcaaaatgagtcctaaagaacatactgagtacttagaagtagaagaacataagatgtatttctgactaaaacaaatggctctttcacatgtgctttattagactctgggagagaaaattaaccaagtgcttcagaacaggtttttagtatttaattcttcacggtaagaaaatgaagttctaatgaactgtttctcccaaggttttaaaattgtcaagagttattctgtttgtttaaaaaataagaaacctctttaagcaatagatttgcttgggttttcttttttaaaaacataatactgtgcaggcaaggcactgtaaaagttttaattccttccagaagaaccagtggaagaatttaaatttggcgctacgatcaaaactactgaattagtagaaataatgatgtctaaagcttaccaacaaaagaaccctcagcagaataacaaaaactttgctcaggacatttgaggtcaaattgaagacggaaaccggaaaccgttttcttgtaagcccctagaggcagatcaggtaaagcatacatagtagagggaaaggagagaatggaaataaaactcaatattatgcagatttatgccttattttttagcattttttaaggttgggtctttcaggctggttttggtttgtattagatctgtatagtttaattaactggtgatttagttttatatttaagctacaattaatcttttttctttggtgatatttatttctttgccttttttttttttaacaactttcaatcttcagatgtttcgttgaatctatttagagcttcaccatggcaatatgtatttcccttaaaacactgcaaacaaatatactaggagtgtgcccttttaatctttactagttattgtgagattgctgtgtaagctaataaacacatttgtaaatacattgtttgcaggacgaaaacttctgagttacagctcaggaaaagcctgctgaatttatgttgtaagcattacttaacacagtataaagatgaaaagacaacaaaaatatcttcatacttcctcatcccctcattggaacaaaaccttaaactgggagaaccttagtcccctctctttcctcttcctcctccacttcccacttattgtcaccttgtaatattcagagagcacttggattatggatctgaatagagaaatgcttacagataatcattagcccacataccagtaactatacttaaagatgggatggagttgtaaagtgcttttataatacaatataattgttaaaggcaagggttgactctttgttttattttgacatggcatgtcctgaaataaatattgattcaatatg

SEQ ID NO: 455864 - DNA, 1332 bp, Homo sapiens
acgcatgcacgcacgcacgcacgcggcggccggcggggccgcaggctcgcgcccgggctcgccccgcgccgctccagaggctcgcgcactcagcaggttgggctgcggcggcggcggcagctgtggaagctcaggcgctgcgcgtgagaggtcccagatacgtctgcggttccggctccgccaccctcagcttctcttccccaggtctgggagccgagtgcggaaggagggaacggccctagctttgggaagccagaggacacccctggctcctgccgacaccgccctccttcccttcccagccgcgggcctcgctcggtgctaggctactctgccgggaggcggcggcggctgccagtctgtggagagtcctgctgccctccagccgggctcctccaccgggccttgcaggggccgagagagctcggtgcccgcccttccgctcgcctttttcgtcagctggctggagcagcatcggtccgggaggtctctaggctgaggcggcggccgctcctctagttccacaatgtccacgggcggagacttcgggaatccgctgaggaaattcaagctggtgttcctgggggagcaaagcgttggaaagacatctttgatcaccagattcatgtatgacagttttgacaacacctatcaggcaacaattggcattgactttttatcaaaaactatgtacttggaggatcgaacagtacgattgcaattatgggacacagcaggtcaagagcggttcaggagcttgattcctagctacattcgtgactccactgtggcagttgttgtttatgatatcacaaatgttaactcattccagcaaactacaaagtggattgatgatgtcagaacagaaagaggaagtgatgttatcatcatgctagtaggaaataaaacagatcttgctgacaagaggcaagtgtcaattgaggagggagagaggaaagccaaagagctgaatgttatgtttattgaaactagtgcaaaagctggatacaatgtaaagcagctctttcgacgtgtagcagcagctttgccgggaatggaaagcacacaggacagaagcagagaagatatgattgacataaaactggaaaagcctcaggagcaaccagtcagtgaaggaggctgttcctgctaatctcccatgtcatcttcaaccttcttcagaagctcactgctttggcccccttactctttcattgactgcagtgtgaatattggcttgaaccttttcccttcagtaataacgtattgcaattcaacacgtgcgtgttgcctgcttttgatgttgctcgagtgatactcatacacggacac

SEQ ID NO: 455865 - DNA, 510 bp, Homo sapiens
cggccgctcctctagttccacaatgtccacgggcggagacttcgggaatccgctgaggaaattcaagctggtgttcctgggggagcaaagcggtgagtgcgtggctcccctactcctggcagctggccgcagcgtccccgcaccgcccccggtcggcccttccgtccgcggaggctccctgcccgcctcgcgtccgcgctcgttgccaccgcagcccttcccgatgtgccccccggtgccactggctcttcgccagtggccgagtttttaccctgttccccgggttcttcaatcctcgactccccggctccgttcctcgcagtccggccatctccggtcgatctgccctccctccccagacctcaccccgcccagcctcttgtccatccctttcttcctccggtctcggtcattgcccgtaccccggccccctttcttgagccccacccttattccttgctcttttcccagttcctcagctctgtgaggcccactcagggaagccccact

SEQ ID NO: 455866 - DNA, 2055 bp, Homo sapiens
ggcgggaattcccgactctaggccggaagcgcgcggagaccatgtagtgagaccctcgcgaggtctgagagtcactggagctaccagaagcatcatggggccctggggagagccagagctcctggtgtggcgccccgaggcggtagcttcagagcctccagtgcctgtggggctggaggtgaagttgggggccctggtgctgctgctggtgctcaccctcctctgcagcctggtgcccatctgtgtgctgcgccggccaggagctaaccatgaaggctcagcttcccgccagaaagccctgagcctagtaagctgtttcgcggggggcgtctttttggccacttgtctcctggacctgctgcctgactacctggctgccatagatgaggccctggcagccttgcacgtgacgctccagttcccactgcaagagttcatcctggccatgggcttcttcctggtcctggtgatggagcagatcacactggcttacaaggagcagtcagggccgtcacctctggaggaaacaagggctctgctgggaacagtgaatggtgggccgcagcattggcatgatgggccaggggtcccacaggcgagtggagccccagcaaccccctcagccttgcgtgcctgtgtactggtgttctccctggccctccactccgtgttcgaggggctggcggtagggctgcagcgagaccgggctcgggccatggagctgtgcctggctttgctgctccacaagggcatcctggctgtcagcctgtccctgcggctgttgcagagccaccttagggcacaggtggtggctggctgtgggatcctcttctcatgcatgacacctctaggcatcgggctgggtgcagctctggcagagtcggcaggacctctgcaccagctggcccagtctgtgctagagggcatggcagctggcacctttctctatatcacctttctggaaatcctgccccaggagctggccagttctgagcaaaggatcctcaaggtcattctgctcctagcaggctttgccctgctcactggcctgctcttcatccaaatctagggggcttcaagagaggggcaggggagattgatgatcaggtgcccctgttctcccttccctcccccagttgtggggaataggaaggaaaggggaagggaaatactgaggaccaaaaagttctctgggagctaaagatagagcctttggggctatctgactaatgagagggaagtgggcagacaagaggctggccccagtcccaaggaacaagagatggtcaagtcgctagagacatatcaggggacattaggattggggaagacacttgactgctagaatcagaggttggacactatacataaggacaggctcacatgggaggctggaggtgggtacccagctgctgtggaacgggtatggacaggtcataaacctagagtcagtgtcctgttggtcctagcccatttcagcaccctgccacttggagtggacccctcctactcttcttagcgcctaccctcatacctatctccctcctcccatctcctaggggactggcgccaaatggtctctccctgccaattttggtatcttctctggcctctccagtcctgcttactcctctatttttaaagtgccaaacaaatccccttcctctttctcaaagcacagtaatgtggcactgagccctacccagcacctcagtgaagggggcctgcttgctctttattttggtcccggatcctggggtggggcagaaatattttctgggctggggtaggaggaaggttgttgcagccatctactgctgctgtaccctaggaatatggggacatggacatggtgtcccatgcccagatgataaacactgagctgccaaaacatttttttaaatacacccgaggagcccaagggggaagggcaatgcctacccccagcgttatttttggggagggagggctgtgcatagggacatattctttagaatctattttattaactgacctgttttgggacctgttacccaaataaaagatgtttctaga

SEQ ID NO: 455867 - DNA, 2018 bp, Homo sapiens
agagagagagagagagagagagagagtctgagagtcactggagctaccagaagcatcatggggccctggggagagccagagctcctggtgtggcgccccgaggcggtagcttcagagcctccagtgcctgtggggctggaggtgaagttgggggccctggtgctgctgctggtgctcaccctcctctgcagcctggtgcccatctgtgtgctgcgccggccaggagctaaccatgaaggctcagcttcccgccagaaagccctgagcctagtaagctgtttcgcggggggcgtctttttggccacttgtctcctggacctgctgcctgactacctggctgccatagatgaggccctggcagccttgcacgtgacgctccagttcccactgcaagagttcatcctggccatgggcttcttcctggtcctggtgatggagcagatcacactggcttacaaggagcagtcagggccgtcacctctggaggaaacaagggctctgctgggaacagtgaatggtgggccgcagcattggcatgatgggccaggggtcccacaggcgagtggagccccagcaaccccctcagccttgcgtgcctgtgtactggtgttctccctggccctccactccgtgttcgaggggctggcggtagggctgcagcgagaccgggctcgggccatggagctgtgcctggctttgctgctccacaagggcatcctggctgtcagcctgtccctgcggctgttgcagagccaccttagggcacaggtggtggctggctgtgggatcctcttctcatgcatgacacctctaggcatcgggctgggtgcagctctggcagagtcggcaggacctctgcaccagctggcccagtctgtgctagagggcatggcagctggcacctttctctatatcacctttctggaaatcctgccccaggagctggccagttctgagcaaaggatcctcaaggtcattctgctcctagcaggctttgccctgctcactggcctgctcttcatccaaatctagggggcttcaagagaggggcaggggagattgatgatcaggtgcccctgttctcccttccctcccccagttgtggggaataggaaggaaaggggaagggaaatactgaggaccaaaaagttctctgggagctaaagatagagcctttggggctatctgactaatgagagggaagtgggcagacaagaggctggccccagtcccaaggaacaagagatggtcaagtcgctagagacatatcaggggacattaggattggggaagacacttgactgctagaatcagaggttggacactatacataaggacaggctcacatgggaggctggaggtgggtacccagctgctgtggaacgggtatggacaggtcataaacctagagtcagtgtcctgttggtcctagcccatttcagcaccctgccacttggagtggacccctcctactcttcttagcgcctaccctcatacctatctccctcctcccatctcctaggggactggcgccaaatggtctctccctgccaattttggtatcttctctggcctctccagtcctgcttactcctctatttttaaagtgccaaacaaatccccttcctctttctcaaagcacagtaatgtggcactgagccctacccagcacctcagtgaagggggcctgcttgctctttattttggtcccggatcctggggtggggcagaaatattttctgggctggggtaggaggaaggttgttgcagccatctactgctgctgtaccctaggaatatggggacatggacatggtgtcccatgcccagatgataaacactgagctgccaaaacatttttttaaatacacccgaggagcccaagggggaagggcaatgcctacccccagcgttatttttggggagggagggctgtgcatagggacatattctttagaatctattttattaactgacctgttttgggacctgttacccaaataaaagatgtttctaga

SEQ ID NO: 455868 - DNA, 573 bp, Homo sapiens
gagcaggggacgcgggcgccgccgtttgggaggcgcaggttgagggccgaggggcaggaagaaggattttgccgggggagaccgaaacaccggagaggttcggggtgtagaggcgactgggggccgagtacgtgaggtgggagtgggcggagaggggagatgaagtccggcggaggtaggaggtgagtggtccttgtgcatccctgacggagtcccctcgaggacgctactgaagcatgcctggtattggggtatggcctgggaggagggctgcttgtctgtaacctggctcctctgagtttgtgatctcctccaaactggtccctctgccttctgcgctttggtgcccccgggaaagggccccttgagtggtttgaacgagcggtgctgtgtatagtggggcaggaagtcccctcctgcgtcccgtccttttgcttcctttttcaaatacttcttgtggtttcctgacgtgaatgaaggtgaggtccattgcttggtgttttgtcctggcctccttggaggagaggtagggttttgaatccgacaactgggtaaccgtccgaccataagttg

SEQ ID NO: 455869 - DNA, 2052 bp, Homo sapiens
  misc_feature (19)..(19): n is a, c, g, or t
ttaggctaggtacgaggcnggtgtgaatcggccgaggcatgtagtgagaccctcgcgaggtctgagagtcactggagctaccagaagcatcatggggccctggggagagccagagctcctggtgtggcgccccgaggcggtagcttcagagcctccagtgcctgtggggctggaggtgaagttgggggccctggtgctgctgctggtgctcaccctcctctgcagcctggtgcccatctgtgtgctgcgccggccaggagctaaccatgaaggctcagcttcccgccagaaagccctgagcctagtaagctgtttcgcggggggcgtctttttggccacttgtctcctggacctgctgcctgactacctggctgccatagatgaggccctggcagccttgcacgtgacgctccagttcccactgcaagagttcatcctggccatgggcttcttcctggtcctggtgatggagcagatcacactggcttacaaggagcagtcagggccgtcacctctggaggaaacaagggctctgctgggaacagtgaatggtgggccgcagcattggcatgatgggccaggggtcccacaggcgagtggagccccagcaaccccctcagccttgcgtgcctgtgtactggtgttctccctggccctccactccgtgttcgaggggctggcggtagggctgcagcgagaccgggctcgggccatggagctgtgcctggctttgctgctccacaagggcatcctggctgtcagcctgtccctgcggctgttgcagagccaccttagggcacaggtggtggctggctgtgggatcctcttctcatgcatgacacctctaggcatcgggctgggtgcagctctggcagagtcggcaggacctctgcaccagctggcccagtctgtgctagagggcatggcagctggcacctttctctatatcacctttctggaaatcctgccccaggagctggccagttctgagcaaaggatcctcaaggtcattctgctcctagcaggctttgccctgctcactggcctgctcttcatccaaatctagggggcttcaagagaggggcaggggagattgatgatcaggtgcccctgttctcccttccctcccccagttgtggggaataggaaggaaaggggaagggaaatactgaggaccaaaaagttctctgggagctaaagatagagcctttggggctatctgactaatgagagggaagtgggcagacaagaggctggccccagtcccaaggaacaagagatggtcaagtcgctagagacatatcaggggacattaggattggggaagacacttgactgctagaatcagaggttggacactatacataaggacaggctcacatgggaggctggaggtgggtacccagctgctgtggaacgggtatggacaggtcataaacctagagtcagtgtcctgttggtcctagcccatttcagcaccctgccacttggagtggacccctcctactcttcttagcgcctaccctcatacctatctccctcctcccatctcctaggggactggcgccaaatggtctctccctgccaattttggtatcttctctggcctctccagtcctgcttactcctctatttttaaagtgccaaacaaatccccttcctctttctcaaagcacagtaatgtggcactgagccctacccagcacctcagtgaagggggcctgcttgctctttattttggtcccggatcctggggtggggcagaaatattttctgggctggggtaggaggaaggttgttgcagccatctactgctgctgtaccctaggaatatggggacatggacatggtgtcccatgcccagatgataaacactgagctgccaaaacatttttttaaatacacccgaggagcccaagggggaagggcaatgcctacccccagcgttatttttggggagggagggctgtgcatagggacatattctttagaatctattttattaactgacctgttttgggacctgttacccaaataaaagatgtttctaga

SEQ ID NO: 455870 - DNA, 2062 bp, Homo sapiens
gcagtactcataacggtttaaggtagcgaggctgggtggcgggagaccatgtagtgagaccctcgcgaggtctgagagtcactggagctaccagaagcatcatggggccctggggagagccagagctcctggtgtggcgccccgaggcggtagcttcagagcctccagtgcctgtggggctggaggtgaagttgggggccctggtgctgctgctggtgctcaccctcctctgcagcctggtgcccatctgtgtgctgcgccggccaggagctaaccatgaaggctcagcttcccgccagaaagccctgagcctagtaagctgtttcgcggggggcgtctttttggccacttgtctcctggacctgctgcctgactacctggctgccatagatgaggccctggcagccttgcacgtgacgctccagttcccactgcaagagttcatcctggccatgggcttcttcctggtcctggtgatggagcagatcacactggcttacaaggagcagtcagggccgtcacctctggaggaaacaagggctctgctgggaacagtgaatggtgggccgcagcattggcatgatgggccaggggtcccacaggcgagtggagccccagcaaccccctcagccttgcgtgcctgtgtactggtgttctccctggccctccactccgtgttcgaggggctggcggtagggctgcagcgagaccgggctcgggccatggagctgtgcctggctttgctgctccacaagggcatcctggctgtcagcctgtccctgcggctgttgcagagccaccttagggcacaggtggtggctggctgtgggatcctcttctcatgcatgacacctctaggcatcgggctgggtgcagctctggcagagtcggcaggacctctgcaccagctggcccagtctgtgctagagggcatggcagctggcacctttctctatatcacctttctggaaatcctgccccaggagctggccagttctgagcaaaggatcctcaaggtcattctgctcctagcaggctttgccctgctcactggcctgctcttcatccaaatctagggggcttcaagagaggggcaggggagattgatgatcaggtgcccctgttctcccttccctcccccagttgtggggaataggaaggaaaggggaagggaaatactgaggaccaaaaagttctctgggagctaaagatagagcctttggggctatctgactaatgagagggaagtgggcagacaagaggctggccccagtcccaaggaacaagagatggtcaagtcgctagagacatatcaggggacattaggattggggaagacacttgactgctagaatcagaggttggacactatacataaggacaggctcacatgggaggctggaggtgggtacccagctgctgtggaacgggtatggacaggtcataaacctagagtcagtgtcctgttggtcctagcccatttcagcaccctgccacttggagtggacccctcctactcttcttagcgcctaccctcatacctatctccctcctcccatctcctaggggactggcgccaaatggtctctccctgccaattttggtatcttctctggcctctccagtcctgcttactcctctatttttaaagtgccaaacaaatccccttcctctttctcaaagcacagtaatgtggcactgagccctacccagcacctcagtgaagggggcctgcttgctctttattttggtcccggatcctggggtggggcagaaatattttctgggctggggtaggaggaaggttgttgcagccatctactgctgctgtaccctaggaatatggggacatggacatggtgtcccatgcccagatgataaacactgagctgccaaaacatttttttaaatacacccgaggagcccaagggggaagggcaatgcctacccccagcgttatttttggggagggagggctgtgcatagggacatattctttagaatctattttattaactgacctgttttgggacctgttacccaaataaaagatgtttctaga

SEQ ID NO: 455871 - DNA, 2410 bp, Homo sapiens
cagcggggtccatgtcggctgcccaggcctccccgggcccgggaacaggagtcccagctcacgcattcttcatctgcttcccgcgacgcttggcggcctcgcaccccgcctcctggagcccggactttcaggcaccgccctcagtgtcgcctcagtccgtcccgggaccgcagactcttagggcccctctctttggccatctgcctctaggtcccatcctggggcctgaagcgcttgttctctgcgctgggaaaaggggaacgatggagcgatccagcacccaaacttaccctgtccaggtggcccacgaagctacccaagacatctctgcacagccctagcctttttggcttcacccactccgttcgggagttggggacccggcctctacattccttaggggaactccagctccaggtctgagagtcactggagctaccagaagcatcatggggccctggggagagccagagctcctggtgtggcgccccgaggcggtagcttcagagcctccagtgcctgtggggctggaggtgaagttgggggccctggtgctgctgctggtgctcaccctcctctgcagcctggtgcccatctgtgtgctgcgccggccaggagctaaccatgaaggctcagcttcccgccagaaagccctgagcctagtaagctgtttcgcggggggcgtctttttggccacttgtctcctggacctgctgcctgactacctggctgccatagatgaggccctggcagccttgcacgtgacgctccagttcccactgcaagagttcatcctggccatgggcttcttcctggtcctggtgatggagcagatcacactggcttacaaggagcagtcagggccgtcacctctggaggaaacaagggctctgctgggaacagtgaatggtgggccgcagcattggcatgatgggccaggggtcccacaggcgagtggagccccagcaaccccctcagccttgcgtgcctgtgtactggtgttctccctggccctccactccgtgttcgaggggctggcggtagggctgcagcgagaccgggctcgggccatggagctgtgcctggctttgctgctccacaagggcatcctggctgtcagcctgtccctgcggctgttgcagagccaccttagggcacaggtggtggctggctgtgggatcctcttctcatgcatgacacctctaggcatcgggctgggtgcagctctggcagagtcggcaggacctctgcaccagctggcccagtctgtgctagagggcatggcagctggcacctttctctatatcacctttctggaaatcctgccccaggagctggccagttctgagcaaaggatcctcaaggtcattctgctcctagcaggctttgccctgctcactggcctgctcttcatccaaatctagggggcttcaagagaggggcaggggagattgatgatcaggtgcccctgttctcccttccctcccccagttgtggggaataggaaggaaaggggaagggaaatactgaggaccaaaaagttctctgggagctaaagatagagcctttggggctatctgactaatgagagggaagtgggcagacaagaggctggccccagtcccaaggaacaagagatggtcaagtcgctagagacatatcaggggacattaggattggggaagacacttgactgctagaatcagaggttggacactatacataaggacaggctcacatgggaggctggaggtgggtacccagctgctgtggaacgggtatggacaggtcataaacctagagtcagtgtcctgttggtcctagcccatttcagcaccctgccacttggagtggacccctcctactcttcttagcgcctaccctcatacctatctccctcctcccatctcctaggggactggcgccaaatggtctctccctgccaattttggtatcttctctggcctctccagtcctgcttactcctctatttttaaagtgccaaacaaatccccttcctctttctcaaagcacagtaatgtggcactgagccctacccagcacctcagtgaagggggcctgcttgctctttattttggtcccggatcctggggtggggcagaaatattttctgggctggggtaggaggaaggttgttgcagccatctactgctgctgtaccctaggaatatggggacatggacatggtgtcccatgcccagatgataaacactgagctgccaaaacatttttttaaatacacccgaggagcccaagggggaagggcaatgcctacccccagcgttatttttggggagggagggctgtgcatagggacatattctttagaatctattttattaactgacctgttttgggacctgttacccaaataaaagatgtttctaga

SEQ ID NO: 455872 - DNA, 2091 bp, Homo sapiens
ccatcagaagtatctagcagtgctcggtcacccgcgtttgtttattattcaagtcacgcggctgagcttcatgtacatgctgttgcgatcgctcgcatgtctgagagtcactggagctaccagaagcatcatggggccctggggagagccagagctcctggtgtggcgccccgaggcggtagcttcagagcctccagtgcctgtggggctggaggtgaagttgggggccctggtgctgctgctggtgctcaccctcctctgcagcctggtgcccatctgtgtgctgcgccggccaggagctaaccatgaaggctcagcttcccgccagaaagccctgagcctagtaagctgtttcgcggggggcgtctttttggccacttgtctcctggacctgctgcctgactacctggctgccatagatgaggccctggcagccttgcacgtgacgctccagttcccactgcaagagttcatcctggccatgggcttcttcctggtcctggtgatggagcagatcacactggcttacaaggagcagtcagggccgtcacctctggaggaaacaagggctctgctgggaacagtgaatggtgggccgcagcattggcatgatgggccaggggtcccacaggcgagtggagccccagcaaccccctcagccttgcgtgcctgtgtactggtgttctccctggccctccactccgtgttcgaggggctggcggtagggctgcagcgagaccgggctcgggccatggagctgtgcctggctttgctgctccacaagggcatcctggctgtcagcctgtccctgcggctgttgcagagccaccttagggcacaggtggtggctggctgtgggatcctcttctcatgcatgacacctctaggcatcgggctgggtgcagctctggcagagtcggcaggacctctgcaccagctggcccagtctgtgctagagggcatggcagctggcacctttctctatatcacctttctggaaatcctgccccaggagctggccagttctgagcaaaggatcctcaaggtcattctgctcctagcaggctttgccctgctcactggcctgctcttcatccaaatctagggggcttcaagagaggggcaggggagattgatgatcaggtgcccctgttctcccttccctcccccagttgtggggaataggaaggaaaggggaagggaaatactgaggaccaaaaagttctctgggagctaaagatagagcctttggggctatctgactaatgagagggaagtgggcagacaagaggctggccccagtcccaaggaacaagagatggtcaagtcgctagagacatatcaggggacattaggattggggaagacacttgactgctagaatcagaggttggacactatacataaggacaggctcacatgggaggctggaggtgggtacccagctgctgtggaacgggtatggacaggtcataaacctagagtcagtgtcctgttggtcctagcccatttcagcaccctgccacttggagtggacccctcctactcttcttagcgcctaccctcatacctatctccctcctcccatctcctaggggactggcgccaaatggtctctccctgccaattttggtatcttctctggcctctccagtcctgcttactcctctatttttaaagtgccaaacaaatccccttcctctttctcaaagcacagtaatgtggcactgagccctacccagcacctcagtgaagggggcctgcttgctctttattttggtcccggatcctggggtggggcagaaatattttctgggctggggtaggaggaaggttgttgcagccatctactgctgctgtaccctaggaatatggggacatggacatggtgtcccatgcccagatgataaacactgagctgccaaaacatttttttaaatacacccgaggagcccaagggggaagggcaatgcctacccccagcgttatttttggggagggagggctgtgcatagggacatattctttagaatctattttattaactgacctgttttgggacctgttacccaaataaaagatgtttctaga

SEQ ID NO: 455873 - DNA, 1971 bp, Homo sapiens
  misc_feature (19)..(19): n is a, c, g, or t
ttaggctaggtacgaggcnggtgtgaatcggccgaggcatgtagtgagaccctcgcgaggtctgagagtcactggagctaccagaagcatcatggggccctggggagagccagagctcctggtgtggcgccccgaggcggtagcttcagagcctccagtgcctgtggggctggaggtgaagttgggggccctggtgctgctgctggtgctcaccctcctctgcagcctggtgcccatctgtgtgctgcgccggccaggagctaaccatgaaggctcagcttcccgccagaaagccctgagcctagtaagctgtttcgcggggggcgtctttttggccacttgtctcctggacctgctgcctgactacctggctgccatagatgaggccctggcagccttgcacgtgacgctccagttcccactgcaagagttcatcctggccatgggcttcttcctggtcctggtgatggagcagatcacactggcttacaaggagcagtcagggccgtcacctctggaggaaacaagggctctgctgggaacagtgaatggtgggccgcagcattggcatgatgggccaggggtcccacaggcgagtggagccccagcaaccccctcagccttgcgtgcctgtgtactggtgttctccctggccctccactccgtgttcgaggggctggcggtagggctgcagcgagaccgggctcgggccatggagctgtgcctggctttgctgctccacaagggcatcctggctgtcagcctgtccctgcggctgttgcagagccaccttagggcacaggtggtggctggctgtgggatcctcttctcatgcatgacacctctaggcatcgggctgggtgcagctctggcagagtcggcaggacctctgcaccagctggcccagtctgtgctagagggcatggcagctggcacctttctctatatcacctttctggaaatcctgctcttcatccaaatctagggggcttcaagagaggggcaggggagattgatgatcaggtgcccctgttctcccttccctcccccagttgtggggaataggaaggaaaggggaagggaaatactgaggaccaaaaagttctctgggagctaaagatagagcctttggggctatctgactaatgagagggaagtgggcagacaagaggctggccccagtcccaaggaacaagagatggtcaagtcgctagagacatatcaggggacattaggattggggaagacacttgactgctagaatcagaggttggacactatacataaggacaggctcacatgggaggctggaggtgggtacccagctgctgtggaacgggtatggacaggtcataaacctagagtcagtgtcctgttggtcctagcccatttcagcaccctgccacttggagtggacccctcctactcttcttagcgcctaccctcatacctatctccctcctcccatctcctaggggactggcgccaaatggtctctccctgccaattttggtatcttctctggcctctccagtcctgcttactcctctatttttaaagtgccaaacaaatccccttcctctttctcaaagcacagtaatgtggcactgagccctacccagcacctcagtgaagggggcctgcttgctctttattttggtcccggatcctggggtggggcagaaatattttctgggctggggtaggaggaaggttgttgcagccatctactgctgctgtaccctaggaatatggggacatggacatggtgtcccatgcccagatgataaacactgagctgccaaaacatttttttaaatacacccgaggagcccaagggggaagggcaatgcctacccccagcgttatttttggggagggagggctgtgcatagggacatattctttagaatctattttattaactgacctgttttgggacctgttacccaaataaaagatgtttctaga

SEQ ID NO: 455874 - DNA, 1998 bp, Homo sapiens
  misc_feature (19)..(19): n is a, c, g, or t
ttaggctaggtacgaggcnggtgtgaatcggccgaggcatgtagtgagaccctcgcgaggtctgagagtcactggagctaccagaagcatcatggggccctggggagagccagagctcctggtgtggcgccccgaggcggtagcttcagagcctccagtgcctgtggggctggaggtgaagttgggggccctggtgctgctgctggtgctcaccctcctctgcagcctggtgcccatctgtgtgctgcgccggccaggagctaaccatgaaggctcagcttcccgccagaaagccctgagcctagtaagctgtttcgcggggggcgtctttttggccacttgtctcctggacctgctgcctgactacctggctgccatagatgaggccctggcagccttgcacgtgacgctccagttcccactgcaagagttcatcctggccatgggcttcttcctggtcctggtgatggagcagatcacactggcttacaaggagcagtcagggccgtcacctctggaggaaacaagggctctgctgggaacagtgaatggtgggccgcagcattggcatgatgggccaggggtcccacaggcgagtggagccccagcaaccccctcagccttgcgtgcctgtgtactggtgttctccctggccctccactccgtgttcgaggggctggcggtagggctgcagcgagaccgggctcgggccatggagctgtgcctggctttgctgctccacaagggcatcctggctgtcagcctgtccctgcggctgttgcagagccaccttagggcacaggtggtggctggctgtgggatcctcttctcatgcatgacacctctaggcatcgggctgggtgcagctctggcagagtcggcaggacctctgcaccagctggcccagtctgtgctagagggcatggcagctggcacctttctctatatcacctttctggaaatcctgccccaggagctggccagttctgagcaaaggatcctcaaggtcattctgctcctagcaggctttgccctgctcactggcctgctcttcatccaaatctagggggcttcaagagaggggcaggggagattgatgatcaggtgcccctgttctcccttccctcccccagttgtggggaataggaaggaaaggggaagggaaatactgaggaccagggaagtgggcagacaagaggctggccccagtcccaaggaacaagagatggtcaagtcgctagagacatatcaggggacattaggattggggaagacacttgactgctagaatcagaggttggacactatacataaggacaggctcacatgggaggctggaggtgggtacccagctgctgtggaacgggtatggacaggtcataaacctagagtcagtgtcctgttggtcctagcccatttcagcaccctgccacttggagtggacccctcctactcttcttagcgcctaccctcatacctatctccctcctcccatctcctaggggactggcgccaaatggtctctccctgccaattttggtatcttctctggcctctccagtcctgcttactcctctatttttaaagtgccaaacaaatccccttcctctttctcaaagcacagtaatgtggcactgagccctacccagcacctcagtgaagggggcctgcttgctctttattttggtcccggatcctggggtggggcagaaatattttctgggctggggtaggaggaaggttgttgcagccatctactgctgctgtaccctaggaatatggggacatggacatggtgtcccatgcccagatgataaacactgagctgccaaaacatttttttaaatacacccgaggagcccaagggggaagggcaatgcctacccccagcgttatttttggggagggagggctgtgcatagggacatattctttagaatctattttattaactgacctgttttgggacctgttacccaaataaaagatgtttctaga

SEQ ID NO: 455875 - DNA, 1738 bp, Homo sapiens
  misc_feature (19)..(19): n is a, c, g, or t
ttaggctaggtacgaggcnggtgtgaatcggccgaggcctgctgcctgactacctggctgccatagatgaggccctggcagccttgcacgtgacgctccagttcccactgcaagagttcatcctggccatgggcttcttcctggtcctggtgatggagcagatcacactggcttacaaggagcagtcagggccgtcacctctggaggaaacaagggctctgctgggaacagtgaatggtgggccgcagcattggcatgatgggccaggggtcccacaggcgagtggagccccagcaaccccctcagccttgcgtgcctgtgtactggtgttctccctggccctccactccgtgttcgaggggctggcggtagggctgcagcgagaccgggctcgggccatggagctgtgcctggctttgctgctccacaagggcatcctggctgtcagcctgtccctgcggctgttgcagagccaccttagggcacaggtggtggctggctgtgggatcctcttctcatgcatgacacctctaggcatcgggctgggtgcagctctggcagagtcggcaggacctctgcaccagctggcccagtctgtgctagagggcatggcagctggcacctttctctatatcacctttctggaaatcctgccccaggagctggccagttctgagcaaaggatcctcaaggtcattctgctcctagcaggctttgccctgctcactggcctgctcttcatccaaatctagggggcttcaagagaggggcaggggagattgatgatcaggtgcccctgttctcccttccctcccccagttgtggggaataggaaggaaaggggaagggaaatactgaggaccaaaaagttctctgggagctaaagatagagcctttggggctatctgactaatgagagggaagtgggcagacaagaggctggccccagtcccaaggaacaagagatggtcaagtcgctagagacatatcaggggacattaggattggggaagacacttgactgctagaatcagaggttggacactatacataaggacaggctcacatgggaggctggaggtgggtacccagctgctgtggaacgggtatggacaggtcataaacctagagtcagtgtcctgttggtcctagcccatttcagcaccctgccacttggagtggacccctcctactcttcttagcgcctaccctcatacctatctccctcctcccatctcctaggggactggcgccaaatggtctctccctgccaattttggtatcttctctggcctctccagtcctgcttactcctctatttttaaagtgccaaacaaatccccttcctctttctcaaagcacagtaatgtggcactgagccctacccagcacctcagtgaagggggcctgcttgctctttattttggtcccggatcctggggtggggcagaaatattttctgggctggggtaggaggaaggttgttgcagccatctactgctgctgtaccctaggaatatggggacatggacatggtgtcccatgcccagatgataaacactgagctgccaaaacatttttttaaatacacccgaggagcccaagggggaagggcaatgcctacccccagcgttatttttggggagggagggctgtgcatagggacatattctttagaatctattttattaactgacctgttttgggacctgttacccaaataaaagatgtttctaga

SEQ ID NO: 455876 - DNA, 1554 bp, Homo sapiens
  misc_feature (19)..(19): n is a, c, g, or t
ttaggctaggtacgaggcnggtgtgaatcggccgaggctgggaacagtgaatggtgggccgcagcattggcatgatgggccaggggtcccacaggcgagtggagccccagcaaccccctcagccttgcgtgcctgtgtactggtgttctccctggccctccactccgtgttcgaggggctggcggtagggctgcagcgagaccgggctcgggccatggagctgtgcctggctttgctgctccacaagggcatcctggctgtcagcctgtccctgcggctgttgcagagccaccttagggcacaggtggtggctggctgtgggatcctcttctcatgcatgacacctctaggcatcgggctgggtgcagctctggcagagtcggcaggacctctgcaccagctggcccagtctgtgctagagggcatggcagctggcacctttctctatatcacctttctggaaatcctgccccaggagctggccagttctgagcaaaggatcctcaaggtcattctgctcctagcaggctttgccctgctcactggcctgctcttcatccaaatctagggggcttcaagagaggggcaggggagattgatgatcaggtgcccctgttctcccttccctcccccagttgtggggaataggaaggaaaggggaagggaaatactgaggaccaaaaagttctctgggagctaaagatagagcctttggggctatctgactaatgagagggaagtgggcagacaagaggctggccccagtcccaaggaacaagagatggtcaagtcgctagagacatatcaggggacattaggattggggaagacacttgactgctagaatcagaggttggacactatacataaggacaggctcacatgggaggctggaggtgggtacccagctgctgtggaacgggtatggacaggtcataaacctagagtcagtgtcctgttggtcctagcccatttcagcaccctgccacttggagtggacccctcctactcttcttagcgcctaccctcatacctatctccctcctcccatctcctaggggactggcgccaaatggtctctccctgccaattttggtatcttctctggcctctccagtcctgcttactcctctatttttaaagtgccaaacaaatccccttcctctttctcaaagcacagtaatgtggcactgagccctacccagcacctcagtgaagggggcctgcttgctctttattttggtcccggatcctggggtggggcagaaatattttctgggctggggtaggaggaaggttgttgcagccatctactgctgctgtaccctaggaatatggggacatggacatggtgtcccatgcccagatgataaacactgagctgccaaaacatttttttaaatacacccgaggagcccaagggggaagggcaatgcctacccccagcgttatttttggggagggagggctgtgcatagggacatattctttagaatctattttattaactgacctgttttgggacctgttacccaaataaaagatgtttctaga

SEQ ID NO: 455877 - DNA, 1575 bp, Homo sapiens
  misc_feature (19)..(19): n is a, c, g, or t
ttaggctaggtacgaggcnggtgtgaatcggccgaggcatgtagtgagaccctcgcgaggtctgagagtcactggagctaccagaagcatcatggggccctggggagagccagagctcctggtgtggcgccccgaggcggtagcttcagagcctccagtgcctgtggggctggaggtgaagttgggggccctggtgctgctgctggtgctcaccctcctctgcagcctggtgcccatctgtgtgctgcgccggccaggagctaaccatgaaggctcagcttcccgccagaaagccctgagcctagtaagctgtttcgcggggggcgtctttttggccacttgtctcctggacctgctgcctgactacctggctgccatagatgaggccctggcagccttgcacgtgacgctccagttcccactgcaagagttcatcctggccatgggcttcttcctggtcctggtgatggagcagatcacactggcttacaaggagcagtcagggccgtcacctctggaggaaacaagggctctgctgggaacagtgaatggtgggccgcagcattggcatgatgggccaggggtcccacaggcgagtggagccccagcaaccccctcagccttgcgtgcctgtgtactggtgttctccctggccctccactccgtgttcgaggggctggcggtagggctgcagcgagaccgggctcgggccatggagctgtgcctggctttgctgctccacaagggcatcctggctgtcagcctgtccctgcggctgttgcagagccaccttagggcacaggtggtggctggctgtgggatcctcttctcatgcatgacacctctaggcatcgggctgggtgcagctctggcagagtcggcaggacctctgcaccagctggcccagtctgtgctagagggcatggcagctggcacctttctctatatcacctttctggaaatcctgccccaggagctggccagttctgagcaaaggatcctcaaggtcattctgctcctagcaggctttgccctgctcactggcctgctcttcatccaaatctagggggcttcaagagaggggcaggggagattgatgatcaggtgcccctgttctcccttccctcccccagttgtggggaataggaaggaaaggggaagggaaatactgaggaccaaaaagttctctgggagctaaagatagagcctttggggctatctgactaatgagagggaagtgggcagacaagaggctggccccagtcccaaggaacaagagatggtcaagtcgctagccaggcgcacttctcaaaccatatctattccccttattttgaaatattgttcagtattccagttcagttatatggtttcttattccctaagtctactgccagcccttgaggtcctattatgttagtttacttctatagggtactgtcttctctatagaaaactcacccatagattgttacttggcggagcaaggagtgtttgagactctgcaatatacagagataggtttgcactgtccagtctagcacatctgtttctggcagtcaactctcaaggtta

SEQ ID NO: 455878 - DNA, 950 bp, Homo sapiens
  misc_feature (4)..(4): n is a, c, g, or t
  misc_feature (6)..(8): n is a, c, g, or t
ggcngnnnaggagagtcaggccaatggggccgcagttctttcttttttttttctttattcttatttttggagacagggtctcgctctgttgcccaggctggagtgcggtggtgcgatcacggttccatgcagcccccgacctcccgggctcaggtgattctcccgcctcagcaccgcgagcagctaggaccacaggcgcgagccactgcgtccggccggcgggacttatttgtcaggcggggattgggttccgccagcctaaagggaggggtaagcgccagaatatgaatcgccgggaagctgggagaaagctccgggaaaccctgagcagccaggtcgcctgctccgcccgctcccgctcccgatctctgattgctcctaactgacgtcactcccggtctgtccccgcccactcggtgctgccattggcagtcggtcgtggcccatctcctaggggactggcgccaaatggtctctccctgccaattttggtatcttctctggcctctccagtcctgcttactcctctatttttaaagtgccaaacaaatccccttcctctttctcaaagcacagtaatgtggcactgagccctacccagcacctcagtgaagggggcctgcttgctctttattttggtcccggatcctggggtggggcagaaatattttctgggctggggtaggaggaaggttgttgcagccatctactgctgctgtaccctaggaatatggggacatggacatggtgtcccatgcccagatgataaacactgagctgccaaaacatttttttaaatacacccgaggagcccaagggggaagggcaatgcctacccccagcgttatttttggggagggagggctgtgcatagggacatattctttagaatctattttattaactgacctgttttgggacctgttacccaaataaaagatgtttctaga

SEQ ID NO: 455879 - DNA, 2954 bp, Homo sapiens
  misc_feature (19)..(19): n is a, c, g, or t
ttaggctaggtacgaggcnggtgtgaatcggccgaggcatgtagtgagaccctcgcgaggtctgagagtcactggagctaccagaagcatcatggggccctggggagagccagagctcctggtgtggcgccccgaggcggtagcttcagagcctccagtgcctgtggggctggaggtgaagttgggggccctggtgctgctgctggtgctcaccctcctctgcagcctggtgcccatctgtgtgctgcgccggccaggagctaaccatgaaggctcagcttcccgccagaaagccctgagcctagtaagctgtttcgcggggggcgtctttttggccacttgtctcctggacctgctgcctgactacctggctgccatagatgaggccctggcagccttgcacgtgacgctccagttcccactgcaagagttcatcctggccatgggcttcttcctggtcctggtgatggagcagatcacactggcttacaaggagcagtcagggccgtcacctctggaggaaacaagggctctgctgggaacagtgaatggtgggccgcagcattggcatgatgggccaggggtcccacagttacaggcccaaaaactgcgactggcatacacaaggagctctcattatggtgggtctctgcccaatgttaaccagattggctctggcctggccgagttccagagccccctccactcacctttggattcatctcggagcactcggcaccatgggctggtggaacgggtgcagcgagatcctcgaagaatggtgtccccacttcgccgatacacccgccacattgacagctctccctatagtcctgcctacttatctcctcccccagagtctagctggcgaaggacgatggcctggggcaatttccctgcagagaaggggcagttgtttcgactaccatctgcacttaacaggacaagctctgactctgcccttcatacaagtgtgatgaaccccagtccccaggatacctacccaggccccacacctcccagcatcctgcccagccgacgtgggggtattctggatggtgaaatggaccccaaagtacctgctattgaggagaacttgctagatgacaagcatttgctgaagccatgggatgctaagaagctatcctcatcctcttcccgacctcggtcctgtgaagtccctggaattaacatctttccatctcctgaccagcctgccaatgtgcctgtcctcccacctgccatgaacacggggggctccctacctgacctcaccaacctgcactttcccccaccactgcccacccccctggaccctgaagagacagcctaccctagcctgagtgggggcaacagtacctccaatttgacccacaccatgactcacctgggcatcagcaggggcatgggcctgggcccaggctatgatgcaccaggacttcattcacctctcagccacccatccctgcagtcctccctaagcaatcccaacctccaggcttccctgagcagtcctcagccccagcttcagggctcccacagccacccctctctgcctgcctcctccttggcccgccatgtactgcccaccacctccctgggccacccctcactcagtgctccggctctctcctcctcctcttcctcctcctccacttcatctcctgttttgggcgccccctcttaccctgcttctacccctggggcctccccccaccaccgccgtgtgcccctcagccccctgagtttgctcgcgggcccagccgacgccagaaggtcccaacagcagctgcccaaacagttttcgccaacaatgtcacccaccttgtcttccatcactcagggcgtccccctggataccagtaaactgtccactgaccagcggttacccccatacccatacagctccccaagtctggttctgcctacccagccccacaccccaaagtctctacagcagccagggctgccctctcagtcttgttcagtgcagtcctcaggtgggcagcccccaggcaggcagtctcattatgggacaccgtacccacctgggcccagtgggcatgggcaacagtcttaccaccggccaatgagtgacttcaacctggggaatctggagcagttcagcatggagagcccatcagccagcctggtgctggatccccctggcttttctgaagggcctggatttttagggggtgaggggccaatgggtggcccccaggatccccacaccttcaaccaccagaacttgacccactgttcccgccatggctcagggcctaacatcatcctcacaggggactcctctccaggtttctctaaggagattgcagcagccctggccggagtgcctggctttgaggtgtcagcagctggattggagctagggcttgggctagaagatgagctgcgcatggagccactgggcctggaagggctaaacatgctgagtgacccctgtgccctgctgcctgatcctgctgtggaggagtcattccgcagtgaccggctccaatgagggcacctcatcaccatccctcttcttggccccatcccccaccaccattcctttcctcccttccccctggcaggtagagactctactctctgtccccagatcctctttctagcatgaatgaaggatgccaagaatgagaaaaagcaaggggtttgtccaggtggcccctgaattctgcgcaagggatgggcctgggggaactcaagggagggcctaaagcacttgtaactttgaaccgtctgtctggaggtcagagcctgttggaaagcaggggtagaggggagccctggaagcagggcttttccggatgcctaggggtgggcagtgccagcccctcctcaccactcttccccttgcagtggaggagagagccagagtggatactattttttattaaatatattattatatgttaataaaaaaatcatatcaa

SEQ ID NO: 455880 - DNA, 3029 bp, Homo sapiens
  misc_feature (19)..(19): n is a, c, g, or t
ttaggctaggtacgaggcnggtgtgaatcggccgaggcatgtagtgagaccctcgcgaggtctgagagtcactggagctaccagaagcatcatggggccctggggagagccagagctcctggtgtggcgccccgaggcggtagcttcagagcctccagtgcctgtggggctggaggtgaagttgggggccctggtgctgctgctggtgctcaccctcctctgcagcctggtgcccatctgtgtgctgcgccggccaggagctaaccatgaaggctcagcttcccgccagaaagccctgagcctagtaagctgtttcgcggggggcgtctttttggccacttgtctcctggacctgctgcctgactacctggctgccatagatgaggccctggcagccttgcacgtgacgctccagttcccactgcaagagttcatcctggccatgggcttcttcctggtcctggtgatggagcagatcacactggcttacaaggagcagtcagggccgtcacctctggaggaaacaagggctctgctgggaacagtgaatggtgggccgcagcattggcatgatgggccaggggtcccacagttacaggcccaaaaactgcgactggcatacacaaggagctctcattatggtgggtctctgcccaatgttaaccagattggctctggcctggccgagttccaggtgagtagaccccagccagggaggagtggagtttcttaggctgcttcctctgctgacttctgtcctttttggcagagccccctccactcacctttggattcatctcggagcactcggcaccatgggctggtggaacgggtgcagcgagatcctcgaagaatggtgtccccacttcgccgatacacccgccacattgacagctctccctatagtcctgcctacttatctcctcccccagagtctagctggcgaaggacgatggcctggggcaatttccctgcagagaaggggcagttgtttcgactaccatctgcacttaacaggacaagctctgactctgcccttcatacaagtgtgatgaaccccagtccccaggatacctacccaggccccacacctcccagcatcctgcccagccgacgtgggggtattctggatggtgaaatggaccccaaagtacctgctattgaggagaacttgctagatgacaagcatttgctgaagccatgggatgctaagaagctatcctcatcctcttcccgacctcggtcctgtgaagtccctggaattaacatctttccatctcctgaccagcctgccaatgtgcctgtcctcccacctgccatgaacacggggggctccctacctgacctcaccaacctgcactttcccccaccactgcccacccccctggaccctgaagagacagcctaccctagcctgagtgggggcaacagtacctccaatttgacccacaccatgactcacctgggcatcagcaggggcatgggcctgggcccaggctatgatgcaccaggacttcattcacctctcagccacccatccctgcagtcctccctaagcaatcccaacctccaggcttccctgagcagtcctcagccccagcttcagggctcccacagccacccctctctgcctgcctcctccttggcccgccatgtactgcccaccacctccctgggccacccctcactcagtgctccggctctctcctcctcctcttcctcctcctccacttcatctcctgttttgggcgccccctcttaccctgcttctacccctggggcctccccccaccaccgccgtgtgcccctcagccccctgagtttgctcgcgggcccagccgacgccagaaggtcccaacagcagctgcccaaacagttttcgccaacaatgtcacccaccttgtcttccatcactcagggcgtccccctggataccagtaaactgtccactgaccagcggttacccccatacccatacagctccccaagtctggttctgcctacccagccccacaccccaaagtctctacagcagccagggctgccctctcagtcttgttcagtgcagtcctcaggtgggcagcccccaggcaggcagtctcattatgggacaccgtacccacctgggcccagtgggcatgggcaacagtcttaccaccggccaatgagtgacttcaacctggggaatctggagcagttcagcatggagagcccatcagccagcctggtgctggatccccctggcttttctgaagggcctggatttttagggggtgaggggccaatgggtggcccccaggatccccacaccttcaaccaccagaacttgacccactgttcccgccatggctcagggcctaacatcatcctcacaggggactcctctccaggtttctctaaggagattgcagcagccctggccggagtgcctggctttgaggtgtcagcagctggattggagctagggcttgggctagaagatgagctgcgcatggagccactgggcctggaagggctaaacatgctgagtgacccctgtgccctgctgcctgatcctgctgtggaggagtcattccgcagtgaccggctccaatgagggcacctcatcaccatccctcttcttggccccatcccccaccaccattcctttcctcccttccccctggcaggtagagactctactctctgtccccagatcctctttctagcatgaatgaaggatgccaagaatgagaaaaagcaaggggtttgtccaggtggcccctgaattctgcgcaagggatgggcctgggggaactcaagggagggcctaaagcacttgtaactttgaaccgtctgtctggaggtcagagcctgttggaaagcaggggtagaggggagccctggaagcagggcttttccggatgcctaggggtgggcagtgccagcccctcctcaccactcttccccttgcagtggaggagagagccagagtggatactattttttattaaatatattattatatgttaataaaaaaatcatatcaa

SEQ ID NO: 455881 - DNA, 2544 bp, Homo sapiens
gagcaggggacgcgggcgccgccgtttgggaggcgcaggttgagggccgaggggcaggaagaaggattttgccgggggagaccgaaacaccggagaggttcggggtgtagaggcgactgggggccgagtacgtgaggtgggagtgggcggagaggggagatgaagtccggcggaggtaggagttacaggcccaaaaactgcgactggcatacacaaggagctctcattatggtgggtctctgcccaatgttaaccagattggctctggcctggccgagttccagagccccctccactcacctttggattcatctcggagcactcggcaccatgggctggtggaacgggtgcagcgagatcctcgaagaatggtgtccccacttcgccgatacacccgccacattgacagctctccctatagtcctgcctacttatctcctcccccagagtctagctggcgaaggacgatggcctggggcaatttccctgcagagaaggggcagttgtttcgactaccatctgcacttaacaggacaagctctgactctgcccttcatacaagtgtgatgaaccccagtccccaggatacctacccaggccccacacctcccagcatcctgcccagccgacgtgggggtattctggatggtgaaatggaccccaaagtacctgctattgaggagaacttgctagatgacaagcatttgctgaagccatgggatgctaagaagctatcctcatcctcttcccgacctcggtcctgtgaagtccctggaattaacatctttccatctcctgaccagcctgccaatgtgcctgtcctcccacctgccatgaacacggggggctccctacctgacctcaccaacctgcactttcccccaccactgcccacccccctggaccctgaagagacagcctaccctagcctgagtgggggcaacagtacctccaatttgacccacaccatgactcacctgggcatcagcaggggcatgggcctgggcccaggctatgatgcaccaggacttcattcacctctcagccacccatccctgcagtcctccctaagcaatcccaacctccaggcttccctgagcagtcctcagccccagcttcagggctcccacagccacccctctctgcctgcctcctccttggcccgccatgtactgcccaccacctccctgggccacccctcactcagtgctccggctctctcctcctcctcttcctcctcctccacttcatctcctgttttgggcgccccctcttaccctgcttctacccctggggcctccccccaccaccgccgtgtgcccctcagccccctgagtttgctcgcgggcccagccgacgccagaaggtcccaacagcagctgcccaaacagttttcgccaacaatgtcacccaccttgtcttccatcactcagggcgtccccctggataccagtaaactgtccactgaccagcggttacccccatacccatacagctccccaagtctggttctgcctacccagccccacaccccaaagtctctacagcagccagggctgccctctcagtcttgttcagtgcagtcctcaggtgggcagcccccaggcaggcagtctcattatgggacaccgtacccacctgggcccagtgggcatgggcaacagtcttaccaccggccaatgagtgacttcaacctggggaatctggagcagttcagcatggagagcccatcagccagcctggtgctggatccccctggcttttctgaagggcctggatttttagggggtgaggggccaatgggtggcccccaggatccccacaccttcaaccaccagaacttgacccactgttcccgccatggctcagggcctaacatcatcctcacaggggactcctctccaggtttctctaaggagattgcagcagccctggccggagtgcctggctttgaggtgtcagcagctggattggagctagggcttgggctagaagatgagctgcgcatggagccactgggcctggaagggctaaacatgctgagtgacccctgtgccctgctgcctgatcctgctgtggaggagtcattccgcagtgaccggctccaatgagggcacctcatcaccatccctcttcttggccccatcccccaccaccattcctttcctcccttccccctggcaggtagagactctactctctgtccccagatcctctttctagcatgaatgaaggatgccaagaatgagaaaaagcaaggggtttgtccaggtggcccctgaattctgcgcaagggatgggcctgggggaactcaagggagggcctaaagcacttgtaactttgaaccgtctgtctggaggtcagagcctgttggaaagcaggggtagaggggagccctggaagcagggcttttccggatgcctaggggtgggcagtgccagcccctcctcaccactcttccccttgcagtggaggagagagccagagtggatactattttttattaaatatattattatatgttaataaaaaaatcatatcaa

SEQ ID NO: 455882 - DNA, 2459 bp, Homo sapiens
gagcaggggacgcgggcgccgccgtttgggaggcgcaggttgagggccgaggggcaggaagaaggattttgccgggggagaccgaaacaccggagagttacaggcccaaaaactgcgactggcatacacaaggagctctcattatggtgggtctctgcccaatgttaaccagattggctctggcctggccgagttccagagccccctccactcacctttggattcatctcggagcactcggcaccatgggctggtggaacgggtgcagcgagatcctcgaagaatggtgtccccacttcgccgatacacccgccacattgacagctctccctatagtcctgcctacttatctcctcccccagagtctagctggcgaaggacgatggcctggggcaatttccctgcagagaaggggcagttgtttcgactaccatctgcacttaacaggacaagctctgactctgcccttcatacaagtgtgatgaaccccagtccccaggatacctacccaggccccacacctcccagcatcctgcccagccgacgtgggggtattctggatggtgaaatggaccccaaagtacctgctattgaggagaacttgctagatgacaagcatttgctgaagccatgggatgctaagaagctatcctcatcctcttcccgacctcggtcctgtgaagtccctggaattaacatctttccatctcctgaccagcctgccaatgtgcctgtcctcccacctgccatgaacacggggggctccctacctgacctcaccaacctgcactttcccccaccactgcccacccccctggaccctgaagagacagcctaccctagcctgagtgggggcaacagtacctccaatttgacccacaccatgactcacctgggcatcagcaggggcatgggcctgggcccaggctatgatgcaccaggacttcattcacctctcagccacccatccctgcagtcctccctaagcaatcccaacctccaggcttccctgagcagtcctcagccccagcttcagggctcccacagccacccctctctgcctgcctcctccttggcccgccatgtactgcccaccacctccctgggccacccctcactcagtgctccggctctctcctcctcctcttcctcctcctccacttcatctcctgttttgggcgccccctcttaccctgcttctacccctggggcctccccccaccaccgccgtgtgcccctcagccccctgagtttgctcgcgggcccagccgacgccagaaggtcccaacagcagctgcccaaacagttttcgccaacaatgtcacccaccttgtcttccatcactcagggcgtccccctggataccagtaaactgtccactgaccagcggttacccccatacccatacagctccccaagtctggttctgcctacccagccccacaccccaaagtctctacagcagccagggctgccctctcagtcttgttcagtgcagtcctcaggtgggcagcccccaggcaggcagtctcattatgggacaccgtacccacctgggcccagtgggcatgggcaacagtcttaccaccggccaatgagtgacttcaacctggggaatctggagcagttcagcatggagagcccatcagccagcctggtgctggatccccctggcttttctgaagggcctggatttttagggggtgaggggccaatgggtggcccccaggatccccacaccttcaaccaccagaacttgacccactgttcccgccatggctcagggcctaacatcatcctcacaggggactcctctccaggtttctctaaggagattgcagcagccctggccggagtgcctggctttgaggtgtcagcagctggattggagctagggcttgggctagaagatgagctgcgcatggagccactgggcctggaagggctaaacatgctgagtgacccctgtgccctgctgcctgatcctgctgtggaggagtcattccgcagtgaccggctccaatgagggcacctcatcaccatccctcttcttggccccatcccccaccaccattcctttcctcccttccccctggcaggtagagactctactctctgtccccagatcctctttctagcatgaatgaaggatgccaagaatgagaaaaagcaaggggtttgtccaggtggcccctgaattctgcgcaagggatgggcctgggggaactcaagggagggcctaaagcacttgtaactttgaaccgtctgtctggaggtcagagcctgttggaaagcaggggtagaggggagccctggaagcagggcttttccggatgcctaggggtgggcagtgccagcccctcctcaccactcttccccttgcagtggaggagagagccagagtggatactattttttattaaatatattattatatgttaataaaaaaatcatatcaa

SEQ ID NO: 455883 - DNA, 2523 bp, Homo sapiens
atcctggtgacagagatggcaaggatggctgaaggaaatagtgctcaggaccctcctgacattcccacttgttccccatgtctcagttacaggcccaaaaactgcgactggcatacacaaggagctctcattatggtgggtctctgcccaatgttaaccagattggctctggcctggccgagttccaggtgagtagaccccagccagggaggagtggagtttcttaggctgcttcctctgctgacttctgtcctttttggcagagccccctccactcacctttggattcatctcggagcactcggcaccatgggctggtggaacgggtgcagcgagatcctcgaagaatggtgtccccacttcgccgatacacccgccacattgacagctctccctatagtcctgcctacttatctcctcccccagagtctagctggcgaaggacgatggcctggggcaatttccctgcagagaaggggcagttgtttcgactaccatctgcacttaacaggacaagctctgactctgcccttcatacaagtgtgatgaaccccagtccccaggatacctacccaggccccacacctcccagcatcctgcccagccgacgtgggggtattctggatggtgaaatggaccccaaagtacctgctattgaggagaacttgctagatgacaagcatttgctgaagccatgggatgctaagaagctatcctcatcctcttcccgacctcggtcctgtgaagtccctggaattaacatctttccatctcctgaccagcctgccaatgtgcctgtcctcccacctgccatgaacacggggggctccctacctgacctcaccaacctgcactttcccccaccactgcccacccccctggaccctgaagagacagcctaccctagcctgagtgggggcaacagtacctccaatttgacccacaccatgactcacctgggcatcagcaggggcatgggcctgggcccaggctatgatgcaccaggacttcattcacctctcagccacccatccctgcagtcctccctaagcaatcccaacctccaggcttccctgagcagtcctcagccccagcttcagggctcccacagccacccctctctgcctgcctcctccttggcccgccatgtactgcccaccacctccctgggccacccctcactcagtgctccggctctctcctcctcctcttcctcctcctccacttcatctcctgttttgggcgccccctcttaccctgcttctacccctggggcctccccccaccaccgccgtgtgcccctcagccccctgagtttgctcgcgggcccagccgacgccagaaggtcccaacagcagctgcccaaacagttttcgccaacaatgtcacccaccttgtcttccatcactcagggcgtccccctggataccagtaaactgtccactgaccagcggttacccccatacccatacagctccccaagtctggttctgcctacccagccccacaccccaaagtctctacagcagccagggctgccctctcagtcttgttcagtgcagtcctcaggtgggcagcccccaggcaggcagtctcattatgggacaccgtacccacctgggcccagtgggcatgggcaacagtcttaccaccggccaatgagtgacttcaacctggggaatctggagcagttcagcatggagagcccatcagccagcctggtgctggatccccctggcttttctgaagggcctggatttttagggggtgaggggccaatgggtggcccccaggatccccacaccttcaaccaccagaacttgacccactgttcccgccatggctcagggcctaacatcatcctcacaggggactcctctccaggtttctctaaggagattgcagcagccctggccggagtgcctggctttgaggtgtcagcagctggattggagctagggcttgggctagaagatgagctgcgcatggagccactgggcctggaagggctaaacatgctgagtgacccctgtgccctgctgcctgatcctgctgtggaggagtcattccgcagtgaccggctccaatgagggcacctcatcaccatccctcttcttggccccatcccccaccaccattcctttcctcccttccccctggcaggtagagactctactctctgtccccagatcctctttctagcatgaatgaaggatgccaagaatgagaaaaagcaaggggtttgtccaggtggcccctgaattctgcgcaagggatgggcctgggggaactcaagggagggcctaaagcacttgtaactttgaaccgtctgtctggaggtcagagcctgttggaaagcaggggtagaggggagccctggaagcagggcttttccggatgcctaggggtgggcagtgccagcccctcctcaccactcttccccttgcagtggaggagagagccagagtggatactattttttattaaatatattattatatgttaataaaaaaatcatatcaa

SEQ ID NO: 455884 - DNA, 2979 bp, Homo sapiens
  misc_feature (19)..(19): n is a, c, g, or t
ttaggctaggtacgaggcnggtgtgaatcggccgaggcatgtagtgagaccctcgcgaggtctgagagtcactggagctaccagaagcatcatggggccctggggagagccagagctcctggtgtggcgccccgaggcggtagcttcagagcctccagtgcctgtggggctggaggtgaagttgggggccctggtgctgctgctggtgctcaccctcctctgcagcctggtgcccatctgtgtgctgcgccggccaggagctaaccatgaaggctcagcttcccgccagaaagccctgagcctagtaagctgtttcgcggggggcgtctttttggccacttgtctcctggacctgctgcctgactacctggctgccatagatgaggccctggcagccttgcacgtgacgctccagttcccactgcaagagttcatcctggccatgggcttcttcctggtcctggtgatggagcagatcacactggcttacaaggagcagtcagggccgtcacctctggaggaaacaagggctctgctgggaacagtgaatggtgggccgcagcattggcatgatgggccaggggtcccacagttacaggcccaaaaactgcgactggcatacacaaggagctctcattatggtgggtctctgcccaatgttaaccagattggctctggcctggccgagttccagagccccctccactcacctttggattcatctcggagcactcggcaccatgggctggtggaacgggtgcagcgagatcctcgaagaatggtgtccccacttcgccgatacacccgccacattgacagctctccctatagtcctgcctacttatctcctcccccagagtctagctggcgaaggacgatggcctggggcaatttccctgcagagaaggggcagttgtttcgactaccatctgcacttaacaggacaagctctgactctgcccttcatacaagtgtgatgaaccccagtccccaggatacctacccaggccccacacctcccagcatcctgcccagccgacgtgggggtattctggatggtgaaatggaccccaaagtacctgctattgaggagaacttgctagatgacaagcatttgctgaagccatgggatgctaagaagctatcctcatcctcttcccgacctcggtcctgtgaagtccctggaattaacatctttccatctcctgaccagcctgccaatgtgcctgtcctcccacctgccatgaacacggggggctccctacctgacctcaccaacctgcactttcccccaccactgcccacccccctggaccctgaagagacagcctaccctagcctgagtgggggcaacagtacctccaatttgacccacaccatgactcacctgggcatcagcaggggcatgggcctgggcccaggctatgatgcaccaggacttcattcacctctcagccacccatccctgcagtcctccctaagcaatcccaacctccaggcttccctgagcagtcctcagccccagcttcagggctcccacagccacccctctctgcctgcctcctccttggcccgccatgtactgcccaccacctccctgggccacccctcactcagtgctccggctctctcctcctcctcttcctcctcctccacttcatctcctgttttgggcgccccctcttaccctgcttctacccctggggcctccccccaccaccgccgtgtgcccctcagccccctgagtttgctcgcgggcccagccgacgccagaaggtcccaacagcagctgcccaaacagttttcgccaacaatgtcacccaccttgtcttccatcactcagggcgtccccctggataccagtaaactgtccactgaccagcggttacccccatacccatacagctccccaagtctggttctgcctacccagccccacaccccaaagtctctacagcagccagggctgccctctcagtcttgttcagtgcagtcctcaggtgggcagcccccaggcaggcagtctcattatgggacaccgtacccacctgggcccagtgggcatgggcaacagtcttaccaccggccaatgagtgacttcaacctggggaatctggagcagttcagcatggagagcccatcagccagcctggtgctggatccccctggcttttctgaagggcctggatttttagggggtgaggggccaatgggtggcccccaggatccccacaccttcaaccaccagaacttgacccactgttcccgccatggctcagggcctaacatcatcctcacaggggactcctctccaggtttctctaaggagattgcagcagccctggccggagtgcctggctttgaggtgtcagcagctggattggagctagggcttgggctagaagatgagctgcgcatggagccactgggcctggaagggctaaacatgctgagtgacccctgtgccctgctgcctgatcctgctgtggaggagtcattccgcagtgaccggctccaatgagggcacctcatcaccatccctcttcttggccccatcccccaccaccattcctttcctcccttccccctggcaggtagagactctactctctgtccccagatcctctttctagcatgaatgaaggatgccaagaatgagaaaaagcaaggggtttgtccaggtggcccctgaattctgcgcaagggatgggcctgggggaactcaagggagggcctaaagcacttgtaactttgaaccgtctgtctggaggtcagagcctgttggaaagcaggggtagaggggagccctggaagcagggcttttccggatgcctaggggtgggcagtgccagcccctcctcaccactcttccccttgcagtggaggagagagccagagtggatactattttttattaaatatattattatatgttaataaaaaaatcatatcaatacaataaaacaaacctttctctgc

SEQ ID NO: 455885 - DNA, 2205 bp, Homo sapiens
atccacctgcctcggcctcccaaagtgctgggattacaggcatgagccaccatacccggcctccatggagctatttaaagcaggtaggcaagtgagcactgcagccaatgccactgtatcccttgcaggtattctggatggtgaaatggaccccaaaggtatgtgttcctcactgctgtgggtactgaatgccaaagaatttctgggctggtgttgggattgtgtgcaggttcagggagcaggactccttcccacctgcttctgcttcctgtcctgccttactggctctttctccaactctcccatcaccagtctttctctttcaagtacctgctattgaggagaacttgctagatgacaagcatttgctgaagccatgggatgctaagaagctatcctcatcctcttcccgacctcggtcctgtgaagtccctggaattaacatctttccatctcctgaccagcctgccaatgtgcctgtcctcccacctgccatgaacacggggggctccctacctgacctcaccaacctgcactttcccccaccactgcccacccccctggaccctgaagagacagcctaccctagcctgagtgggggcaacagtacctccaatttgacccacaccatgactcacctgggcatcagcaggggcatgggcctgggcccaggctatgatgcaccaggacttcattcacctctcagccacccatccctgcagtcctccctaagcaatcccaacctccaggcttccctgagcagtcctcagccccagcttcagggctcccacagccacccctctctgcctgcctcctccttggcccgccatgtactgcccaccacctccctgggccacccctcactcagtgctccggctctctcctcctcctcttcctcctcctccacttcatctcctgttttgggcgccccctcttaccctgcttctacccctggggcctccccccaccaccgccgtgtgcccctcagccccctgagtttgctcgcgggcccagccgacgccagaaggtcccaacagcagctgcccaaacagttttcgccaacaatgtcacccaccttgtcttccatcactcagggcgtccccctggataccagtaaactgtccactgaccagcggttacccccatacccatacagctccccaagtctggttctgcctacccagccccacaccccaaagtctctacagcagccagggctgccctctcagtcttgttcagtgcagtcctcaggtgggcagcccccaggcaggcagtctcattatgggacaccgtacccacctgggcccagtgggcatgggcaacagtcttaccaccggccaatgagtgacttcaacctggggaatctggagcagttcagcatggagagcccatcagccagcctggtgctggatccccctggcttttctgaagggcctggatttttagggggtgaggggccaatgggtggcccccaggatccccacaccttcaaccaccagaacttgacccactgttcccgccatggctcagggcctaacatcatcctcacaggggactcctctccaggtttctctaaggagattgcagcagccctggccggagtgcctggctttgaggtgtcagcagctggattggagctagggcttgggctagaagatgagctgcgcatggagccactgggcctggaagggctaaacatgctgagtgacccctgtgccctgctgcctgatcctgctgtggaggagtcattccgcagtgaccggctccaatgagggcacctcatcaccatccctcttcttggccccatcccccaccaccattcctttcctcccttccccctggcaggtagagactctactctctgtccccagatcctctttctagcatgaatgaaggatgccaagaatgagaaaaagcaaggggtttgtccaggtggcccctgaattctgcgcaagggatgggcctgggggaactcaagggagggcctaaagcacttgtaactttgaaccgtctgtctggaggtcagagcctgttggaaagcaggggtagaggggagccctggaagcagggcttttccggatgcctaggggtgggcagtgccagcccctcctcaccactcttccccttgcagtggaggagagagccagagtggatactattttttattaaatatattattatatgttaataaaaaaatcatatcaa

SEQ ID NO: 455886 - DNA, 1870 bp, Homo sapiens
ccagggttctctgctgagcactgtcctcattttccatattctcccttctctcctcagctatcctcatcctcttcccgacctcggtcctgtgaagtccctggaattaacatctttccatctcctgaccagcctgccaatgtgcctgtcctcccacctgccatgaacacggggggctccctacctgacctcaccaacctgcactttcccccaccactgcccacccccctggaccctgaagagacagcctaccctagcctgagtgggggcaacagtacctccaatttgacccacaccatgactcacctgggcatcagcaggggcatgggcctgggcccaggctatgatgcaccaggacttcattcacctctcagccacccatccctgcagtcctccctaagcaatcccaacctccaggcttccctgagcagtcctcagccccagcttcagggctcccacagccacccctctctgcctgcctcctccttggcccgccatgtactgcccaccacctccctgggccacccctcactcagtgctccggctctctcctcctcctcttcctcctcctccacttcatctcctgttttgggcgccccctcttaccctgcttctacccctggggcctccccccaccaccgccgtgtgcccctcagccccctgagtttgctcgcgggcccagccgacgccagaaggtcccaacagcagctgcccaaacagttttcgccaacaatgtcacccaccttgtcttccatcactcagggcgtccccctggataccagtaaactgtccactgaccagcggttacccccatacccatacagctccccaagtctggttctgcctacccagccccacaccccaaagtctctacagcagccagggctgccctctcagtcttgttcagtgcagtcctcaggtgggcagcccccaggcaggcagtctcattatgggacaccgtacccacctgggcccagtgggcatgggcaacagtcttaccaccggccaatgagtgacttcaacctggggaatctggagcagttcagcatggagagcccatcagccagcctggtgctggatccccctggcttttctgaagggcctggatttttagggggtgaggggccaatgggtggcccccaggatccccacaccttcaaccaccagaacttgacccactgttcccgccatggctcagggcctaacatcatcctcacaggggactcctctccaggtttctctaaggagattgcagcagccctggccggagtgcctggctttgaggtgtcagcagctggattggagctagggcttgggctagaagatgagctgcgcatggagccactgggcctggaagggctaaacatgctgagtgacccctgtgccctgctgcctgatcctgctgtggaggagtcattccgcagtgaccggctccaatgagggcacctcatcaccatccctcttcttggccccatcccccaccaccattcctttcctcccttccccctggcaggtagagactctactctctgtccccagatcctctttctagcatgaatgaaggatgccaagaatgagaaaaagcaaggggtttgtccaggtggcccctgaattctgcgcaagggatgggcctgggggaactcaagggagggcctaaagcacttgtaactttgaaccgtctgtctggaggtcagagcctgttggaaagcaggggtagaggggagccctggaagcagggcttttccggatgcctaggggtgggcagtgccagcccctcctcaccactcttccccttgcagtggaggagagagccagagtggatactattttttattaaatatattattatatgttaataaaaaaatcatatcaa

SEQ ID NO: 455887 - DNA, 2511 bp, Homo sapiens
  misc_feature (19)..(19): n is a, c, g, or t
ttaggctaggtacgaggcnggtgtgaatcggccgaggcatgtagtgagaccctcgcgaggtctgagagtcactggagctaccagaagcatcatggggccctggggagagccagagctcctggtgtggcgccccgaggcggtagcttcagagcctccagtgcctgtggggctggaggtgaagttgggggccctggtgctgctgctggtgctcaccctcctctgcagcctggtgcccatctgtgtgctgcgccggccaggagctaaccatgaaggctcagcttcccgccagaaagccctgagcctagtaagctgtttcgcggggggcgtctttttggccacttgtctcctggacctgctgcctgactacctggctgccatagatgaggccctggcagccttgcacgtgacgctccagttcccactgcaagagttcatcctggccatgggcttcttcctggtcctggtgatggagcagatcacactggcttacaaggagcagtcagggccgtcacctctggaggaaacaagggctctgctgggaacagtgaatggtgggccgcagcattggcatgatgggccaggggtcccacagttacaggcccaaaaactgcgactggcatacacaaggagctctcattatggtgggtctctgcccaatgttaaccagattggctctggcctggccgagttccagagccccctccactcacctttggattcatctcggagcactcggcaccatgggctggtggaacgggtgcagcgagatcctcgaagaatggtgtccccacttcgccgatacacccgccacattgacagctctccctatagtcctgcctacttatctcctcccccagagtctagctggcgaaggacgatggcctggggcaatttccctgcagagaaggggcagttgtttcgactaccatctgcacttaacaggacaagctctgactctgcccttcatacaagtgtgatgaaccccagtccccaggatacctacccaggccccacacctcccagcatcctgcccagccgacgtgggggtattctggatggtgaaatggaccccaaagtacctgctattgaggagaacttgctagatgacaagcatttgctgaagccatgggatgctaagaagctatcctcatcctcttcccgacctcggtcctgtgaagtccctggaattaacatctttccatctcctgaccagcctgccaatgtgcctgtcctcccacctgccatgaacacggggggctccctacctgacctcaccaacctgcactttcccccaccactgcccacccccctggaccctgaagagacagcctaccctagcctgagtgggggcaacagtacctccaatttgacccacaccatgactcacctgggcatcagcaggggcatgggcctgggcccaggctatgatgcaccaggacttcattcacctctcagccacccatccctgcagtcctccctaagcaatcccaacctccaggcttccctgagcagtcctcagccccagcttcagggctcccacagccacccctctctgcctgcctcctccttggcccgccatgtactgcccaccacctccctgggccacccctcactcagtgctccggctctctcctcctcctcttcctcctcctccacttcatctcctgttttgggcgccccctcttaccctgcttctacccctggggcctccccccaccaccgccgtgtgcccctcagccccctgagtttgctcgcgggcccagccgacgccagaaggtcccaacagcagctgcccaaacagttttcgccaacaatgtcacccaccttgtcttccatcactcagggcgtccccctggataccagtaaactgtccactgaccagcggttacccccatacccatacagctccccaagtctggttctgcctacccagccccacaccccaaagtctctacagcagccagggctgccctctcagtcttgttcagtgcagtcctcaggtgggcagcccccaggcaggcagtctcattatgggacaccgtacccacctgggcccagtgggcatgggcaacagtcttaccaccggccaatgagtgacttcaacctggggaatctggagcagttcagcatggagagcccatcagccagcctggtgctggatccccctggcttttctgaagggcctggatttttagggggtgaggggccaatgggtggcccccaggatccccacaccttcaaccaccagaacttgacccactgttcccgccatggctcagggcctaacatcatcctcacaggggactcctctccaggtttctctaaggagattgcagcagccctggccggagtgcctggctttgaggtgtcagcagctggattggagctagggcttgggctagaagatgagctgcgcatggagccactggcgggaacagtgggtcaagttctggtggttgaaggtgtggggatcctgggggccacccattggcccctcacccccgccgtcta

SEQ ID NO: 455888 - DNA, 1476 bp, Homo sapiens
  misc_feature (19)..(19): n is a, c, g, or t
ttaggctaggtacgaggcnggtgtgaatcggccgaggcatgtagtgagaccctcgcgaggtctgagagtcactggagctaccagaagcatcatggggccctggggagagccagagctcctggtgtggcgccccgaggcggtagcttcagagcctccagtgcctgtggggctggaggtgaagttgggggccctggtgctgctgctggtgctcaccctcctctgcagcctggtgcccatctgtgtgctgcgccggccaggagctaaccatgaaggctcagcttcccgccagaaagccctgagcctagtaagctgtttcgcggggggcgtctttttggccacttgtctcctggacctgctgcctgactacctggctgccatagatgaggccctggcagccttgcacgtgacgctccagttcccactgcaagagttcatcctggccatgggcttcttcctggtcctggtgatggagcagatcacactggcttacaaggagcagtcagggccgtcacctctggaggaaacaagggctctgctgggaacagtgaatggtgggccgcagcattggcatgatgggccaggggtcccacagttacaggcccaaaaactgcgactggcatacacaaggagctctcattatggtgggtctctgcccaatgttaaccagattggctctggcctggccgagttccagagccccctccactcacctttggattcatctcggagcactcggcaccatgggctggtggaacgggtgcagcgagatcctcgaagaatggtgtccccacttcgccgatacacccgccacattgacagctctccctatagtcctgcctacttatctcctcccccagagtctagctggcgaaggacgatggcctggggcaatttccctgcagagaaggggcagttgtttcgactaccatctgcacttaacaggacaagctctgactctgcccttcatacaagtgtgatgaaccccagtccccaggatacctacccaggccccacacctcccagcatcctgcccagccgacgtgggggtattctggatggtgaaatggaccccaaagtacctgctattgaggagaacttgctagatgacaagcatttgctgaagccatgggatgctaagaagctatcctcatcctcttcccgacctcggtcctgtgaagtccctggaattaacatctttccatctcctgaccagcctgccaatgtgcctgtcctcccacctgccatgaacacggggggctccctacctgacctcaccaacctgcactttcccccaccactgcccacccccctggaccctgaagagacagcctaccctagcctgagtgggggcaacagtacctccaatttgacccacaccatgactcacctgggcatcagcaggggcatgggcctgggcccaggctatgatgcaccagacttcattcacctctcagagaggccagtgtgcttcggttg

SEQ ID NO: 455889 - DNA, 1003 bp, Homo sapiens
  misc_feature (19)..(19): n is a, c, g, or t
ttaggctaggtacgaggcnggtgtgaatcggccgaggcatgtagtgagaccctcgcgaggtctgagagtcactggagctaccagaagcatcatggggccctggggagagccagagctcctggtgtggcgccccgaggcggtagcttcagagcctccagtgcctgtggggctggaggtgaagttgggggccctggtgctgctgctggtgctcaccctcctctgcagcctggtgcccatctgtgtgctgcgccggccaggagctaaccatgaaggctcagcttcccgccagaaagccctgagcctagtaagctgtttcgcggggggcgtctttttggccacttgtctcctggacctgctgcctgactacctggctgccatagatgaggccctggcagccttgcacgtgacgctccagttcccactgcaagagttcatcctggccatgggcttcttcctggtcctggtgatggagcagatcacactggcttacaaggagcagtcagggccgtcacctctggaggaaacaagggctctgctgggaacagtgaatggtgggccgcagcattggcatgatgggccaggggtcccacagttacaggcccaaaaactgcgactggcatacacaaggagctctcattatggtgggtctctgcccaatgttaaccagattggctctggcctggccgagttccagagccccctccactcacctttggattcatctcggagcactcggcaccatgggctggtggaacgggtgcagcgagatcctcgaagaatggtgtccccacttcgccgatacacccgccacattgacagctctccctatagtcctgcctaatatgtccttccccaaagtctactgcgaagacgggctcggcaatcctcagagggatggttgacaccgcttttagaggacgtgattcccataagggacagaccagtatacgggcaacaatcacgtgttggagcgaaccacactaacgaaagaaagaaggaaacc

SEQ ID NO: 455890 - DNA, 475 bp, Homo sapiens
cgtgttgaggggttgcaataagtaattaccagtctccaatcagtgcccttcgtggtcatccctcttcttggccccatcccccaccaccattcctttcctcccttccccctggcaggtagagactctactctctgtccccagatcctctttctagcatgaatgaaggatgccaagaatgagaaaaagcaaggggtttgtccaggtggcccctgaattctgcgcaagggatgggcctgggggaactcaagggagggcctaaagcacttgtaactttgaaccgtctgtctggaggtcagagcctgttggaaagcaggggtagaggggagccctggaagcagggcttttccggatgcctaggggtgggcagtgccagcccctcctcaccactcttccccttgcagtggaggagagagccagagtggatactattttttattaaatatattattatatgttaataaaaaaatcatatcaa

SEQ ID NO: 455891 - DNA, 500 bp, Homo sapiens
atgactcacctgggcatcagcaggggcatgggcctgggcccaggctatgatgcaccaggtgagtgactgtcctggccatgtgcccactgggtgctgcctgactggagggatgaaggggaggtaggtttgagcacctgagatcctgctgtgatcacccacaccgcctgtcacctctgcaccccaggattccctcacggcagttctcagccagtgataactggtaggtgtggtgtttcctagaaagaagaggaagggcagtccccagatgggcagtgctgtcagggatagagtagggaggacgttgtgttgccgctttcatagtctggtcactgccacccattctgggtggaaaggggctcagttcccatcagtaatgttggcatctctggttttttgtctgtgcctgcaggacttcattcacctctcagccacccatccctgcagtcctccctaagcaatcccaacctccaggcttccctgagcagtcctcagccccagct

SEQ ID NO: 455892 - DNA, 2435 bp, Homo sapiens
  misc_feature (4)..(4): n is a, c, g, or t
  misc_feature (6)..(8): n is a, c, g, or t
ggcngnnnaggagagtcaggccaatggggccgcagttctttcttttttttttctttattcttatttttggagacagggtctcgctctgttgcccaggctggagtgcggtggtgcgatcacggttccatgcagcccccgacctcccgggctcaggtgattctcccgcctcagcaccgcgagcagctaggaccacaggcgcgagccactgcgtccggccggcgggacttatttgtcaggcggggattgggttccgccagcctaaagggaggggtaagcgccagaatatgaatcgccgggaagctgggagaaagctccgggaaaccctgagcagccaggtcgcctgctccgcccgctcccgctcccgatctctgattgctcctaactgacgtcactcccggtctgtccccgcccactcggtgctgccattggcagtcggtcgtgggtctgagagtcactggagctaccagaagcatcatggggccctggggagagccagagctcctggtgtggcgccccgaggcggtagcttcagagcctccagtgcctgtggggctggaggtgaagttgggggccctggtgctgctgctggtgctcaccctcctctgcagcctggtgcccatctgtgtgctgcgccggccaggagctaaccatgaaggctcagcttcccgccagaaagccctgagcctagtaagctgtttcgcggggggcgtctttttggccacttgtctcctggacctgctgcctgactacctggctgccatagatgaggccctggcagccttgcacgtgacgctccagttcccactgcaagagttcatcctggccatgggcttcttcctggtcctggtgatggagcagatcacactggcttacaaggagcagtcagggccgtcacctctggaggaaacaagggctctgctgggaacagtgaatggtgggccgcagcattggcatgatgggccaggggtcccacaggcgagtggagccccagcaaccccctcagccttgcgtgcctgtgtactggtgttctccctggccctccactccgtgttcgaggggctggcggtagggctgcagcgagaccgggctcgggccatggagctgtgcctggctttgctgctccacaagggcatcctggctgtcagcctgtccctgcggctgttgcagagccaccttagggcacaggtggtggctggctgtgggatcctcttctcatgcatgacacctctaggcatcgggctgggtgcagctctggcagagtcggcaggacctctgcaccagctggcccagtctgtgctagagggcatggcagctggcacctttctctatatcacctttctggaaatcctgccccaggagctggccagttctgagcaaaggatcctcaaggtcattctgctcctagcaggctttgccctgctcactggcctgctcttcatccaaatctagggggcttcaagagaggggcaggggagattgatgatcaggtgcccctgttctcccttccctcccccagttgtggggaataggaaggaaaggggaagggaaatactgaggaccaaaaagttctctgggagctaaagatagagcctttggggctatctgactaatgagagggaagtgggcagacaagaggctggccccagtcccaaggaacaagagatggtcaagtcgctagagacatatcaggggacattaggattggggaagacacttgactgctagaatcagaggttggacactatacataaggacaggctcacatgggaggctggaggtgggtacccagctgctgtggaacgggtatggacaggtcataaacctagagtcagtgtcctgttggtcctagcccatttcagcaccctgccacttggagtggacccctcctactcttcttagcgcctaccctcatacctatctccctcctcccatctcctaggggactggcgccaaatggtctctccctgccaattttggtatcttctctggcctctccagtcctgcttactcctctatttttaaagtgccaaacaaatccccttcctctttctcaaagcacagtaatgtggcactgagccctacccagcacctcagtgaagggggcctgcttgctctttattttggtcccggatcctggggtggggcagaaatattttctgggctggggtaggaggaaggttgttgcagccatctactgctgctgtaccctaggaatatggggacatggacatggtgtcccatgcccagatgataaacactgagctgccaaaacatttttttaaatacacccgaggagcccaagggggaagggcaatgcctacccccagcgttatttttggggagggagggctgtgcatagggacatattctttagaatctattttattaactgacctgttttgggacctgttacccaaataaaagatgtttctaga

SEQ ID NO: 455893 - DNA, 594 bp, Homo sapiens
tcagacgctgaactatgtggtccagaatgtctacatgtgtccaactataaagtgatgactataagaaagggaaagttgctttaaggacgacctcagtatctggcacactctggcaactgaagcccagagctgaagcataaaaccaaaggaaacaaaaagcagtctcagagcatatgagaaatcaaagaggtttcttatataccgcagatagcaattttaaaaatcagtatttttaagctcagagcattggatgccaacaacacatagttcagcgtctgactcagacgctgaactatgtgcaggggactcctctccaggtttctctaaggagattgcagcagccctggccggagtgcctggctttgaggtgtcagcagctggattggagctagggcttgggctagaagatgagctgcgcatggagccactgggcctggaagggctaaacatgctgagtgacccctgtgccctgctgcctgatcctgctgtggaggagtcattccgcagtgaccggctccaatgagggcacctcatcaccatccctcttcttggccccatcccccaccaccacatagttaagcgtctgacggtacc

SEQ ID NO: 455894 - DNA, 2721 bp, Homo sapiens
cagcggggtccatgtcggctgcccaggcctccccgggcccgggaacaggagtcccagctcacgcattcttcatctgcttcccgcgacgcttggcggcctcgcaccccgcctcctggagcccggactttcaggcaccgccctcagtgtcgcctcagtccgtcccgggaccgcagactcttagggcccctctctttggccatctgcctctaggtcccatcctggggcctgaagcgcttgttctctgcgctgggaaaaggggaacgatggagcgatccagcacccaaacttaccctgtccaggtggcccacgaagctacccaagacatctctgcacagccctagcctttttggcttcacccactccgttcgggagttggggacccggcctctacattccttaggggaactccagctccaggtcctatttggaggcggctcctagtttcctagttttctgggggcaccaggtgaaagggtgatgagatatccatacagcctttctcatgcctcggtttcccccgtgcagtctccctgaataagtcacttgggaaagaaagtgtgagaagagaggaatgttcctggtacaggagtagatgagtcaccctgggtaggggaaggtcacaaagtggctggggccagggagctgcactctgctgaccaagcttccccattccttgccccatcttcctttgcatgatttttcccaaccactctggtctgtcttcctaggtctgagagtcactggagctaccagaagcatcatggggccctggggagagccagagctcctggtgtggcgccccgaggcggtagcttcagagcctccagtgcctgtggggctggaggtgaagttgggggccctggtgctgctgctggtgctcaccctcctctgcagcctggtgcccatctgtgtgctgcgccggccaggagctaaccatgaaggctcagcttcccgccagaaagccctgagcctagtaagctgtttcgcggggggcgtctttttggccacttgtctcctggacctgctgcctgactacctggctgccatagatgaggccctggcagccttgcacgtgacgctccagttcccactgcaagagttcatcctggccatgggcttcttcctggtcctggtgatggagcagatcacactggcttacaaggagcagtcagggccgtcacctctggaggaaacaagggctctgctgggaacagtgaatggtgggccgcagcattggcatgatgggccaggggtcccacaggcgagtggagccccagcaaccccctcagccttgcgtgcctgtgtactggtgttctccctggccctccactccgtgttcgaggggctggcggtagggctgcagcgagaccgggctcgggccatggagctgtgcctggctttgctgctccacaagggcatcctggctgtcagcctgtccctgcggctgttgcagagccaccttagggcacaggtggtggctggctgtgggatcctcttctcatgcatgacacctctaggcatcgggctgggtgcagctctggcagagtcggcaggacctctgcaccagctggcccagtctgtgctagagggcatggcagctggcacctttctctatatcacctttctggaaatcctgccccaggagctggccagttctgagcaaaggatcctcaaggtcattctgctcctagcaggctttgccctgctcactggcctgctcttcatccaaatctagggggcttcaagagaggggcaggggagattgatgatcaggtgcccctgttctcccttccctcccccagttgtggggaataggaaggaaaggggaagggaaatactgaggaccaaaaagttctctgggagctaaagatagagcctttggggctatctgactaatgagagggaagtgggcagacaagaggctggccccagtcccaaggaacaagagatggtcaagtcgctagagacatatcaggggacattaggattggggaagacacttgactgctagaatcagaggttggacactatacataaggacaggctcacatgggaggctggaggtgggtacccagctgctgtggaacgggtatggacaggtcataaacctagagtcagtgtcctgttggtcctagcccatttcagcaccctgccacttggagtggacccctcctactcttcttagcgcctaccctcatacctatctccctcctcccatctcctaggggactggcgccaaatggtctctccctgccaattttggtatcttctctggcctctccagtcctgcttactcctctatttttaaagtgccaaacaaatccccttcctctttctcaaagcacagtaatgtggcactgagccctacccagcacctcagtgaagggggcctgcttgctctttattttggtcccggatcctggggtggggcagaaatattttctgggctggggtaggaggaaggttgttgcagccatctactgctgctgtaccctaggaatatggggacatggacatggtgtcccatgcccagatgataaacactgagctgccaaaacatttttttaaatacacccgaggagcccaagggggaagggcaatgcctacccccagcgttatttttggggagggagggctgtgcatagggacatattctttagaatctattttattaactgacctgttttgggacctgttacccaaataaaagatgtttctaga

SEQ ID NO: 455895 - DNA, 2292 bp, Homo sapiens
cagcggggtccatgtcggctgcccaggcctccccgggcccgggaacaggagtcccagctcacgcattcttcatctgcttcccgcgacgcttggcggcctcgcaccccgcctcctggagcccggactttcaggcaccgccctcagtgtcgcctcagtccgtcccgggaccgcagactcttagggcccctctctttggccatctgcctctaggtcccatcctggggcctgaagcgcttgttctctgcgctgggaaaaggggaacgatggagcgatccagcacccaaacttaccctgtccaggtctgagagtcactggagctaccagaagcatcatggggccctggggagagccagagctcctggtgtggcgccccgaggcggtagcttcagagcctccagtgcctgtggggctggaggtgaagttgggggccctggtgctgctgctggtgctcaccctcctctgcagcctggtgcccatctgtgtgctgcgccggccaggagctaaccatgaaggctcagcttcccgccagaaagccctgagcctagtaagctgtttcgcggggggcgtctttttggccacttgtctcctggacctgctgcctgactacctggctgccatagatgaggccctggcagccttgcacgtgacgctccagttcccactgcaagagttcatcctggccatgggcttcttcctggtcctggtgatggagcagatcacactggcttacaaggagcagtcagggccgtcacctctggaggaaacaagggctctgctgggaacagtgaatggtgggccgcagcattggcatgatgggccaggggtcccacaggcgagtggagccccagcaaccccctcagccttgcgtgcctgtgtactggtgttctccctggccctccactccgtgttcgaggggctggcggtagggctgcagcgagaccgggctcgggccatggagctgtgcctggctttgctgctccacaagggcatcctggctgtcagcctgtccctgcggctgttgcagagccaccttagggcacaggtggtggctggctgtgggatcctcttctcatgcatgacacctctaggcatcgggctgggtgcagctctggcagagtcggcaggacctctgcaccagctggcccagtctgtgctagagggcatggcagctggcacctttctctatatcacctttctggaaatcctgccccaggagctggccagttctgagcaaaggatcctcaaggtcattctgctcctagcaggctttgccctgctcactggcctgctcttcatccaaatctagggggcttcaagagaggggcaggggagattgatgatcaggtgcccctgttctcccttccctcccccagttgtggggaataggaaggaaaggggaagggaaatactgaggaccaaaaagttctctgggagctaaagatagagcctttggggctatctgactaatgagagggaagtgggcagacaagaggctggccccagtcccaaggaacaagagatggtcaagtcgctagagacatatcaggggacattaggattggggaagacacttgactgctagaatcagaggttggacactatacataaggacaggctcacatgggaggctggaggtgggtacccagctgctgtggaacgggtatggacaggtcataaacctagagtcagtgtcctgttggtcctagcccatttcagcaccctgccacttggagtggacccctcctactcttcttagcgcctaccctcatacctatctccctcctcccatctcctaggggactggcgccaaatggtctctccctgccaattttggtatcttctctggcctctccagtcctgcttactcctctatttttaaagtgccaaacaaatccccttcctctttctcaaagcacagtaatgtggcactgagccctacccagcacctcagtgaagggggcctgcttgctctttattttggtcccggatcctggggtggggcagaaatattttctgggctggggtaggaggaaggttgttgcagccatctactgctgctgtaccctaggaatatggggacatggacatggtgtcccatgcccagatgataaacactgagctgccaaaacatttttttaaatacacccgaggagcccaagggggaagggcaatgcctacccccagcgttatttttggggagggagggctgtgcatagggacatattctttagaatctattttattaactgacctgttttgggacctgttacccaaataaaagatgtttctaga

SEQ ID NO: 455896 - DNA, 2575 bp, Homo sapiens
  misc_feature (19)..(19): n is a, c, g, or t
  misc_feature (2061)..(2061): n is a, c, g, or t
  misc_feature (2064)..(2064): n is a, c, g, or t
  misc_feature (2066)..(2067): n is a, c, g, or t
  misc_feature (2070)..(2070): n is a, c, g, or t
  misc_feature (2072)..(2072): n is a, c, g, or t
ttaggctaggtacgaggcnggtgtgaatcggccgaggcatgtagtgagaccctcgcgaggtctgagagtcactggagctaccagaagcatcatggggccctggggagagccagagctcctggtgtggcgccccgaggcggtagcttcagagcctccagtgcctgtggggctggaggtgaagttgggggccctggtgctgctgctggtgctcaccctcctctgcagcctggtgcccatctgtgtgctgcgccggccaggagctaaccatgaaggctcagcttcccgccagaaagccctgagcctagtaagctgtttcgcggggggcgtctttttggccacttgtctcctggacctgctgcctgactacctggctgccatagatgaggccctggcagccttgcacgtgacgctccagttcccactgcaagagttcatcctggccatgggcttcttcctggtcctggtgatggagcagatcacactggcttacaaggagcagtcagggccgtcacctctggaggaaacaagggctctgctgggaacagtgaatggtgggccgcagcattggcatgatgggccaggggtcccacaggcgagtggagccccagcaaccccctcagccttgcgtgcctgtgtactggtgttctccctggccctccactccgtgttcgaggggctggcggtagggctgcagcgagaccgggctcgggccatggagctgtgcctggctttgctgctccacaagggcatcctggctgtcagcctgtccctgcggctgttgcagagccaccttagggcacaggtggtggctggctgtgggatcctcttctcatgcatgacacctctaggcatcgggctgggtgcagctctggcagagtcggcaggacctctgcaccagctggcccagtctgtgctagagggcatggcagctggcacctttctctatatcacctttctggaaatcctgccccaggagctggccagttctgagcaaaggatcctcaaggtcattctgctcctagcaggctttgccctgctcactggcctgctcttcatccaaatctagggggcttcaagagaggggcaggggagattgatgatcaggtgcccctgttctcccttccctcccccagttgtggggaataggaaggaaaggggaagggaaatactgaggaccaaaaagttctctgggagctaaagatagagcctttggggctatctgactaatgagagggaagtgggcagacaagaggctggccccagtcccaaggaacaagagatggtcaagtcgctagagacatatcaggggacattaggattggggaagacacttgactgctagaatcagaggttggacactatacataaggacaggctcacatgggaggctggaggtgggtacccagctgctgtggaacgggtatggacaggtcataaacctagagtcagtgtcctgttggtcctagcccatttcagcaccctgccacttggagtggacccctcctactcttcttagcgcctaccctcatacctatctccctcctcccatctcctaggggactggcgccaaatggtctctccctgccaattttggtatcttctctggcctctccagtcctgcttactcctctatttttaaagtgccaaacaaatccccttcctctttctcaaagcacagtaatgtggcactgagccctacccagcacctcagtgaagggggcctgcttgctctttattttggtcccggatcctggggtggggcagaaatattttctgggctggggtaggaggaaggttgttgcagccatctactgctgctgtaccctaggaatatggggacatggacatggtgtcccatgcccagatgataaacactgagctgccaaaacatttttttaaatacacccgaggagcccaagggggaagggcaatgcctacccccagcgttatttttggggagggagggctgtgcatagggacatattctttagaatctattttattaactgacctgttttgggacctgttacccaaataaaagatgtttctagaaaaaaaaanaanannaananaaaaaaaaaaaaaaaaaaaaaaaaagagggggggcgccgcgcaaaaaaatatccccccgagggggcccaaactcggcggcaccccaggttttgtggggacaaagggggccccaaaaaggggggctaaaaaaaagaagggagggggcggggatattatataaaaagaggcttgtagaagtggggaaaaaagcgggtcaagaactgaggagaacactttgtggagaagaaggagaccatatatcacggtagggggggaggagcgaaaaataattggtgggcaaaaaatatcactcataagaaaagagttttaagacaggtccttgatgaagggggaacaatataatagaaacctttttaagagagggtgttattaggtggggtggtgtaaaacaccaagggcggggatatttatgtagctggagcgataattggaaaagagattgtgtggcctaaataggggtgtagataatattttgggaaaaaattttttattaccggggagt

SEQ ID NO: 455897 - DNA, 2022 bp, Homo sapiens
  misc_feature (19)..(19): n is a, c, g, or t
ttaggctaggtacgaggcnggtgtgaatcggccgaggcatgtagtgagaccctcgcgaggtctgagagtcactggagctaccagaagcatcatggggccctggggagagccagagctcctggtgtggcgccccgaggcggtagcttcagagcctccagtgcctgtggggctggaggtgaagttgggggccctggtgctgctgctggtgctcaccctcctctgcagcctggtgcccatctgtgtgctgcgccggccaggagctaaccatgaaggctcagcttcccgccagaaagccctgagcctagtaagctgtttcgcggggggcgtctttttggccacttgtctcctggacctgctgcctgactacctggctgccatagatgaggccctggcagccttgcacgtgacgctccagttcccactgcaagagttcatcctggccatgggcttcttcctggtcctggtgatggagcagatcacactggcttacaaggagcagtcagggccgtcacctctggaggaaacaagggctctgctgggaacagtgaatggtgggccgcagcattggcatgatgggccaggggtcccacaggcgagtggagccccagcaaccccctcagccttgcgtgcctgtgtactggtgttctccctggccctccactccgtgttcgaggggctggcggtagggctgcagcgagaccgggctcgggccatggagctgtgcctggctttgctgctccacaagggcatcctggctgtcagcctgtccctgcggctgttgcagagccaccttagggcacaggtggtggctggctgtgggatcctcttctcatgcatgacacctctaggcatcgggctgggtgcagctctggcagagtcggcaggacctctgcaccagctggcccagtctgtgctagagggcatggcagctggcacctttctctatatcacctttctggaaatcctgccccaggagctggccagttctgagcaaaggatcctcaaggtcattctgctcctagcaggctttgccctgctcactggcctgctcttcatccaaatctagggggcttcaagagaggggcaggggagattgatgatcaggtgcccctgttctcccttccctcccccagttgtggggaataggaaggaaaggggaagggaaatactgaggaccaaaaagttctctgggagctaaagatagagcctttggggctatctgactaatgagagggaagtgggcagacaagaggctggccccagtcccaaggaacaagagatggtcaagtcgctagagacacttgactgctagaatcagaggttggacactatacataaggacaggctcacatgggaggctggaggtgggtacccagctgctgtggaacgggtatggacaggtcataaacctagagtcagtgtcctgttggtcctagcccatttcagcaccctgccacttggagtggacccctcctactcttcttagcgcctaccctcatacctatctccctcctcccatctcctaggggactggcgccaaatggtctctccctgccaattttggtatcttctctggcctctccagtcctgcttactcctctatttttaaagtgccaaacaaatccccttcctctttctcaaagcacagtaatgtggcactgagccctacccagcacctcagtgaagggggcctgcttgctctttattttggtcccggatcctggggtggggcagaaatattttctgggctggggtaggaggaaggttgttgcagccatctactgctgctgtaccctaggaatatggggacatggacatggtgtcccatgcccagatgataaacactgagctgccaaaacatttttttaaatacacccgaggagcccaagggggaagggcaatgcctacccccagcgttatttttggggagggagggctgtgcatagggacatattctttagaatctattttattaactgacctgttttgggacctgttacccaaataaaagatgtttctaga

SEQ ID NO: 455898 - DNA, 1872 bp, Homo sapiens
  misc_feature (19)..(19): n is a, c, g, or t
ttaggctaggtacgaggcnggtgtgaatcggccgaggcatgtagtgagaccctcgcgaggtctgagagtcactggagctaccagaagcatcatggggccctggggagagccagagctcctggtgtggcgccccgaggcggtagcttcagagcctccagtgcctgtggggctggaggtgaagttgggggccctggtgctgctgctggtgctcaccctcctctgcagcctggtgcccatctgtgtgctgcgccggccaggagctaaccatgaaggctcagcttcccgccagaaagccctgagcctagtaagctgtttcgcggggggcgtctttttggccacttgtctcctggacctgctgcctgactacctggctgccatagatgaggccctggcagccttgcacgtgacgctccagttcccactgcaagagttcatcctggccatgggcttcttcctggtcctggtgatggagcagatcacactggcttacaaggagcagtcagggccgtcacctctggaggaaacaagggctctgctgggaacagtgaatggtgggccgcagcattggcatgatgggccaggggtcccacaggcgagtggagccccagcaaccccctcagccttgcgtgcctgtgtactggtgttctccctggccctccactccgtgttcgaggggctggcggtagggctgcagcgagaccgggctcgggccatggagctgtgcctggctttgctgctccacaagggcatcctggctgtcagcctgtccctgcggctgttgcagagccaccttagggcacaggtggtggctggctgtgggatcctcttctcatgcatgacacctctaggcatcgggctgggtgcagctctggcagagtcggcaggacctctgcaccagctggcccagtctgtgctagagggcatggcagctggcacctttctctatatcacctttctggaaatcctgccccaggagctggccagttctgagcaaaggatcctcaaggtcattctgctcctagcaggctttgccctgctcactggcctgctcttcatccaaatctagggggcttcaagagaggggcaggggagattgatgatcaggtgcccctgttctcccttccctcccccagttgtggggaataggaaggaaaggggaagggaaatactgaggaccaaaaagttctctgggagctaaagatagagcctttggggctatctgactaatgagagggaagtgggcagacaagaggctggccccagtcccaaggaacaagagatggtcaagtcgctagagacatatcaggggacattaggattggggaagacacttgactgctagaatcagaggttggacactatacataaggacaggctcacatgggaggctggaggtgggtacccagctgctgtggaacgggtatggacaggtcataaacctagagtcagtgtcctgttggtcctagcccatttcagcaccctctttctcaaagcacagtaatgtggcactgagccctacccagcacctcagtgaagggggcctgcttgctctttattttggtcccggatcctggggtggggcagaaatattttctgggctggggtaggaggaaggttgttgcagccatctactgctgctgtaccctaggaatatggggacatggacatggtgtcccatgcccagatgataaacactgagctgccaaaacatttttttaaatacacccgaggagcccaagggggaagggcaatgcctacccccagcgttatttttggggagggagggctgtgcatagggacatattctttagaatctattttattaactgacctgttttgggacctgttacccaaataaaagatgtttctaga

SEQ ID NO: 455899 - DNA, 1790 bp, Homo sapiens
  misc_feature (19)..(19): n is a, c, g, or t
  misc_feature (1616)..(1616): n is a, c, g, or t
  misc_feature (1619)..(1619): n is a, c, g, or t
  misc_feature (1621)..(1621): n is a, c, g, or t
  misc_feature (1634)..(1634): n is a, c, g, or t
  misc_feature (1661)..(1661): n is a, c, g, or t
ttaggctaggtacgaggcnggtgtgaatcggccgaggcatgtagtgagaccctcgcgaggtctgagagtcactggagctaccagaagcatcatggggccctggggagagccagagctcctggtgtggcgccccgaggcggtagcttcagagcctccagtgcctgtggggctggaggtgaagttgggggccctggtgctgctgctggtgctcaccctcctctgcagcctggtgcccatctgtgtgctgcgccggccaggagctaaccatgaaggctcagcttcccgccagaaagccctgagcctagtaagctgtttcgcggggggcgtctttttggccacttgtctcctggacctgctgcctgactacctggctgccatagatgaggccctggcagccttgcacgtgacgctccagttcccactgcaagagttcatcctggccatgggcttcttcctggtcctggtgatggagcagatcacactggcttacaaggagcagtcagggccgtcacctctggaggaaacaagggctctgctgggaacagtgaatggtgggccgcagcattggcatgatgggccaggggtcccacaggcgagtggagccccagcaaccccctcagccttgcgtgcctgtgtactggtgttctccctggccctccactccgtgttcgaggggctggcggtagggctgcagcgagaccgggctcgggccatggagctgtgcctggctttgctgctccacaagggcatcctggctgtcagcctgtccctgcggctgttgcagagccaccttagggcacaggtggtggctggctgtgggatcctcttctcatgcatgacacctctaggcatcgggctgggtgcagctctggcagagtcggcaggacctctgcaccagctggcccagtctgtgctagagggcatggcagctggcacctttctctatatcacctttctggaaatcctgccccaggagctggccagttctgagcaaaggatcctcaaggtcattctgctcctagcaggctttgccctgctcactggcctgctcttcatccaaatctagggggcttcaagagaggggcaggggagattgatgatcaggtgcccctgttctcccttccctcccccagttgtggggaataggaaggaaaggggaagggaaatactgaggaccaaaaagttctctgggagctaaagatagagcctttggggctatctgactaatgagagggaagtgggcagacaagaggctggccccagtcccaaggaacaagagatggtcaagtcgctagagacatatcaggggacattaggattggggaagacacttgactgctagaatcagaggttggacactatacataaggacaggctcacatgggaggctggaggtgggtacccagctgctgtggaacgggtatggacaggtcataaacctagagtcagtgtcctgttggtcctagcccatttcagcaccctgccacttggagtggacccctcctactcttcttagcgcctaccctcatacctatctccctcctcccatctcctaggggactggcgccaaatggtctctccctgccaattttggtatcttctctggcctctcagcnctnanctcatttaagtgnaaaaatccttcctttcaagcagatggnggcctccagacctagagggggcgtggccattggcccgacgggggcaaattgggccggaggcggggcgccactgggcccaatgggggtgggcgaaaagggatacaccacacgagagcgccggggggggaa

SEQ ID NO: 455900 - DNA, 1226 bp, Homo sapiens
  misc_feature (19)..(19): n is a, c, g, or t
ttaggctaggtacgaggcnggtgtgaatcggccgaggcatgtagtgagaccctcgcgaggtctgagagtcactggagctaccagaagcatcatggggccctggggagagccagagctcctggtgtggcgccccgaggcggtagcttcagagcctccagtgcctgtggggctggaggtgaagttgggggccctggtgctgctgctggtgctcaccctcctctgcagcctggtgcccatctgtgtgctgcgccggccaggagctaaccatgaaggctcagcttcccgccagaaagccctgagcctagtaagctgtttcgcggggggcgtctttttggccacttgtctcctggacctgctgcctgactacctggctgccatagatgaggccctggcagccttgcacgtgacgctccagttcccactgcaagagttcatcctggccatgggcttcttcctggtcctggtgatggagcagatcacactggcttacaaggagcagtcagggccgtcacctctggaggaaacaagggctctgctgggaacagtgaatggtgggccgcagcattggcatgatgggccaggggtcccacaggcgagtggagccccagcaaccccctcagccttgcgtgcctgtgtactggtgttctccctggccctccactccgtgttcgaggggctggcggtagggctgcagcgagaccgggctcgggccatggagctgtgcctggctttgctgctccacaagggcatcctggctgtcagcctgtccctgcggctgttgcagagccaccttagggcacaggtggtggctggctgtgggatcctcttctcatgcatgacacctctaggcatcgggctgggtgcagctctggcagagtcggcaggacctctgcaccagctggcccagtctgtgctagagggcatggcagctggcacctttctctatatcacctttctggaaatcctgccccaggagctggccagttctgagcaaaggatcctcaaggtcattctgctcctagcaggctttgccctgctcactggcctgctcttcatccaaatctagggggcttcaagagaggggcaggggagattgatgatcaggtgcccctgttctcccttccctcccccagttgtggggaataggaaggaaaggggaagggaaatactgaggacctaaaagttctctggcacacattatggaggggatcctctacgatcactca

SEQ ID NO: 455901 - DNA, 2680 bp, Homo sapiens
acaattcccggcggcccccgcgcgcaacaggtcagggctaggctggggccgggttcgcggtgctcgctgaggcggcggtggctacggctggaggagccgggccgaggccgcggcggaggccgcggctggtactgggagggtggcagggagggacggggaaggaagatggcgacgtcgggggcgaacgggcctggttcggccacggcctcggcttccaatccgcgcaaatttagtgagaagattgcgctgcagaagcagcgtcaggccgaggagacggcggccttcgaggaggtgatgatggacatcggctccacccggttacaggcccaaaaactgcgactggcatacacaaggagctctcattatggtgggtctctgcccaatgttaaccagattggctctggcctggccgagttccagagccccctccactcacctttggattcatctcggagcactcggcaccatgggctggtggaacgggtgcagcgagatcctcgaagaatggtgtccccacttcgccgatacacccgccacattgacagctctccctatagtcctgcctacttatctcctcccccagagtctagctggcgaaggacgatggcctggggcaatttccctgcagagaaggggcagttgtttcgactaccatctgcacttaacaggacaagctctgactctgcccttcatacaagtgtgatgaaccccagtccccaggatacctacccaggccccacacctcccagcatcctgcccagccgacgtgggggtattctggatggtgaaatggaccccaaagtacctgctattgaggagaacttgctagatgacaagcatttgctgaagccatgggatgctaagaagctatcctcatcctcttcccgacctcggtcctgtgaagtccctggaattaacatctttccatctcctgaccagcctgccaatgtgcctgtcctcccacctgccatgaacacggggggctccctacctgacctcaccaacctgcactttcccccaccactgcccacccccctggaccctgaagagacagcctaccctagcctgagtgggggcaacagtacctccaatttgacccacaccatgactcacctgggcatcagcaggggcatgggcctgggcccaggctatgatgcaccaggacttcattcacctctcagccacccatccctgcagtcctccctaagcaatcccaacctccaggcttccctgagcagtcctcagccccagcttcagggctcccacagccacccctctctgcctgcctcctccttggcccgccatgtactgcccaccacctccctgggccacccctcactcagtgctccggctctctcctcctcctcttcctcctcctccacttcatctcctgttttgggcgccccctcttaccctgcttctacccctggggcctccccccaccaccgccgtgtgcccctcagccccctgagtttgctcgcgggcccagccgacgccagaaggtcccaacagcagctgcccaaacagttttcgccaacaatgtcacccaccttgtcttccatcactcagggcgtccccctggataccagtaaactgtccactgaccagcggttacccccatacccatacagctccccaagtctggttctgcctacccagccccacaccccaaagtctctacagcagccagggctgccctctcagtcttgttcagtgcagtcctcaggtgggcagcccccaggcaggcagtctcattatgggacaccgtacccacctgggcccagtgggcatgggcaacagtcttaccaccggccaatgagtgacttcaacctggggaatctggagcagttcagcatggagagcccatcagccagcctggtgctggatccccctggcttttctgaagggcctggatttttagggggtgaggggccaatgggtggcccccaggatccccacaccttcaaccaccagaacttgacccactgttcccgccatggctcagggcctaacatcatcctcacaggggactcctctccaggtttctctaaggagattgcagcagccctggccggagtgcctggctttgaggtgtcagcagctggattggagctagggcttgggctagaagatgagctgcgcatggagccactgggcctggaagggctaaacatgctgagtgacccctgtgccctgctgcctgatcctgctgtggaggagtcattccgcagtgaccggctccaatgagggcacctcatcaccatccctcttcttggccccatcccccaccaccattcctttcctcccttccccctggcaggtagagactctactctctgtccccagatcctctttctagcatgaatgaaggatgccaagaatgagaaaaagcaaggggtttgtccaggtggcccctgaattctgcgcaagggatgggcctgggggaactcaagggagggcctaaagcacttgtaactttgaaccgtctgtctggaggtcagagcctgttggaaagcaggggtagaggggagccctggaagcagggcttttccggatgcctaggggtgggcagtgccagcccctcctcaccactcttccccttgcagtggaggagagagccagagtggatactattttttattaaatatattattatatgttaataaaaaaatcatatcaa

SEQ ID NO: 455902 - DNA, 2547 bp, Homo sapiens
  misc_feature (19)..(19): n is a, c, g, or t
ttaggctaggtacgaggcnggtgtgaatcggccgaggcatgtagtgagaccctcgcgaggtctgagagtcactggagctaccagaagcatcatggggccctggggagagccagagctcctggtgtggcgccccgaggcggtagcttcagagcctccagtgcctgtggggctggaggtgaagttgggggccctggtgctgctgctggtgctcaccctcctctgcagcctggtgcccatctgtgtgctgcgccggccaggagctaaccatgaaggctcagcttcccgccagaaagccctgagcctagtaagctgtttcgcggggggcgtctttttggccacttgtctcctggacctgctgcctgactacctggctgccatagatgaggccctggcagccttgcacgtgacgctccagttcccactgcaagagttcatcctggccatgggcttcttcctggtcctggtgatggagcagatcacactggcttacaaggagcagtcagggccgtcacctctggaggaaacaagggctctgctgggaacagtgaatggtgggccgcagcattggcatgatgggccaggggtcccacagttacaggcccaaaaactgcgactggcatacacaaggagctctcattatggtgggtctctgcccaatgttaaccagattggctctggcctggccgagttccagagccccctccactcacctttggattcatctcggagcactcggcaccatgggctggtggaacgggtgcagcgagatcctcgaagaatggtgtccccacttcgccgatacacccgccacattgacagctctccctatagtcctgcctacttatctcctcccccagagtctagctggcgaaggacgatggcctggggcaatttccctgcagagaaggggcagttgtttcgactaccatctgcacttaacaggacaagctctgactctgcccttcatacaagtgtgatgaaccccagtccccaggatacctacccaggccccacacctcccagcatcctgcccagccgacgtgggggtattctggatggtgaaatggaccccaaagtacctgctattgaggagaacttgctagatgacaagcatttgctgaagccatgggatgctaagaagctatcctcatcctcttcccgacctcggtcctgtgaagtccctggaattaacatctttccatctcctgaccagcctgccaatgtgcctgtcctcccacctgccatgaacacggggggctccctacctgacctcaccaacctgcactttcccccaccactgcccacccccctggaccctgaagagacagcctaccctagcctgagtgggggcaacagtacctccaatttgacccacaccatgactcacctgggcatcagcaggggcatgggcctgggcccaggctatgatgcaccagggcgtccccctggataccagtaaactgtccactgaccagcggttacccccatacccatacagctccccaagtctggttctgcctacccagccccacaccccaaagtctctacagcagccagggctgccctctcagtcttgttcagtgcagtcctcaggtgggcagcccccaggcaggcagtctcattatgggacaccgtacccacctgggcccagtgggcatgggcaacagtcttaccaccggccaatgagtgacttcaacctggggaatctggagcagttcagcatggagagcccatcagccagcctggtgctggatccccctggcttttctgaagggcctggatttttagggggtgaggggccaatgggtggcccccaggatccccacaccttcaaccaccagaacttgacccactgttcccgccatggctcagggcctaacatcatcctcacaggggactcctctccaggtttctctaaggagattgcagcagccctggccggagtgcctggctttgaggtgtcagcagctggattggagctagggcttgggctagaagatgagctgcgcatggagccactgggcctggaagggctaaacatgctgagtgacccctgtgccctgctgcctgatcctgctgtggaggagtcattccgcagtgaccggctccaatgagggcacctcatcaccatccctcttcttggccccatcccccaccaccattcctttcctcccttccccctggcaggtagagactctactctctgtccccagatcctctttctagcatgaatgaaggatgccaagaatgagaaaaagcaaggggtttgtccaggtggcccctgaattctgcgcaagggatgggcctgggggaactcaagggagggcctaaagcacttgtaactttgaaccgtctgtctggaggtcagagcctgttggaaagcaggggtagaggggagccctggaagcagggcttttccggatgcctaggggtgggcagtgccagcccctcctcaccactcttccccttgcagtggaggagagagccagagtggatactattttttattaaatatattattatatgttaataaaaaaatcatatcaa

SEQ ID NO: 455903 - DNA, 3099 bp, Homo sapiens
  misc_feature (19)..(19): n is a, c, g, or t
ttaggctaggtacgaggcnggtgtgaatcggccgaggcatgtagtgagaccctcgcgaggtctgagagtcactggagctaccagaagcatcatggggccctggggagagccagagctcctggtgtggcgccccgaggcggtagcttcagagcctccagtgcctgtggggctggaggtgaagttgggggccctggtgctgctgctggtgctcaccctcctctgcagcctggtgcccatctgtgtgctgcgccggccaggagctaaccatgaaggctcagcttcccgccagaaagccctgagcctagtaagctgtttcgcggggggcgtctttttggccacttgtctcctggacctgctgcctgactacctggctgccatagatgaggccctggcagccttgcacgtgacgctccagttcccactgcaagagttcatcctggccatgggcttcttcctggtcctggtgatggagcagatcacactggcttacaaggagcagtcagggccgtcacctctggaggaaacaagggctctgctgggaacagtgaatggtgggccgcagcattggcatgatgggccaggggtcccacagttacaggcccaaaaactgcgactggcatacacaaggagctctcattatggtgggtctctgcccaatgttaaccagattggctctggcctggccgagttccagagccccctccactcacctttggattcatctcggagcactcggcaccatgggctggtggaacgggtgcagcgagatcctcgaagaatggtgtccccacttcgccgatacacccgccacattgacagctctccctatagtcctgcctacttatctcctcccccagagtctagctggcgaaggacgatggcctggggcaatttccctgcagagaaggggcagttgtttcgactaccatctgcacttaacaggacaagctctgactctgcccttcatacaagtgtgatgaaccccagtccccaggatacctacccaggccccacacctcccagcatcctgcccagccgacgtgggggtattctggatggtgaaatggaccccaaagtacctgctattgaggagaacttgctagatgacaagcatttgctgaagccatgggatgctaagaagctatcctcatcctcttcccgacctcggtcctgtgaagtccctggaattaacatctttccatctcctgaccagcctgccaatgtgcctgtcctcccacctgccatgaacacggggggctccctacctgacctcaccaacctgcactttcccccaccactgcccacccccctggaccctgaagagacagcctaccctagcctgagtgggggcaacagtacctccaatttgacccacaccatgactcacctgggcatcagcaggggcatgggcctgggcccaggctatgatgcaccaggacttcattcacctctcagccacccatccctgcagtcctccctaagcaatcccaacctccaggcttccctgagcagtcctcagccccagcttcagggctcccacagccacccctctctgcctgcctcctccttggcccgccatgtactgcccaccacctccctgggccacccctcactcagtgctccggctctctcctcctcctcttcctcctcctccacttcatctcctgttttgggcgccccctcttaccctgcttctacccctggggcctccccccaccaccgccgtgtgcccctcagccccctgagtttgctcgcgggcccagccgacgccagaaggtcccaacagcagctgcccaaacagttttcgccaacaatgtcacccaccttgtcttccatcactcagggcgtccccctggataccagtaaactgtccactgaccagcggttacccccatacccatacagctccccaagtctggttctgcctacccagccccacaccccaaagtctctacagcagccagggctgccctctcagtcttgttcagtgcagtcctcaggtgggcagcccccaggcaggcagtctcattatgggacaccgtacccacctgggcccagtgggcatgggcaacagtcttaccaccggccaatgagtgacttcaacctggggaatctggagcagttcagcatggagagcccatcagccagcctggtgctggatccccctggcttttctgaagggcctggatttttagggggtgaggggccaatgggtggcccccaggatccccacaccttcaaccaccagaacttgacccactgttcccgccatggctcagggcctaacatcatcctcacaggggactcctctccaggtttctctaaggagattgcagcagccctggccggagtgcctggctttgaggtgtcagcagctggattggagctagggcttgggctagaagatgagctgcgcatggagccactgggcctggaagggctaaacatgctgagtgacccctgtgccctgctgcctgatcctgctgtggaggagtcattccgcagtgaccggctccaatgagggcacctcatcaccatccctcttcttggccccatcccccaccaccattcctttcctcccttccccctggcaggtagagactctactctctgtccccagatcctctttctagcatgaatgaaggatgccaagaatgagaaaaagcaaggggtttgtccaggtggcccctgaattctgcgcaagggatgggcctgggggaactcaagggagggcctaaagcacttgtaactttgaaccgtctgtctggaggtcagagcctgttggaaagcaggggtagaggggagccctggaagcagggcttttccggatgcctaggggtgggcagtgccagcccctcctcaccactcttccccttgcagtggaggagagagccagagtggatactattttttattaaatatattattatatgttaataaaaaaatcatatcaaacccttggtgtggttagttatttggggcatggctggggatctagggagttatagggccatgggtctttttatctattaggctttttgcatcttcttagcaccactgtgctttgtggaagggccccacagcctcggaatttgtacc

SEQ ID NO: 455904 - DNA, 2405 bp, Homo sapiens
  misc_feature (19)..(19): n is a, c, g, or t
ttaggctaggtacgaggcnggtgtgaatcggccgaggcatgtagtgagaccctcgcgaggtctgagagtcactggagctaccagaagcatcatggggccctggggagagccagagctcctggtgtggcgccccgaggcggtagcttcagagcctccagtgcctgtggggctggaggtgaagttgggggccctggtgctgctgctggtgctcaccctcctctgcagcctggtgcccatctgtgtgctgcgccggccaggagctaaccatgaaggctcagcttcccgccagaaagccctgagcctagtaagctgtttcgcggggggcgtctttttggccacttgtctcctggacctgctgcctgactacctggctgccatagatgaggccctggcagccttgcacgtgacgctccagttcccactgcaagagttcatcctggccatgggcttcttcctggtcctggtgatggagcagatcacactggcttacaaggagcagtcagggccgtcacctctggaggaaacaagggctctgctgggaacagtgaatggtgggccgcagcattggcatgatgggccaggggtcccacagttacaggcccaaaaactgcgactggcatacacaaggagctctcattatggtgggtctctgcccaatgttaaccagattggctctggcctggccgagttccagagccccctccactcacctttggattcatctcggagcactcggcaccatgggctggtggaacgggtgcagcgagatcctcgaagaatggtgtccccacttcgccgatacacccgccacattgacagctctccctatagtcctgcctacttatctcctcccccagagtctagctggcgaaggacgatggcctggggcaatttccctgcagagaaggggcagttgtttcgactaccatctgcacttaacaggacaagctctgactctgcccttcatacaagtgtgatgaaccccagtccccaggatacctacccaggccccacacctcccagcatcctgcccagccgacgtgggggtattctggatggtgaaatggaccccaaagtacctgctattgaggagaacttgctagatgacaagcatttgctgaagccatgggatgctaagaagctatcctcatcctcttcccgacctcggtcctgtgaagtccctggaattaacatctttccatctcctgaccagcctgccaatgtgcctgtcctcccacctgccatgaacacggggggctccctacctgacctcaccaacctgcactttcccccaccactgcccacccccctggaccctgaagagacagcctaccctagcctgagtgggggcaacagtacctccaatttgacccacaccatgactcacctgggcatcagcaggggcatgggcctgggcccaggctatgatgcaccaggacttcattcacctctcagccacccatccctgcagtcctccctaagcaatcccaacctccaggcttccctgagcagtcctcagccccagcttcagggctcccacagccacccctctctgcctgcctcctccttggcccgccatgtactgcccaccacctccctgggccacccctcactcagtgctccggctctctcctcctcctcttcctcctcctccacttcatctcctgttttgggcgccccctcttaccctgcttctacccctggggcctccccccaccaccgccgtgtgcccctcagccccctgagtttgctcgcgggcccagccgacgccagaaggtcccaacagcagctgcccaaacagttttcgccaacaatgtcacccaccttgtcttccatcactcagggcgtccccctggataccagtaaactgtccactgaccagcggttacccccatacccatacagctccccaagtctggttctgcctgatcctgctgtggaggagtcattccgcagtgaccggctccaatgagggcacctcatcaccatccctcttcttggccccatcccccaccaccattcctttcctcccttccccctggcaggtagagactctactctctgtccccagatcctctttctagcatgaatgaaggatgccaagaatgagaaaaagcaaggggtttgtccaggtggcccctgaattctgcgcaagggatgggcctgggggaactcaagggagggcctaaagcacttgtaactttgaaccgtctgtctggaggtcagagcctgttggaaagcaggggtagaggggagccctggaagcagggcttttccggatgcctaggggtgggcagtgccagcccctcctcaccactcttccccttgcagtggaggagagagccagagtggatactattttttattaaatatattattatatgttaataaaaaaatcatatcaa

SEQ ID NO: 455905 - DNA, 1998 bp, Homo sapiens
  misc_feature (19)..(19): n is a, c, g, or t
ttaggctaggtacgaggcnggtgtgaatcggccgaggcatgtagtgagaccctcgcgaggtctgagagtcactggagctaccagaagcatcatggggccctggggagagccagagctcctggtgtggcgccccgaggcggtagcttcagagcctccagtgcctgtggggctggaggtgaagttgggggccctggtgctgctgctggtgctcaccctcctctgcagcctggtgcccatctgtgtgctgcgccggccaggagctaaccatgaaggctcagcttcccgccagaaagccctgagcctagtaagctgtttcgcggggggcgtctttttggccacttgtctcctggacctgctgcctgactacctggctgccatagatgaggccctggcagccttgcacgtgacgctccagttcccactgcaagagttcatcctggccatgggcttcttcctggtcctggtgatggagcagatcacactggcttacaaggagcagtcagggccgtcacctctggaggaaacaagggctctgctgggaacagtgaatggtgggccgcagcattggcatgatgggccaggggtcccacagttacaggcccaaaaactgcgactggcatacacaaggagctctcattatggtgggtctctgcccaatgttaaccagattggctctggcctggccgagttccagagccccctccactcacctttggattcatctcggagcactcggcaccatgggctggtggaacgggtgcagcgagatcctcgaagaatggtgtccccacttcgccgatacacccgccacattgacagctctccctatagtcctgcctacttatctcctcccccagagtctagctggcgaaggacgatggcctggggcaatttccctgcagagaaggggcagttgtttcgactaccatctgcacttaacaggacaagctctgactctgcccttcatacaagtgtgatgaaccccagtccccaggatacctacccaggccccacacctcccagcatcctgcccagccgacgtgggggtattctggatggtgaaatggaccccaaagtacctgctattgaggagaacttgctagatgacaagcatttgctgaagccatgggatgctaagaagctatcctcatcctcttcccgacctcggtcctgtgaagtccctggaattaacatctttccatctcctgaccagcctgccaatgtgcctgtcctcccacctgccatgaacacggggggctccctacctgacctcaccaacctgcactttcccccaccactgcccacccccctggaccctgaagagacagcctaccctagcctgagtgggggcaacagtacctccaatttgacccacaccatgactcacctgggcatcagcaggggcatgggcctgggcccaggctatgatgcaccagggcgtccccctggataccagtaaactgtccactgaccagcggttacccccatacccatacagctccccaagtctggttctgcctgatcctgctgtggaggagtcattccgcagtgaccggctccaatgagggcacctcatcaccatccctcttcttggccccatcccccaccaccattcctttcctcccttccccctggcaggtagagactctactctctgtccccagatcctctttctagcatgaatgaaggatgccaagaatgagaaaaagcaaggggtttgtccaggtggcccctgaattctgcgcaagggatgggcctgggggaactcaagggagggcctaaagcacttgtaactttgaaccgtctgtctggaggtcagagcctgttggaaagcaggggtagaggggagccctggaagcagggcttttccggatgcctaggggtgggcagtgccagcccctcctcaccactcttccccttgcagtggaggagagagccagagtggatactattttttattaaatatattattatatgttaataaaaaaatcatatcaa

SEQ ID NO: 455906 - DNA, 1629 bp, Homo sapiens
acaattcccggcggcccccgcgcgcaacaggtcagggctaggctggggccgggttcgcggtgctcgctgaggcggcggtggctacggctggaggagccgggccgaggccgcggcggaggccgcggctggtacacccatccctgcagtcctccctaagcaatcccaacctccaggcttccctgagcagtcctcagccccagcttcagggctcccacagccacccctctctgcctgcctcctccttggcccgccatgtactgcccaccacctccctgggccacccctcactcagtgctccggctctctcctcctcctcttcctcctcctccacttcatctcctgttttgggcgccccctcttaccctgcttctacccctggggcctccccccaccaccgccgtgtgcccctcagccccctgagtttgctcgcgggcccagccgacgccagaaggtcccaacagcagctgcccaaacagttttcgccaacaatgtcacccaccttgtcttccatcactcagggcgtccccctggataccagtaaactgtccactgaccagcggttacccccatacccatacagctccccaagtctggttctgcctacccagccccacaccccaaagtctctacagcagccagggctgccctctcagtcttgttcagtgcagtcctcaggtgggcagcccccaggcaggcagtctcattatgggacaccgtacccacctgggcccagtgggcatgggcaacagtcttaccaccggccaatgagtgacttcaacctggggaatctggagcagttcagcatggagagcccatcagccagcctggtgctggatccccctggcttttctgaagggcctggatttttagggggtgaggggccaatgggtggcccccaggatccccacaccttcaaccaccagaacttgacccactgttcccgccatggctcagggcctaacatcatcctcacaggggactcctctccaggtttctctaaggagattgcagcagccctggccggagtgcctggctttgaggtgtcagcagctggattggagctagggcttgggctagaagatgagctgcgcatggagccactgggcctggaagggctaaacatgctgagtgacccctgtgccctgctgcctgatcctgctgtggaggagtcattccgcagtgaccggctccaatgagggcacctcatcaccatccctcttcttggccccatcccccaccaccattcctttcctcccttccccctggcaggtagagactctactctctgtccccagatcctctttctagcatgaatgaaggatgccaagaatgagaaaaagcaaggggtttgtccaggtggcccctgaattctgcgcaagggatgggcctgggggaactcaagggagggcctaaagcacttgtaactttgaaccgtctgtctggaggtcagagcctgttggaaagcaggggtagaggggagccctggaagcagggcttttccggatgcctaggggtgggcagtgccagcccctcctcaccactcttccccttgcagtggaggagagagccagagtggatactattttttattaaatatattattatatgttaataaaaaaatcatatcaa

SEQ ID NO: 455907 - DNA, 1485 bp, Homo sapiens
  misc_feature (19)..(19): n is a, c, g, or t
  misc_feature (1454)..(1454): n is a, c, g, or t
ttaggctaggtacgaggcnggtgtgaatcggccgaggcatgtagtgagaccctcgcgaggtctgagagtcactggagctaccagaagcatcatggggccctggggagagccagagctcctggtgtggcgccccgaggcggtagcttcagagcctccagtgcctgtggggctggaggtgaagttgggggccctggtgctgctgctggtgctcaccctcctctgcagcctggtgcccatctgtgtgctgcgccggccaggagctaaccatgaaggctcagcttcccgccagaaagccctgagcctagtaagctgtttcgcggggggcgtctttttggccacttgtctcctggacctgctgcctgactacctggctgccatagatgaggccctggcagccttgcacgtgacgctccagttcccactgcaagagttcatcctggccatgggcttcttcctggtcctggtgatggagcagatcacactggcttacaaggagcagtcagggccgtcacctctggaggaaacaagggctctgctgggaacagtgaatggtgggccgcagcattggcatgatgggccaggggtcccacagttacaggcccaaaaactgcgactggcatacacaaggagctctcattatggtgggtctctgcccaatgttaaccagattggctctggcctggccgagttccagagccccctccactcacctttggattcatctcggagcactcggcaccatgggctggtggaacgggtgcagcgagatcctcgaagaatggtgtccccacttcgccgatacacccgccacattgacagctctccctatagtcctgcctacttatctcctcccccagagtctagctggcgaaggacgatggcctggggcaatttccctgcagagaaggggcagttgtttcgactaccatctgcacttaacaggacaagctctgactctgcccttcatacaagtgtgatgaaccccagtccccaggatacctacccaggccccacacctcccagcatcctgcccagccgacgtgggggtattctggatggtgaaatggaccccaaagtacctgctattgaggagaacttgctagatgacaagcatttgctgaagccatgggatgctaagaagctatcctcatcctcttcccgacctcggtcctgtgaagtccctggaattaacatctttccatctcctgaccagcctgccaatgtgcctgtcctcccacctgccatgaacacggggggctccctacctgacctcaccaacctgcactttcccccaccactgcccacccccctggaccctgaagagacagcctaccctagcctgagtgggggcaacagtacctccaatttgacccacaccatgactcacctgggcatcagcaggggcatgggcctgggcccaggctatgatgcaccagactcattcacctctcagncacaccgacaggtgtgtctaatgtcggtgtg

SEQ ID NO: 455908 - DNA, 1114 bp, Homo sapiens
acaattcccggcggcccccgcgcgcaacaggtcagggctaggctggggccgggttcgcggtgctcgctgaggcggcggtggctacggctggaggagccgggccgaggccgcggcggaggccgcggctggtactgggagggtggcagggagggacggggaaggaagatggcgacgtcgggggcgaacgggcctggttcggccacggcctcggcttccaatccgcgcaaatttagtgagaagattgcgctgcagaagcagcgtcaggccgaggagacggcggccttcgaggaggtgatgatggacatcggctccacccggttacaggcccaaaaactgcgactggcatacacaaggagctctcattatggtgggtctctgcccaatgttaaccagattggctctggcctggccgagttccagagccccctccactcacctttggattcatctcggagcactcggcaccatgggctggtggaacgggtgcagcgagatcctcgaagaatggtgtccccacttcgccgatacacccgccacattgacagctctccctatagtcctgcctacttatctcctcccccagagtctagctggcgaaggacgatggcctggggcaatttccctgcagagaaggggcagttgtttcgactaccatctgcacttaacaggacaagctctgactctgcccttcatacaagtgtgatgaaccccagtccccaggatacctacccaggccccacacctcccagcatcctgcccagccgacgtgggggtattctggatggtgaaatggaccccaaagtacctgctattgaggagaacttgctagatgacaagcatttgctgaagccatgggatgctaagaagctatcctcatcctcttcccgacctcggtcctgtgaagtccctggaattaacatctgtccatctcctgaccaggctgccaagtgtggctgatctccaaactacccagtgaaacaacggaggggctcccctacgctggagcatgaccaaccctgcacaaccccgaaccgaaggccaccacctggaacctgaaccagaccaccgaaccaggcccacaggggccaaagcaccaaaaagacccaaacagaac

SEQ ID NO: 455909 - DNA, 1474 bp, Homo sapiens
taacactcatgtgtcaggaaagtacagtcaatgtatgctaaaaatccacttgaacaattagctcgcttttttccctcatttgctttcagagtaaatgtgctttcagagtattaggtcggcctaatatatgatacattttaagaaggggaggaaagcgcattgtataccctgatgctgggacccaatagaagacaggccccctggctggcctttggttctccctggagctgacaaagggaaggggcttggaaagcagccactgtccccgcctagtttgggcctttacagacacacctttccttttggcagctgctatggcacggattctctatgccagcacgaagctggaaaacctgcctacctggctggtgaaatgagggtggcagctggaggaaacaggcatcttaggagactagaaatgtccttcaaagggacttcagtgagtgctcaggggaccaggggtgactgtgttaagaagggttagaggttgagagggagccatgagcttgggtcatcaccccagtgagaccatccaggcacacagctcccaggcttgggaggccgcctccagtccaccaggaccctcagggagctgtgacttcattgaagctgggtctaaaggcttccttcaaggctcagcaaactgggttttcaaagatttttgatccctgaagctaatttacacgttatgtggggccatggcaaagacttggccctgaagtggacagaaagaggctgtgctgagtgatgaatgagactaaacagtgttctcatgcttggtgattttgatgagaacatactacataagagttaagagcattataattccctttatcaccatataaacatgtcacttatccggaaagcatacaatttatttgtacatgagaatgtaaatttaaaaattttctgaaaactagattaaatcttgagaagcaattttcaagtaaacaaaaacatgccatgttaatcagcactagatctcccccaccccccacataatgtgtatgtacacatttctcaaattcagactgcagtacagctgtctccttggaggcgtcaggggttcctaagcctaaattctacctctagggtcttgatccctcaagagttcatcctgagttaaaattttgttatccccggaagcagagatgcactgactctggtgatctcagtatgaatgtggtatgaaatcttctaggtgtctgtggtggggcctgagggagggtaggaaaggtgacgaggaaaaagtagagggagcctgaacaccctgggtctcaggtacggagtgaagaaatcactaaggtgaaaagacaggctggggcccaggagctcgtccaagtcctgatgaacaacaagtcctgggcaacatcacaggccaccaaacacaccttcagctccagggtcgaatagatggtggaagagcacagcctcaagactttccagtgtgtcagacaggtagaatatcatcatg

SEQ ID NO: 455910 - DNA, 590 bp, Homo sapiens
cctcagaggaccggtccgaaattcccgggtcaactacaactaaattcgcggccgcgtcgacattgaatcaaactcttagacaagctggtgaaagttttaacgactgctggaggcaacatgcttccacactgacagaaatcatctttcaaaaatcctgcacatatctcaggcttatgaaacaaactaattcctaatagttggaaatgaattaaaagcttgcggtgagataaaagatagattttggctggatgtgatgactcatgcctgtgatccctacactttaggagggcacagcaggaggatcgcctgagcccaggaattcaagaccagcctggtcaacatagcaagactctctctctgcaaaaaaaaagaaaaaaaaaaaaacctcccaaaaaaaaggttttactaggcatgaaaatgagtccatttccattctaggccccaggatatcaccatgaccaataaaaacaatctgtggcactcagcaggtgcatgtcaacatgggcaggttctttctccccgtcagcaggacaagaacatctcccctatccaaaaggcacccactgaggatccgcagttctctggaatta

SEQ ID NO: 455911 - DNA, 422 bp, Homo sapiens
  misc_feature (407)..(407): n is a, c, g, or t
ctgctttagcgagagaggctgctttagcgagagaggctgctttagcgagagagggagaccaataaaataggatgacaagtcttacgatgtccctacttctaaagagaaggtaagaaatcccgtgctgaacatccactaggttctgggtatatactttatacacacatggcccctttattcctctcagtgaccctcagggtaggtctcactacccaagtgttagagtgaaggacgctgagaccaagaagaggaacaggtcagggtcagacagagctggaatttggacacagttctgtctgactccagatattccttgtatcacacaatactgtcttctgaagcaagtgattgtccccaacacacacacacacacacacacactctctctctctctctctctctgcttncagcagagctgagga

SEQ ID NO: 455912 - DNA, 4349 bp, Homo sapiens
taacactcatgtgtcaggaaagtacagtcaatgtatgctaaaaatccacttgaacaattagctcgcttttttccctcatttgctttcagagtaaatgtgctttcagagtattaggtcggcctaatatatgatacattttaagaaggggaggaaagcgcattgtataccctgatgctgggacccaatagaagacaggccccctggctggcctttggttctccctggagctgacaaagggaaggggcttggaaagcagccactgtccccgcctagtttgggcctttacagacacacctttccttttggcagctgctatggcacggattctctatgccagcacgaagctggaaaacctgcctacctggctggtgaaatgagggtggcagctggaggaaacaggcatcttaggagactagaaatgtccttcaaagggacttcagtgagtgctcaggggaccaggggtgactgtgttaagaagggttagaggttgagagggagccatgagcttgggtcatcaccccagtgagaccatccaggcacacagctcccaggcttgggaggccgcctccagtccaccaggaccctcagggagctgtgacttcattgaagctgggtctaaaggcttccttcaaggctcagcaaactgggttttcaaagatttttgatccctgaagctaatttacacgttatgtggggccatggcaaagacttggccctgaagtggacagaaagaggctgtgctgagtgatgaatgagactaaacagtgttctcatgcttggtgattttgatgagaacatactacataagagttaagagcattataattccctttatcaccatataaacatgtcacttatccggaaagcatacaatttatttgtacatgagaatgtaaatttaaaaattttctgaaaactagattaaatcttgagaagcaattttcaagtaaacaaaaacatgccatgttaatcagcactagatctcccccaccccccacataatgtgtatgtacacatttctcaaattcagactgcagtacagctgtctccttggaggcgtcaggggttcctaagcctaaattctacctctagggtcttgatccctcaagagttcatcctgagttaaaattttgttatccccggaagcagagatgcactgactctggtgatctcagtatgaatgtggtatgaaatcttctaggtgtctgtggtggggcctgagggagggtaggaaaggtgacgaggaaaaagtagagggagcctgaacaccctgggtctcaggtacggagtgaagaaatcactaaggtgaaaagacaggctggggcccaggagctcgtccaagtcctgatgaacaacaagtcctgggcaacatcacaggccaccaaacacaccttcagctccagggtcgaatagatggtggaagagcacagccatctggaaaatcagaaaaaagtggggaagattttctatcttgaacttgtgagctggagaattaccattagtagcccactaataggttatggccgatgagtcccttcataacacactgagagccacttttgacactcccagaaaaggcaggttaacaaaaccccttgatggaaggaagaccctcattgcccaatgtacccaagcctctttgaaccttgcttagactgaactgcaaatgtcttgactgctctgggctccttagtgcaactccttcccacagaagccatcaggagcctggtccaggaagctcctctcctacacctgccttaaaaggcccagctctgctggggagtaaggttcatgggggccgtcccaatgcaaaagggaatctctgccatcacccactgcaaccacatggtagccactctgcagccggcaggcgtgaggcatgctgcgctaacatgggagggcggaggctctgcctgacttcccagaagcccagtgagaagtccaggacaatcagcaggtgctatgggaaccttggctggcaggcaccatgtcgtcctgtatgatcggcaggaccggctccttcctgaagacaccgattcttggcggctcctgacaaggattgagaggatttgtgggggacagccctgaagccctgagccctcaactcaatgaagggattgtgctggtgtagacccacagcatccagctctgtcactgatgaaggtctgaactgcatactctgcccctttggtgtcagccttaaaggtcagttttaggtgagtttcaaccagtggctgtagatgggtcctttgtttaccagtttccccacatcctgtctgagaccattgctagtttttgtctgcaccagtcttagggaaaacaacctggacaccgtgggtgagatcaccagtgggctccaagccagagcatgggcctgggacagggtgggttaccttggcatactctaacatactcaaacctcatttcttttggggtgatcagacccaacagcaggtcatgggggcgacgaagtccagtggagtccaaggaatgagaaagacagtttgagagacaaaatgggaccagggggctatcacaagtgtggaggctgcaacaaacaggtggtgaggatgtgggggttgaaaggaaacggtgtatcaagtgaatgagaaacatatggctacttgagaacatgggaatgctagaagcaaggagcagcaagtctagcaaacatgcaagccctgcctcagcttctctcccaacactcagcttttcttccaacacatttcatgtgcaaggttctcgtgcccactcctcttgtacagtttggcagcctcatggagcttccctggtaggaaaacacatctgccagaaacaggtcattgttggtctctccccgcttcttcctctcctggaaaaattagaagcaaaggaaatggcctctgcagccatgggcagaaagcagcctttacaaaggttagatgtggctatttcaagtgaggcccctgggccttcctactggaacctgggcttggctcctggctgttgtctctctcccctaggttcccgctgggaaggcttgataacaaaagcaggcttttaccagacaagcaaagatcaaaaaaagatgcaaacctttgtttgtttaatggaaattcctcagggttgctttcctgtgtattccaaagctatgacggaatagtttgaatagtgtgtgctctgactcatccatgacccctaagctcccaagatctcccaaatccgcaggccccgtttggcagagttgtggctcatggggatgacagagcagaatgtttagggtttctgcccaagagggagaccaataaaataggatgacaagtcttacgatgtccctacttctaaagagaaggtaagaaatcccgtgctgaacatccactaggttctgggtatatactttatacacacatggcccctttattcctctcagtgaccctcagggtaggtctcactacccaagtgttagagtgaaggacgctgagaccaagaagaggaacaggtcagggtcagacagagctggaatttggacacagttctgtctgactccagatattccttgtatcacacaatactgtcttctgaagcaagtgattgtccccaacacacacacacacacacacacactctctctctctctctctctctctctctctctctctctctcagcagagctgaggataaagaggaatatcctgcacacttcttccttctgtgtcagggaacatttgcttgtctacagctcgagtatttgtaaacactcagtagcacccaaaccctgagccctagcagtttccttttgcttgtttactagcaagagtagcatgtcggaggacgatgagacattgaatcaaactcttagacaagctggtgaaagttttaacgactgctggaggcaacatgcttccacactgacagaaatcatctttcaaaaatcctgcacatatctcaggcttatgaaacaaactaattcctaatagttggaaatgaattaaaagcttgcggtgagataaaagatagattttggctggatgtgatgactcatgcctgtgatccctacactttaggagggcacagcaggaggatcgcctgagcccaggaattcaagaccagcctggtcaacatagcaagactctctctctgcaaaaaaaaagaaaaaaaaaaaaacctcccaaaaaaaaggttttactaggcatgaaaatgagtccatttccattctaggccccaggatatcaccatgaccaataaaaacaatctgtggcactcagcaggtgcatgtcaacatgggcaggttctttctccccgtcagcaggacaagaacatctcccctatccaaaaggcacccactgaggatccgcagttctctggaatta

SEQ ID NO: 455913 - DNA, 3692 bp, Homo sapiens
taacactcatgtgtcaggaaagtacagtcaatgtatgctaaaaatccacttgaacaattagctcgcttttttccctcatttgctttcagagtaaatgtgctttcagagtattaggtcggcctaatatatgatacattttaagaaggggaggaaagcgcattgtataccctgatgctgggacccaatagaagacaggccccctggctggcctttggttctccctggagctgacaaagggaaggggcttggaaagcagccactgtccccgcctagtttgggcctttacagacacacctttccttttggcagctgctatggcacggattctctatgccagcacgaagctggaaaacctgcctacctggctggtgaaatgagggtggcagctggaggaaacaggcatcttaggagactagaaatgtccttcaaagggacttcagtgagtgctcaggggaccaggggtgactgtgttaagaagggttagaggttgagagggagccatgagcttgggtcatcaccccagtgagaccatccaggcacacagctcccaggcttgggaggccgcctccagtccaccaggaccctcagggagctgtgacttcattgaagctgggtctaaaggcttccttcaaggctcagcaaactgggttttcaaagatttttgatccctgaagctaatttacacgttatgtggggccatggcaaagacttggccctgaagtggacagaaagaggctgtgctgagtgatgaatgagactaaacagtgttctcatgcttggtgattttgatgagaacatactacataagagttaagagcattataattccctttatcaccatataaacatgtcacttatccggaaagcatacaatttatttgtacatgagaatgtaaatttaaaaattttctgaaaactagattaaatcttgagaagcaattttcaagtaaacaaaaacatgccatgttaatcagcactagatctcccccaccccccacataatgtgtatgtacacatttctcaaattcagactgcagtacagctgtctccttggaggcgtcaggggttcctaagcctaaattctacctctagggtcttgatccctcaagagttcatcctgagttaaaattttgttatccccggaagcagagatgcactgactctggtgatctcagtatgaatgtggtatgaaatcttctaggtgtctgtggtggggcctgagggagggtaggaaaggtgacgaggaaaaagtagagggagcctgaacaccctgggtctcaggtacggagtgaagaaatcactaaggtgaaaagacaggctggggcccaggagctcgtccaagtcctgatgaacaacaagtcctgggcaacatcacaggccaccaaacacaccttcagctccagggtcgaatagatggtggaagagcacagccatctggaaaatcagaaaaaagtggggaagattttctatcttgaacttgtgagctggagaattaccattagtagcccactaataggttatggccgatgagtcccttcataacacactgagagccacttttgacactcccagaaaaggcaggttaacaaaaccccttgatggaaggaagaccctcattgcccaatgtacccaagcctctttgaaccttgcttagactgaactgcaaatgtcttgactgctctgggctccttagtgcaactccttcccacagaagccatcaggagcctggtccaggaagctcctctcctacacctgccttaaaaggcccagctctgctggggagtaaggttcatgggggccgtcccaatgcaaaagggaatctctgccatcacccactgcaaccacatggtagccactctgcagccggcaggcgtgaggcatgctgcgctaacatgggagggcggaggctctgcctgacttcccagaagcccagtgagaagtccaggacaatcagcaggtgctatgggaaccttggctggcaggcaccatgtcgtcctgtatgatcggcaggaccggctccttcctgaagacaccgattcttggcggctcctgacaaggattgagaggatttgtgggggacagccctgaagccctgagccctcaactcaatgaagggattgtgctggtgtagacccacagcatccagctctgtcactgatgaaggtctgaactgcatactctgcccctttggtgtcagccttaaaggtcagttttaggtgagtttcaaccagtggctgtagatgggtcctttgtttaccagtttccccacatcctgtctgagaccattgctagtttttgtctgcaccagtcttagggaaaacaacctggacaccgtgggtgagatcaccagtgggctccaagccagagcatgggcctgggacagggtgggttaccttggcatactctaacatactcaaacctcatttcttttggggtgatcagacccaacagcaggtcatgggggcgacgaagtccagtggagtccaaggaatgagaaagacagtttgagagacaaaatgggaccagggggctatcacaagtgtggaggctgcaacaaacaggtggtgaggatgtgggggttgaaaggaaacggtgtatcaagtgaatgagaaacatatggctacttgagaacatgggaatgctagaagcaaggagcagcaagtctagcaaacatgcaagccctgcctcagcttctctcccaacactcagcttttcttccaacacatttcatgtgcaaggttctcgtgcccactcctcttgtacagtttggcagcctcatggagcttccctggtaggaaaacacatctgccagaaacaggtcattgttggtctctccccgcttcttcctctcctggaaaaattagaagcaaaggaaatggcctctgcagccatgggcagaaagcagcctttacaaaggttagatgtggctatttcaagtgaggcccctgggccttcctactggaacctgggcttggctcctggctgttgtctctctcccctaggttcccgctgggaaggcttgataacaaaagcaggcttttaccagacaagcaaagatcaaaaaaagatgcaaacctttgtttgtttaatggaaattcctcagggttgctttcctgtgtattccaaagctatgacggaatagtttgaatagtgtgtgctctgactcatccatgacccctaagctcccaagatctcccaaatccgcaggccccgtttggcagagttgtggctcatggggatgacagagcagaatgtttagggtttctgcccaagagggagaccaataaaataggatgacaagtcttacgatgtccctacttctaaagagaaggtaagaaatcccgtgctgaacatccactaggttctgggtatatactttatacacacatggcccctttattcctctcagtgaccctcagggtaggtctcactacccaagtgttagagtgaaggacgctgagaccaagaagaggaacaggtcagggtcagacagagctggaatttggacacagttctgtctgactccagatattccttgtatcacacaatactgtcttctgaagcaagtgattgtccccaacacacacacacacacacacacactctctctctctctctctctctctctctctctctctctctctctctctaaagagagatagagatagagagatactatgagcgcactctat

SEQ ID NO: 455914 - DNA, 1127 bp, Homo sapiens
ctgctttagcgagagaggctgctttagcgagagaggctgctttagcgagagagggagaccaataaaataggatgacaagtcttacgatgtccctacttctaaagagaaggtaagaaatcccgtgctgaacatccactaggttctgggtatatactttatacacacatggcccctttattcctctcagtgaccctcagggtaggtctcactacccaagtgttagagtgaaggacgctgagaccaagaagaggaacaggtcagggtcagacagagctggaatttggacacagttctgtctgactccagatattccttgtatcacacaatactgtcttctgaagcaagtgattgtccccaacacacacacacacacacacacactctctctctctctctctctctctctctctctctctctctcagcagagctgaggataaagaggaatatcctgcacacttcttccttctgtgtcagggaacatttgcttgtctacagctcgagtatttgtaaacactcagtagcacccaaaccctgagccctagcagtttccttttgcttgtttactagcaagagtagcatgtcggaggacgatgagacattgaatcaaactcttagacaagctggtgaaagttttaacgactgctggaggcaacatgcttccacactgacagaaatcatctttcaaaaatcctgcacatatctcaggcttatgaaacaaactaattcctaatagttggaaatgaattaaaagcttgcggtgagataaaagatagattttggctggatgtgatgactcatgcctgtgatccctacactttaggagggcacagcaggaggatcgcctgagcccaggaattcaagaccagcctggtcaacatagcaagactctctctctgcaaaaaaaaagaaaaaaaaaaaaacctcccaaaaaaaaggttttactaggcatgaaaatgagtccatttccattctaggccccaggatatcaccatgaccaataaaaacaatctgtggcactcagcaggtgcatgtcaacatgggcaggttctttctccccgtcagcaggacaagaacatctcccctatccaaaaggcacccactgaggatccgcagttctctggaatta

SEQ ID NO: 455915 - DNA, 3644 bp, Homo sapiens
  misc_feature (3629)..(3629): n is a, c, g, or t
taacactcatgtgtcaggaaagtacagtcaatgtatgctaaaaatccacttgaacaattagctcgcttttttccctcatttgctttcagagtaaatgtgctttcagagtattaggtcggcctaatatatgatacattttaagaaggggaggaaagcgcattgtataccctgatgctgggacccaatagaagacaggccccctggctggcctttggttctccctggagctgacaaagggaaggggcttggaaagcagccactgtccccgcctagtttgggcctttacagacacacctttccttttggcagctgctatggcacggattctctatgccagcacgaagctggaaaacctgcctacctggctggtgaaatgagggtggcagctggaggaaacaggcatcttaggagactagaaatgtccttcaaagggacttcagtgagtgctcaggggaccaggggtgactgtgttaagaagggttagaggttgagagggagccatgagcttgggtcatcaccccagtgagaccatccaggcacacagctcccaggcttgggaggccgcctccagtccaccaggaccctcagggagctgtgacttcattgaagctgggtctaaaggcttccttcaaggctcagcaaactgggttttcaaagatttttgatccctgaagctaatttacacgttatgtggggccatggcaaagacttggccctgaagtggacagaaagaggctgtgctgagtgatgaatgagactaaacagtgttctcatgcttggtgattttgatgagaacatactacataagagttaagagcattataattccctttatcaccatataaacatgtcacttatccggaaagcatacaatttatttgtacatgagaatgtaaatttaaaaattttctgaaaactagattaaatcttgagaagcaattttcaagtaaacaaaaacatgccatgttaatcagcactagatctcccccaccccccacataatgtgtatgtacacatttctcaaattcagactgcagtacagctgtctccttggaggcgtcaggggttcctaagcctaaattctacctctagggtcttgatccctcaagagttcatcctgagttaaaattttgttatccccggaagcagagatgcactgactctggtgatctcagtatgaatgtggtatgaaatcttctaggtgtctgtggtggggcctgagggagggtaggaaaggtgacgaggaaaaagtagagggagcctgaacaccctgggtctcaggtacggagtgaagaaatcactaaggtgaaaagacaggctggggcccaggagctcgtccaagtcctgatgaacaacaagtcctgggcaacatcacaggccaccaaacacaccttcagctccagggtcgaatagatggtggaagagcacagccatctggaaaatcagaaaaaagtggggaagattttctatcttgaacttgtgagctggagaattaccattagtagcccactaataggttatggccgatgagtcccttcataacacactgagagccacttttgacactcccagaaaaggcaggttaacaaaaccccttgatggaaggaagaccctcattgcccaatgtacccaagcctctttgaaccttgcttagactgaactgcaaatgtcttgactgctctgggctccttagtgcaactccttcccacagaagccatcaggagcctggtccaggaagctcctctcctacacctgccttaaaaggcccagctctgctggggagtaaggttcatgggggccgtcccaatgcaaaagggaatctctgccatcacccactgcaaccacatggtagccactctgcagccggcaggcgtgaggcatgctgcgctaacatgggagggcggaggctctgcctgacttcccagaagcccagtgagaagtccaggacaatcagcaggtgctatgggaaccttggctggcaggcaccatgtcgtcctgtatgatcggcaggaccggctccttcctgaagacaccgattcttggcggctcctgacaaggattgagaggatttgtgggggacagccctgaagccctgagccctcaactcaatgaagggattgtgctggtgtagacccacagcatccagctctgtcactgatgaaggtctgaactgcatactctgcccctttggtgtcagccttaaaggtcagttttaggtgagtttcaaccagtggctgtagatgggtcctttgtttaccagtttccccacatcctgtctgagaccattgctagtttttgtctgcaccagtcttagggaaaacaacctggacaccgtgggtgagatcaccagtgggctccaagccagagcatgggcctgggacagggtgggttaccttggcatactctaacatactcaaacctcatttcttttggggtgatcagacccaacagcaggtcatgggggcgacgaagtccagtggagtccaaggaatgagaaagacagtttgagagacaaaatgggaccagggggctatcacaagtgtggaggctgcaacaaacaggtggtgaggatgtgggggttgaaaggaaacggtgtatcaagtgaatgagaaacatatggctacttgagaacatgggaatgctagaagcaaggagcagcaagtctagcaaacatgcaagccctgcctcagcttctctcccaacactcagcttttcttccaacacatttcatgtgcaaggttctcgtgcccactcctcttgtacagtttggcagcctcatggagcttccctggtaggaaaacacatctgccagaaacaggtcattgttggtctctccccgcttcttcctctcctggaaaaattagaagcaaaggaaatggcctctgcagccatgggcagaaagcagcctttacaaaggttagatgtggctatttcaagtgaggcccctgggccttcctactggaacctgggcttggctcctggctgttgtctctctcccctaggttcccgctgggaaggcttgataacaaaagcaggcttttaccagacaagcaaagatcaaaaaaagatgcaaacctttgtttgtttaatggaaattcctcagggttgctttcctgtgtattccaaagctatgacggaatagtttgaatagtgtgtgctctgactcatccatgacccctaagctcccaagatctcccaaatccgcaggccccgtttggcagagttgtggctcatggggatgacagagcagaatgtttagggtttctgcccaagagggagaccaataaaataggatgacaagtcttacgatgtccctacttctaaagagaaggtaagaaatcccgtgctgaacatccactaggttctgggtatatactttatacacacatggcccctttattcctctcagtgaccctcagggtaggtctcactacccaagtgttagagtgaaggacgctgagaccaagaagaggaacaggtcagggtcagacagagctggaatttggacacagttctgtctgactccagatattccttgtatcacacaatactgtcttctgaagcaagtgattgtccccaacacacacacacacacacacacactctctctctctctctctctctgcttncagcagagctgagga

SEQ ID NO: 455916 - DNA, 3154 bp, Homo sapiens
taacactcatgtgtcaggaaagtacagtcaatgtatgctaaaaatccacttgaacaattagctcgcttttttccctcatttgctttcagagtaaatgtgctttcagagtattaggtcggcctaatatatgatacattttaagaaggggaggaaagcgcattgtataccctgatgctgggacccaatagaagacaggccccctggctggcctttggttctccctggagctgacaaagggaaggggcttggaaagcagccactgtccccgcctagtttgggcctttacagacacacctttccttttggcagctgctatggcacggattctctatgccagcacgaagctggaaaacctgcctacctggctggtgaaatgagggtggcagctggaggaaacaggcatcttaggagactagaaatgtccttcaaagggacttcagtgagtgctcaggggaccaggggtgactgtgttaagaagggttagaggttgagagggagccatgagcttgggtcatcaccccagtgagaccatccaggcacacagctcccaggcttgggaggccgcctccagtccaccaggaccctcagggagctgtgacttcattgaagctgggtctaaaggcttccttcaaggctcagcaaactgggttttcaaagatttttgatccctgaagctaatttacacgttatgtggggccatggcaaagacttggccctgaagtggacagaaagaggctgtgctgagtgatgaatgagactaaacagtgttctcatgcttggtgattttgatgagaacatactacataagagttaagagcattataattccctttatcaccatataaacatgtcacttatccggaaagcatacaatttatttgtacatgagaatgtaaatttaaaaattttctgaaaactagattaaatcttgagaagcaattttcaagtaaacaaaaacatgccatgttaatcagcactagatctcccccaccccccacataatgtgtatgtacacatttctcaaattcagactgcagtacagctgtctccttggaggcgtcaggggttcctaagcctaaattctacctctagggtcttgatccctcaagagttcatcctgagttaaaattttgttatccccggaagcagagatgcactgactctggtgatctcagtatgaatgtggtatgaaatcttctaggtgtctgtggtggggcctgagggagggtaggaaaggtgacgaggaaaaagtagagggagcctgaacaccctgggtctcaggtacggagtgaagaaatcactaaggtgaaaagacaggctggggcccaggagctcgtccaagtcctgatgaacaacaagtcctgggcaacatcacaggccaccaaacacaccttcagctccagggtcgaatagatggtggaagagcacagccatctggaaaatcagaaaaaagtggggaagattttctatcttgaacttgtgagctggagaattaccattagtagcccactaataggttatggccgatgagtcccttcataacacactgagagccacttttgacactcccagaaaaggcaggttaacaaaaccccttgatggaaggaagaccctcattgcccaatgtacccaagcctctttgaaccttgcttagactgaactgcaaatgtcttgactgctctgggctccttagtgcaactccttcccacagaagccatcaggagcctggtccaggaagctcctctcctacacctgccttaaaaggcccagctctgctggggagtaaggttcatgggggccgtcccaatgcaaaagggaatctctgccatcacccactgcaaccacatggtagccactctgcagccggcaggcgtgaggcatgctgcgctaacatgggagggcggaggctctgcctgacttcccagaagcccagtgagaagtccaggacaatcagcaggtgctatgggaaccttggctggcaggcaccatgtcgtcctgtatgatcggcaggaccggctccttcctgaagacaccgattcttggcggctcctgacaaggattgagaggatttgtgggggacagccctgaagccctgagccctcaactcaatgaagggattgtgctggtgtagacccacagcatccagctctgtcactgatgaaggtctgaactgcatactctgcccctttggtgtcagccttaaaggtcagttttaggtgagtttcaaccagtggctgtagatgggtcctttgtttaccagtttccccacatcctgtctgagaccattgctagtttttgtctgcaccagtcttagggaaaacaacctggacaccgtgggtgagatcaccagtgggctccaagccagagcatgggcctgggacagggtgggttaccttggcatactctaacatactcaaacctcatttcttttggggtgatcagacccaacagcaggtcatgggggcgacgaagtccagtggagtccaaggaatgagaaagacagtttgagagacaaaatgggaccagggggctatcacaagtgtggaggctgcaacaaacaggtggtgaggatgtgggggttgaaaggaaacggtgtatcaagtgaatgagaaacatatggctacttgagaacatgggaatgctagaagcaaggagcagcaagtctagcaaacatgcaagccctgcctcagcttctctcccaacactcagcttttcttccaacacatttcatgtgcaaggttctcgtgcccactcctcttgtacagtttggcagcctcatggagcttccctggtaggaaaacacatctgccagaaacaggtcattgttggtctctccccgcttcttcctctcctggaaaaattagaagcaaaggaaatggcctctgcagccatgggcagaaagcagcctttacaaaggttagatgtggctatttcaagtgaggcccctgggccttcctactggaacctgggcttggctcctggctgttgtctctctcccctaggttcccgctgggaaggcttgataacaaaagcaggcttttaccagacaagcaaagatcaaaaaaagatgcaaacctttgtttgtttaatggaaattcctcagggttgctttcctgtgtattccaaaagccgcgagcgggggatcctctaggag

SEQ ID NO: 455917 - DNA, 3165 bp, Homo sapiens
taacactcatgtgtcaggaaagtacagtcaatgtatgctaaaaatccacttgaacaattagctcgcttttttccctcatttgctttcagagtaaatgtgctttcagagtattaggtcggcctaatatatgatacattttaagaaggggaggaaagcgcattgtataccctgatgctgggacccaatagaagacaggccccctggctggcctttggttctccctggagctgacaaagggaaggggcttggaaagcagccactgtccccgcctagtttgggcctttacagacacacctttccttttggcagctgctatggcacggattctctatgccagcacgaagctggaaaacctgcctacctggctggtgaaatgagggtggcagctggaggaaacaggcatcttaggagactagaaatgtccttcaaagggacttcagtgagtgctcaggggaccaggggtgactgtgttaagaagggttagaggttgagagggagccatgagcttgggtcatcaccccagtgagaccatccaggcacacagctcccaggcttgggaggccgcctccagtccaccaggaccctcagggagctgtgacttcattgaagctgggtctaaaggcttccttcaaggctcagcaaactgggttttcaaagatttttgatccctgaagctaatttacacgttatgtggggccatggcaaagacttggccctgaagtggacagaaagaggctgtgctgagtgatgaatgagactaaacagtgttctcatgcttggtgattttgatgagaacatactacataagagttaagagcattataattccctttatcaccatataaacatgtcacttatccggaaagcatacaatttatttgtacatgagaatgtaaatttaaaaattttctgaaaactagattaaatcttgagaagcaattttcaagtaaacaaaaacatgccatgttaatcagcactagatctcccccaccccccacataatgtgtatgtacacatttctcaaattcagactgcagtacagctgtctccttggaggcgtcaggggttcctaagcctaaattctacctctagggtcttgatccctcaagagttcatcctgagttaaaattttgttatccccggaagcagagatgcactgactctggtgatctcagtatgaatgtggtatgaaatcttctaggtgtctgtggtggggcctgagggagggtaggaaaggtgacgaggaaaaagtagagggagcctgaacaccctgggtctcaggtacggagtgaagaaatcactaaggtgaaaagacaggctggggcccaggagctcgtccaagtcctgatgaacaacaagtcctgggcaacatcacaggccaccaaacacaccttcagctccagggtcgaatagatggtggaagagcacagccatctggaaaatcagaaaaaagtggggaagattttctatcttgaacttgtgagctggagaattaccattagtagcccactaataggttatggccgatgagtcccttcataacacactgagagccacttttgacactcccagaaaaggcaggttaacaaaaccccttgatggaaggaagaccctcattgcccaatgtacccaagcctctttgaaccttgcttagactgaactgcaaatgtcttgactgctctgggctccttagtgcaactccttcccacagaagccatcaggagcctggtccaggaagctcctctcctacacctgccttaaaaggcccagctctgctggggagtaaggttcatgggggccgtcccaatgcaaaagggaatctctgccatcacccactgcaaccacatggtagccactctgcagccggcaggcgtgaggcatgctgcgctaacatgggagggcggaggctctgcctgacttcccagaagcccagtgagaagtccaggacaatcagcaggtgctatgggaaccttggctggcaggcaccatgtcgtcctgtatgatcggcaggaccggctccttcctgaagacaccgattcttggcggctcctgacaaggattgagaggatttgtgggggacagccctgaagccctgagccctcaactcaatgaagggattgtgctggtgtagacccacagcatccagctctgtcactgatgaaggtctgaactgcatactctgcccctttggtgtcagccttaaaggtcagttttaggtgagtttcaaccagtggctgtagatgggtcctttgtttaccagtttccccacatcctgtctgagaccattgctagtttttgtctgcaccagtcttagggaaaacaacctggacaccgtgggtgagatcaccagtgggctccaagccagagcatgggcctgggacagggtgggttaccttggcatactctaacatactcaaacctcatttcttttggggtgatcagacccaacagcaggtcatgggggcgacgaagtccagtggagtccaaggaatgagaaagacagtttgagagacaaaatgggaccagggggctatcacaagtgtggaggctgcaacaaacaggtggtgaggatgtgggggttgaaaggaaacggtgtatcaagtgaatgagaaacatatggctacttgagaacatgggaatgctagaagcaaggagcagcaagtctagcaaacatgcaagccctgcctcagcttctctcccaacactcagcttttcttccaacacatttcatgtgcaaggttctcgtgcccactcctcttgtacagtttggcagcctcatggagcttccctggtaggaaaacacatctgccagaaacaggtcattgttggtctctccccgcttcttcctctcctggaaaaattagaagcaaaggaaatggcctctgcagccatgggcagaaagcagcctttacaaaggttagatgtggctatttcaagtgaggcccctgggccttcctactggaacctgggcttggctcctggctgttgtctctctcccctaggttcccgctgggaaggcttgataacaaaagcaggcttttaccagacaagcaaagatcaaaaaaagatgcaaacctttgtttgtttaatggaaattcctcagggttgctttcctgtgtattccaaatcagtgaagacgccaagcgggtaacgctagtcgacctt

SEQ ID NO: 455918 - DNA, 2145 bp, Homo sapiens
taacactcatgtgtcaggaaagtacagtcaatgtatgctaaaaatccacttgaacaattagctcgcttttttccctcatttgctttcagagtaaatgtgctttcagagtattaggtcggcctaatatatgatacattttaagaaggggaggaaagcgcattgtataccctgatgctgggacccaatagaagacaggccccctggctggcctttggttctccctggagctgacaaagggaaggggcttggaaagcagccactgtccccgcctagtttgggcctttacagacacacctttccttttggcagctgctatggcacggattctctatgccagcacgaagctggaaaacctgcctacctggctggtgaaatgagggtggcagctggaggaaacaggcatcttaggagactagaaatgtccttcaaagggacttcagtgagtgctcaggggaccaggggtgactgtgttaagaagggttagaggttgagagggagccatgagcttgggtcatcaccccagtgagaccatccaggcacacagctcccaggcttgggaggccgcctccagtccaccaggaccctcagggagctgtgacttcattgaagctgggtctaaaggcttccttcaaggctcagcaaactgggttttcaaagatttttgatccctgaagctaatttacacgttatgtggggccatggcaaagacttggccctgaagtggacagaaagaggctgtgctgagtgatgaatgagactaaacagtgttctcatgcttggtgattttgatgagaacatactacataagagttaagagcattataattccctttatcaccatataaacatgtcacttatccggaaagcatacaatttatttgtacatgagaatgtaaatttaaaaattttctgaaaactagattaaatcttgagaagcaattttcaagtaaacaaaaacatgccatgttaatcagcactagatctcccccaccccccacataatgtgtatgtacacatttctcaaattcagactgcagtacagctgtctccttggaggcgtcaggggttcctaagcctaaattctacctctagggtcttgatccctcaagagttcatcctgagttaaaattttgttatccccggaagcagagatgcactgactctggtgatctcagtatgaatgtggtatgaaatcttctaggtgtctgtggtggggcctgagggagggtaggaaaggtgacgaggaaaaagtagagggagcctgaacaccctgggtctcaggtacggagtgaagaaatcactaaggtgaaaagacaggctggggcccaggagctcgtccaagtcctgatgaacaacaagtcctgggcaacatcacaggccaccaaacacaccttcagctccagggtcgaatagatggtggaagagcacagccatctggaaaatcagaaaaaagtggggaagattttctatcttgaacttgtgagctggagaattaccattagtagcccactaataggttatggccgatgagtcccttcataacacactgagagccacttttgacactcccagaaaaggcaggttaacaaaaccccttgatggaaggaagaccctcattgcccaatgtacccaagcctctttgaaccttgcttagactgaactgcaaatgtcttgactgctctgggctccttagtgcaactccttcccacagaagccatcaggagcctggtccaggaagctcctctcctacacctgccttaaaaggcccagctctgctggggagtaaggttcatgggggccgtcccaatgcaaaagggaatctctgccatcacccactgcaaccacatggtagccactctgcagccggcaggcgtgaggcatgctgcgctaacatgggagggcggaggctctgcctgacttcccagaagcccagtgagaagtccaggacaatcagcaggtgctatgggaaccttggctggcaggcaccatgtcgtcctgtatgatcggcaggaccggctccttcctgaagacaccgattcttggcggctcctgacaaggattgagaggatttgtgggggacagccctgaagccctgatccacaatcgaagggtgatcctcaagagtcagctctgacacaattcacc

SEQ ID NO: 455919 - DNA, 527 bp, Homo sapiens
cgattccattccagcgtaggcaacatagtgagaccaggtgtgatggcacgtgcctgtagtcccagctacttgggaggctgaggtggggaggactgcgcttccttaatgactgctgcggccagaatgcaacgtggcttaatttctcggttgatccttctccttccccgccttgggtttctagcagcagttttctcttgatttcagattgtcttgggtgtctgcttttggggcagagttttcatcggaggcatgcagagagttaggcttttctagcaacttgctttgcagctcttgtgatcttctcggacagttcaacctgcttcagctggatcctgattgcagaggatgctgtcaggaggaagcacaatttgaaaccaaaaagctgtatgcaggagctattcttgaagtttgtggatgaaaattgggaaggttccctcaagtccaaggtatataaaatttactccagtaaactgttcagtcatttaaaatcaacattttatgtgaatcgttttcactatatattccca

SEQ ID NO: 455920 - DNA, 1845 bp, Homo sapiens
gagaagaaggcggggctaaaactggcgaaggcgtggcttcttggctgcttgacgaagtgtcgtgaataaaagaaaggagaccgcagaagtaaagaagtggggagtttaggcaagtgcctgatttgggtaatcgaaagcacccagtgattgtatttgatgacttttaagctttcatatgccgttatttaatacctgtcacttccaaatgagagatgtaagggcaacggccgttagcgttctgttttggatcaggctctggagtggacgcccctagcttaggggtccttctaggcagccagaaacctgcggaaaatggtagcgatggcggctgggccgagtgggtgtctggtgccggcgtttgggctacggttgttgttggcgactgtgcttcaagcggtgtctgcttttggggcagagttttcatcggaggcatgcagagagttaggcttttctagcaacttgctttgcagctcttgtgatcttctcggacagttcaacctgcttcagctggatcctgattgcagaggatgctgtcaggaggaagcacaatttgaaaccaaaaagctgtatgcaggagctattcttgaagtttgtggatgaaaattgggaaggttccctcaagtccaagcttttgttaggagtgataaacccaaactgttcagaggactgcaaatcaagtatgtccgtggttcagaccctgtattaaagcttttggacgacaatgggaacattgctgaagaactgagcattctcaaatggaacacagacagtgtagaagaattcctgagtgaaaagttggaacgcatataaatcttgcttaaattttgtcctatccttttgttaccttatcaaatgaaatattacagcacctagaaaataatttagttttgcttgcttccattgatcagtcttttacttgaggcattaaatatctaattaaatcgtgaaatggcagtatagtccatgatatctaaggagttggcaagcttaacaaaacccattttttataaatgtccatcctcctgcatttgttgataccactaacaaaatgctttgtaacagacttgcggttaattatgcaaatgatagtttgtgataattggtccagttttacgaacaacagatttctaaattagagaggttaacaagacagatgattactatgcctcatgtgctgtgtgctctttgaaaggaatgacagcagactacaaagcaaataagatatactgagcctcaacagattgcctgctcctcagagtctctcctatttttgtattacccagctttctttttaatacaaatgttatttatagtttacaatgaatgcactgcataaaaactttgtagcttcattattgtaaaacatattcaagatcctacagtaagagtgaaacattcacaaagatttgcgttaatgaagactacacagaaaacctttctagggatttgtgtggatcagatacatacttggcaaatttttgagttttacattcttacagaaaagtccatttaaaagtgatcatttgtaagaccaaaatataaataaaaagtttcaaaaatctatctgaatttggaattcttctggtttgttctttcatgtttaaaaatgatgtttttcaatgcatttttttcatgtaagccctttttttagccaaaatgtaaaaatggctgtaatatttaaaacttataacatcttattgttggtaatagtgctttatatttgtctgattttatttttcaaagttttttcatttatgaacacattttcattggtatattatttaaggaatatctcttgatatagaatttttatattaaaaatgatttttctttgcttaaaaatct

SEQ ID NO: 455921 - DNA, 1559 bp, Homo sapiens
gagaagaaggcggggctaaaactggcgaaggcgtggcttcttggctgcttgacgaagtgtcgtgaataaaagaaaggagaccgcagaagtaaagaagtggggagtttaggcaagtgcctgatttgggtaatcgaaagcacccagtgattgtatttgatgacttttaagctttcatatgccgttatttaatacctgtcacttccaaatgagagatgtaagggcaacggccgttagcgttctgttttggatcaggctctggagtggacgcccctagcttaggggtccttctaggcagccagaaacctgcggaaaatggtagcgatggcggctgggccgagtgggtgtctggtgccggcgtttgggctacggttgttgttggcgactgtgcttcaagcggtgtctgcttttggggcagagttttcatcggaggcatgcagagagttaggcttttctagcaacttgctttgcagctcttgtgatcttctcggacagttcaacctgcttcagctggatcctgattgcagaggatgctgtcaggaggaagcacaatttgaaaccaaaaagctgtatgcaggagctattcttgaagtttgtggatgaaaattgggaaggttccctcaagtccaagcttttgttaggagtgataaacccaaactgttcagaggactgcaaatcaagtatgtccgtggttcagaccctgtattaaagcttttggacgacaatgggaacattgctgaagaactgagcattctcaaatggaacacagacagtgtagaagaattcctgagtgaaaagttggaacgcatataaatcttgcttaaattttgtcctatccttttgttaccttatcaaatgaaatattacagcacctagaaaataatttagttttgcttgcttccattgatcagtcttttacttgaggcattaaatatctaattaaatcgtgaaatggcagtatagtccatgatatctaaggagttggcaagcttaacaaaacccattttttataaatgtccatcctcctgcatttgttgataccactaacaaaatgctttgtaacagacttgcggttaattatgcaaatgatagtttgtgataattggtccagttttacgaacaacagatttctaaattagagaggttaacaagacagatgattactatgcctcatgtgctgtgtgctctttgaaaggaatgacagcagactacaaagcaaataagatatactgagcctcaacagattgcctgctcctcagagtctctcctatttttgtattacccagctttctttttaatacaaatgttatttatagtttacaatgaatgcactgcataaaaactttgtagcttcattattgtaaaacatattcaagatcctacagtaagagtgaaacattcacaaagatttgcgttaatgaagactacacagaaaacctttctagggatttgtgtggatcagatacatacttggcaaatttttgagttttacattcttacagaaaagtccatttaaaagtgatcatttgtaagaccaaaatataaataaaaagtttcaaaaa

SEQ ID NO: 455922 - DNA, 2057 bp, Homo sapiens
  misc_feature (1563)..(1563): n is a, c, g, or t
gagaagaaggcggggctaaaactggcgaaggcgtggcttcttggctgcttgacgaagtgtcgtgaataaaagaaaggagaccgcagaagtaaagaagtggggagtttaggcaagtgcctgatttgggtaatcgaaagcacccagtgattgtatttgatgacttttaagctttcatatgccgttatttaatacctgtcacttccaaatgagagatgtaagggcaacggccgttagcgttctgttttggatcaggctctggagtggacgcccctagcttaggggtccttctaggcagccagaaacctgcggaaaatggtagcgatggcggctgggccgagtgggtgtctggtgccggcgtttgggctacggttgttgttggcgactgtgcttcaagcggtgtctgcttttggggcagagttttcatcggaggcatgcagagagttaggcttttctagcaacttgctttgcagctcttgtgatcttctcggacagttcaacctgcttcagctggatcctgattgcagaggatgctgtcaggaggaagcacaatttgaaaccaaaaagctgtatgcaggagctattcttgaagtttgtggatgaaaattgggaaggttccctcaagtccaagcttttgttaggagtgataaacccaaactgttcagaggactgcaaatcaagtatgtccgtggttcagaccctgtattaaagcttttggacgacaatgggaacattgctgaagaactgagcattctcaaatggaacacagacagtgtagaagaattcctgagtgaaaagttggaacgcatataaatcttgcttaaattttgtcctatccttttgttaccttatcaaatgaaatattacagcacctagaaaataatttagttttgcttgcttccattgatcagtcttttacttgaggcattaaatatctaattaaatcgtgaaatggcagtatagtccatgatatctaaggagttggcaagcttaacaaaacccattttttataaatgtccatcctcctgcatttgttgataccactaacaaaatgctttgtaacagacttgcggttaattatgcaaatgatagtttgtgataattggtccagttttacgaacaacagatttctaaattagagaggttaacaagacagatgattactatgcctcatgtgctgtgtgctctttgaaaggaatgacagcagactacaaagcaaataagatatactgagcctcaacagattgcctgctcctcagagtctctcctatttttgtattacccagctttctttttaatacaaatgttatttatagtttacaatgaatgcactgcataaaaactttgtagcttcattattgtaaaacatattcaagatcctacagtaagagtgaaacattcacaaagatttgcgttaatgaagactacacagaaaacctttctagggatttgtgtggatcagatacatacttggcaaatttttgagttttacattcttacagaaaagtccatttaaaagtgatcatttgtaagaccaaaatataaataaaaagtttcaaaaaaaanaaaaaaaaaaaaaaaaaaaaaaaaaaaaaaaaaaaaaaaaaaaaaaaaaaaaaaacaaaaaaaaaaaaaaaaaataaaaaataaaacaaactaataaatacaaaaaaaaaaaaaaacttattggcccaattggccctataattagaaatttaacaattaattggccggggttaaacatcgaggccattgggaaaattctgcctaaacgaaaccaaatcaaaattcaaggacatcccttttaacacagctgcaaaagtaaacactagggctaaaccaattaaatttcccaataaaaaaccaccttaccgcaattggaaaatgaaggagaaaccattccgtaaaactcttcccaaaaattttggaaaaccaagtggattttgaaaactttaaggcgaaaatttttaggaaaaaaatttgggttaaaaatttttgaacaaaattagtattttataccaaatgcagctaaaacgagaaatcccttttaaaagaaagag

SEQ ID NO: 455923 - DNA, 1678 bp, Homo sapiens
gagaagaaggcggggctaaaactggcgaaggcgtggcttcttggctgcttgacgaagtgtcgtgaataaaagaaaggagaccgcagaagtaaagaagtggggagtttaggcaagtgcctgatttgggtaatcgaaagcacccagtgattgtatttgatgacttttaagctttcatatgccgttatttaatacctgtcacttccaaatgagagatgtaagggcaacggccgttagcgttctgttttggatcaggctctggagtggacgcccctagcttaggggtccttctaggcagccagaaacctgcggaaaatggtagcgatggcggctgggccgagtgggtgtctggtgccggcgtttgggctacggttgttgttggcgactgtgcttcaagcggtgtctgcttttggggcagagttttcatcggaggcatgcagagagttaggcttttctagcaacttgctttgcagctcttgtgatcttctcggacagttcaacctgcttcagctggatcctgattgcagaggatgctgtcaggaggaagcacaatttgaaaccaaaaagctgtatgcaggagctattcttgaagtttgtggatgaaaattgggaaggttccctcaagtccaagcttttgttaggagtgataaacccaaactgttcagaggactgcaaatcaagtatgtccgtggttcagaccctgtattaaagcttttggacgacaatgggaacattgctgaagaactgagcattctcaaatggaacacagacagtgtagaagaattcctgagtgaaaagttggaacgcatataaatcttgcttaaattttgtcctatccttttgttaccttatcaaatgaaatattacagcacctagaaaataatttagttttgcttgcttccattgatcagtcttttacttgaggcattaaatatctaattaaatcgtgaaatggcagtatagtccatgatatctaaggagttggcaagcttaacaaaacccattttttataaatgtccatcctcctgcatttgttgataccactaacaaaatgctttgtaacagacttgcggttaattatgcaaatgatagtttgtgataattggtccagttttacgaacaacagatttctaaattagagaggttaacaagacagatgattactatgcctcatgtgctgtgtgctctttgaaaggaatgacagcagactacaaagcaaataagatatactgagcctcaacagattgcctgctcctcagagtctctcctatttttgtattacccagctttctttttaatacaaatgttatttatagtttacaatgaatgcactgcataaaaactttgtagcttcattattgtaaaacatattcaagatcctacagtaagagtgaaacattcacaaagatttgcgttaatgaagactacacagaaaacctttctagggatttgtgtggatcagatacatacttggcaaatttttgagttttacattcttacagaaaagtccatttaaaagtgatcatttgtaagaccaaaatataaataaaaagtttcaaaaatggacttttctgtaagaatgtaaaactcaaaatttgccaagtatgtatctgatccacacaatccttagaaaggttttctgtgtagtcttcattaacgcaatctttgtgaatgtttcact

SEQ ID NO: 455924 - DNA, 1568 bp, Homo sapiens
gtatcaacgcagagtggccattatccggggggaaaatggtagcgatggcggctgggccgagtgggtgtctggtgccggcgtttgggctacggttgttgttggcgactgtgcttcaagcggtgtctgcttttggggcagagttttcatcggaggcatgcagagagttaggcttttctagcaacttgctttgcagctcttgtgatcttctcggacagttcaacctgcttcagctggatcctgattgcagaggatgctgtcaggaggaagcacaatttgaaaccaaaaagctgtatgcaggagctattcttgaagtttgtggatgaaaattgggaaggttccctcaagtccaagcttttgttaggagtgataaacccaaactgttcagaggactgcaaatcaagtatgtccgtggttcagaccctgtattaaagcttttggacgacaatgggaacattgctgaagaactgagcattctcaaatggaacacagacagtgtagaagaattcctgagtgaaaagttggaacgcatataaatcttgcttaaattttgtcctatccttttgttaccttatcaaatgaaatattacagcacctagaaaataatttagttttgcttgcttccattgatcagtcttttacttgaggcattaaatatctaattaaatcgtgaaatggcagtatagtccatgatatctaaggagttggcaagcttaacaaaacccattttttataaatgtccatcctcctgcatttgttgataccactaacaaaatgctttgtaacagacttgcggttaattatgcaaatgatagtttgtgataattggtccagttttacgaacaacagatttctaaattagagaggttaacaagacagatgattactatgcctcatgtgctgtgtgctctttgaaaggaatgacagcagactacaaagcaaataagatatactgagcctcaacagattgcctgctcctcagagtctctcctatttttgtattacccagctttctttttaatacaaatgttatttatagtttacaatgaatgcactgcataaaaactttgtagcttcattattgtaaaacatattcaagatcctacagtaagagtgaaacattcacaaagatttgcgttaatgaagactacacagaaaacctttctagggatttgtgtggatcagatacatacttggcaaatttttgagttttacattcttacagaaaagtccatttaaaagtgatcatttgtaagaccaaaatataaataaaaagtttcaaaaatctatctgaatttggaattcttctggtttgttctttcatgtttaaaaatgatgtttttcaatgcatttttttcatgtaagccctttttttagccaaaatgtaaaaatggctgtaatatttaaaacttataacatcttattgttggtaatagtgctttatatttgtctgattttatttttcaaagttttttcatttatgaacacattttcattggtatattatttaaggaatatctcttgatatagaatttttatattaaaaatgatttttctttgcttaaaaatct

SEQ ID NO: 455925 - DNA, 1539 bp, Homo sapiens
gagaagaaggcggggctaaaactggcgaaggcgtggcttcttggctgcttgacgaagtgtcgtgaataaaagaaaggagaccgcagaagtaaagaagtggggagtttaggcaagtgcctgatttgggtaatcgaaagcacccagtgattgtatttgatgacttttaagctttcatatgccgttatttaatacctgtcacttccaaatgagagatgtaagggcaacggccgttagcgttctgttttggatcaggctctggagtggacgcccctagcttaggggtccttctaggcagccagaaacctgcggaaaatggtagcgatggcggctgggccgagtgggtgtctggtgccggcgtttgggctacggttgttgttggcgactgtgcttcaagcggtgtctgcttttggggcagagttttcatcggaggcatgcagagagttaggcttttctagcaacttgctttgcagctcttgtgatcttctcggacagttcaacctgcttcagctggatcctgattgcagaggatgctgtcaggaggaagcacaatttgaaaccaaaaagctgtatgcaggagctattcttgaagtttgtggatgaaaattgggaaggttccctcaagtccaagcttttgttaggagtgataaacccaaactgttcagaggactgcaaatcaagtatgtccgtggttcagaccctgtattaaagcttttggacgacaatgggaacattgctgaagaactgagcattctcaaatggaacacagacagtgtagaagaattcctgagtgaaaagttggaacgcatataaatcttgcttaaattttgtcctatccttttgttaccttatcaaatgaaatattacagcacctagaaaataatttagttttgcttgcttccattgatcagtcttttacttgaggcattaaatatctaattaaatcgtgaaatggcagtatagtccatgatatctaaggagttggcaagcttaacaaaacccattttttataaatgtccatcctcctgcatttgttgataccactaacaaaatgctttgtaacagacttgcggttaattatgcaaatgatattttacgaacaacagatttctaaattagagaggttaacaagacagatgattactatgcctcatgtgctgtgtgctctttgaaaggaatgacagcagactacaaagcaaataagatatactgagcctcaacagattgcctgctcctcagagtctctcctatttttgtattacccagctttctttttaatacaaatgttatttatagtttacaatgaatgcactgcataaaaactttgtagcttcattattgtaaaacatattcaagatcctacagtaagagtgaaacattcacaaagatttgcgttaatgaagactacacagaaaacctttctagggatttgtgtggatcagatacatacttggcaaatttttgagttttacattcttacagaaaagtccatttaaaagtgatcatttgtaagaccaaaatataaataaaaagtttcaaaaa

SEQ ID NO: 455926 - DNA, 1272 bp, Homo sapiens
gagaagaaggcggggctaaaactggcgaaggcgtggcttcttggctgcttgacgaagtgtcgtgaataaaagaaaggagaccgcagaagtaaagaagtggggagtttaggtgtctgcttttggggcagagttttcatcggaggcatgcagagagttaggcttttctagcaacttgctttgcagctcttgtgatcttctcggacagttcaacctgcttcagctggatcctgattgcagaggatgctgtcaggaggaagcacaatttgaaaccaaaaagctgtatgcaggagctattcttgaagtttgtggatgaaaattgggaaggttccctcaagtccaagcttttgttaggagtgataaacccaaactgttcagaggactgcaaatcaagtatgtccgtggttcagaccctgtattaaagcttttggacgacaatgggaacattgctgaagaactgagcattctcaaatggaacacagacagtgtagaagaattcctgagtgaaaagttggaacgcatataaatcttgcttaaattttgtcctatccttttgttaccttatcaaatgaaatattacagcacctagaaaataatttagttttgcttgcttccattgatcagtcttttacttgaggcattaaatatctaattaaatcgtgaaatggcagtatagtccatgatatctaaggagttggcaagcttaacaaaacccattttttataaatgtccatcctcctgcatttgttgataccactaacaaaatgctttgtaacagacttgcggttaattatgcaaatgatagtttgtgataattggtccagttttacgaacaacagatttctaaattagagaggttaacaagacagatgattactatgcctcatgtgctgtgtgctctttgaaaggaatgacagcagactacaaagcaaataagatatactgagcctcaacagattgcctgctcctcagagtctctcctatttttgtattacccagctttctttttaatacaaatgttatttatagtttacaatgaatgcactgcataaaaactttgtagcttcattattgtaaaacatattcaagatcctacagtaagagtgaaacattcacaaagatttgcgttaatgaagactacacagaaaacctttctagggatttgtgtggatcagatacatacttggcaaatttttgagttttacattcttacagaaaagtccatttaaaagtgatcatttgtaagaccaaaatataaataaaaagtttcaaaaa

SEQ ID NO: 455927 - DNA, 1505 bp, Homo sapiens
gagaagaaggcggggctaaaactggcgaaggcgtggcttcttggctgcttgacgaagtgtcgtgaataaaagaaaggagaccgcagaagtaaagaagtggggagtttaggcaagtgcctgatttgggtaatcgaaagcacccagtgattgtatttgatgacttttaagctttcatatgccgttatttaatacctgtcacttccaaatgagagatgtaagggcaacggccgttagcgttctgttttggatcaggctctggagtggacgcccctagcttaggggtccttctaggcagccagaaacctgcggctacggttgttgttggcgactgtgcttcaagcggtgtctgcttttggggcagagttttcatcggaggcatgcagagagttaggcttttctagcaacttgctttgcagctcttgtgatcttctcggacagttcaacctgcttcagctggatcctgattgcagaggatgctgtcaggaggaagcacaatttgaaaccaaaaagctgtatgcaggagctattcttgaagtttgtggatgaaaattgggaaggttccctcaagtccaagcttttgttaggagtgataaacccaaactgttcagaggactgcaaatcaagtatgtccgtggttcagaccctgtattaaagcttttggacgacaatgggaacattgctgaagaactgagcattctcaaatggaacacagacagtgtagaagaattcctgagtgaaaagttggaacgcatataaatcttgcttaaattttgtcctatccttttgttaccttatcaaatgaaatattacagcacctagaaaataatttagttttgcttgcttccattgatcagtcttttacttgaggcattaaatatctaattaaatcgtgaaatggcagtatagtccatgatatctaaggagttggcaagcttaacaaaacccattttttataaatgtccatcctcctgcatttgttgataccactaacaaaatgctttgtaacagacttgcggttaattatgcaaatgatagtttgtgataattggtccagttttacgaacaacagatttctaaattagagaggttaacaagacagatgattactatgcctcatgtgctgtgtgctctttgaaaggaatgacagcagactacaaagcaaataagatatactgagcctcaacagattgcctgctcctcagagtctctcctatttttgtattacccagctttctttttaatacaaatgttatttatagtttacaatgaatgcactgcataaaaactttgtagcttcattattgtaaaacatattcaagatcctacagtaagagtgaaacattcacaaagatttgcgttaatgaagactacacagaaaacctttctagggatttgtgtggatcagatacatacttggcaaatttttgagttttacattcttacagaaaagtccatttaaaagtgatcatttgtaagaccaaaatataaataaaaagtttcaaaaa

SEQ ID NO: 455928 - DNA, 1256 bp, Homo sapiens
cggcatagggtctgtaggctgtggaggagaggtagtggccgggatttgattctggttgtggtgggaagttgttggaacagaatgacgtggtctgtgtctgcttttggggcagagttttcatcggaggcatgcagagagttaggcttttctagcaacttgctttgcagctcttgtgatcttctcggacagttcaacctgcttcagctggatcctgattgcagaggatgctgtcaggaggaagcacaatttgaaaccaaaaagctgtatgcaggagctattcttgaagtttgtggatgaaaattgggaaggttccctcaagtccaagcttttgttaggagtgataaacccaaactgttcagaggactgcaaatcaagtatgtccgtggttcagaccctgtattaaagcttttggacgacaatgggaacattgctgaagaactgagcattctcaaatggaacacagacagtgtagaagaattcctgagtgaaaagttggaacgcatataaatcttgcttaaattttgtcctatccttttgttaccttatcaaatgaaatattacagcacctagaaaataatttagttttgcttgcttccattgatcagtcttttacttgaggcattaaatatctaattaaatcgtgaaatggcagtatagtccatgatatctaaggagttggcaagcttaacaaaacccattttttataaatgtccatcctcctgcatttgttgataccactaacaaaatgctttgtaacagacttgcggttaattatgcaaatgatagtttgtgataattggtccagttttacgaacaacagatttctaaattagagaggttaacaagacagatgattactatgcctcatgtgctgtgtgctctttgaaaggaatgacagcagactacaaagcaaataagatatactgagcctcaacagattgcctgctcctcagagtctctcctatttttgtattacccagctttctttttaatacaaatgttatttatagtttacaatgaatgcactgcataaaaactttgtagcttcattattgtaaaacatattcaagatcctacagtaagagtgaaacattcacaaagatttgcgttaatgaagactacacagaaaacctttctagggatttgtgtggatcagatacatacttggcaaatttttgagttttacattcttacagaaaagtccatttaaaagtgatcatttgtaagaccaaaatataaataaaaagtttcaaaaa

SEQ ID NO: 455929 - DNA, 1257 bp, Homo sapiens
gctggagctcaaggatccttaattaaattaatttccccccccccgagaaacctgcggaaaatggtagcgatggcggctgggccgagtgggtgtctggtgccggcgtttgggctacggttgttgttggcgactgtgcttcaagcggtgtctgcttttggggcagagttttcatcggaggcatgcagagagttaggcttttctagcaacttgctttgcagctcttgtgatcttctcggacagttcaacctgcttcagctggatcctgattgcagaggatgctgtcaggaggaagcacaatttgaaaccaaaaagctgtatgcaggagctattcttgaagtttgtggatgaaaattgggaaggttccctcaagtccaagtatgtccgtggttcagaccctgtattaaagcttttggacgacaatgggaacattgctgaagaactgagcattctcaaatggaacacagacagtgtagaagaattcctgagtgaaaagttggaacgcatataaatcttgcttaaattttgtcctatccttttgttaccttatcaaatgaaatattacagcacctagaaaataatttagttttgcttgcttccattgatcagtcttttacttgaggcattaaatatctaattaaatcgtgaaatggcagtatagtccatgatatctaaggagttggcaagcttaacaaaacccattttttataaatgtccatcctcctgcatttgttgataccactaacaaaatgctttgtaacagacttgcggttaattatgcaaatgatagtttgtgataattggtccagttttacgaacaacagatttctaaattagagaggttaacaagacagatgattactatgcctcatgtgctgtgtgctctttgaaaggaatgacagcagactacaaagcaaataagatatactgagcctcaacagattgcctgctcctcagagtctctcctatttttgtattacccagctttctttttaatacaaatgttatttatagtttacaatgaatgcactgcataaaaactttgtagcttcattattgtaaaacatattcaagatcctacagtaagagtgaaacattcacaaagatttgcgttaatgaagactacacagaaaacctttctagggatttgtgtggatcagatacatacttggcaaatttttgagttttacattcttacagaaaagtccatttaaaagtgatcatttgtaagaccaaaatataaataaaaagtttcaaaaa

SEQ ID NO: 455930 - DNA, 1139 bp, Homo sapiens
gctggagctcaaggatccttaattaaattaatttccccccccccgagaaacctgcggaaaatggtagcgatggcggctgggccgagtgggtgtctggtgccggcgtttgggctacggttgttgttggcgactgtgcttcaagcgctgtatgcaggagctattcttgaagtttgtggatgaaaattgggaaggttccctcaagtccaagcttttgttaggagtgataaacccaaactgttcagaggactgcaaatcaagtatgtccgtggttcagaccctgtattaaagcttttggacgacaatgggaacattgctgaagaactgagcattctcaaatggaacacagacagtgtagaagaattcctgagtgaaaagttggaacgcatataaatcttgcttaaattttgtcctatccttttgttaccttatcaaatgaaatattacagcacctagaaaataatttagttttgcttgcttccattgatcagtcttttacttgaggcattaaatatctaattaaatcgtgaaatggcagtatagtccatgatatctaaggagttggcaagcttaacaaaacccattttttataaatgtccatcctcctgcatttgttgataccactaacaaaatgctttgtaacagacttgcggttaattatgcaaatgatagtttgtgataattggtccagttttacgaacaacagatttctaaattagagaggttaacaagacagatgattactatgcctcatgtgctgtgtgctctttgaaaggaatgacagcagactacaaagcaaataagatatactgagcctcaacagattgcctgctcctcagagtctctcctatttttgtattacccagctttctttttaatacaaatgttatttatagtttacaatgaatgcactgcataaaaactttgtagcttcattattgtaaaacatattcaagatcctacagtaagagtgaaacattcacaaagatttgcgttaatgaagactacacagaaaacctttctagggatttgtgtggatcagatacatacttggcaaatttttgagttttacattcttacagaaaagtccatttaaaagtgatcatttgtaagaccaaaatataaataaaaagtttcaaaaa

SEQ ID NO: 455931 - DNA, 1050 bp, Homo sapiens
  misc_feature (19)..(19): n is a, c, g, or t
  misc_feature (29)..(30): n is a, c, g, or t
taaaaataaaaaaaaaaanaataggggannagttaggtataagtactaacttaagctgtatgcaggagctattcttgaagtttgtggatgaaaattgggaaggttccctcaagtccaagcttttgttaggagtgataaacccaaactgttcagaggactgcaaatcaagtatgtccgtggttcagaccctgtattaaagcttttggacgacaatgggaacattgctgaagaactgagcattctcaaatggaacacagacagtgtagaagaattcctgagtgaaaagttggaacgcatataaatcttgcttaaattttgtcctatccttttgttaccttatcaaatgaaatattacagcacctagaaaataatttagttttgcttgcttccattgatcagtcttttacttgaggcattaaatatctaattaaatcgtgaaatggcagtatagtccatgatatctaaggagttggcaagcttaacaaaacccattttttataaatgtccatcctcctgcatttgttgataccactaacaaaatgctttgtaacagacttgcggttaattatgcaaatgatagtttgtgataattggtccagttttacgaacaacagatttctaaattagagaggttaacaagacagatgattactatgcctcatgtgctgtgtgctctttgaaaggaatgacagcagactacaaagcaaataagatatactgagcctcaacagattgcctgctcctcagagtctctcctatttttgtattacccagctttctttttaatacaaatgttatttatagtttacaatgaatgcactgcataaaaactttgtagcttcattattgtaaaacatattcaagatcctacagtaagagtgaaacattcacaaagatttgcgttaatgaagactacacagaaaacctttctagggatttgtgtggatcagatacatacttggcaaatttttgagttttacattcttacagaaaagtccatttaaaagtgatcatttgtaagaccaaaatataaataaaaagtttcaaaaa

SEQ ID NO: 455932 - DNA, 1509 bp, Homo sapiens
gagaagaaggcggggctaaaactggcgaaggcgtggcttcttggctgcttgacgaagtgtcgtgaataaaagaaaggagaccgcagaagtaaagaagtggggagtttaggcaagtgcctgatttgggtaatcgaaagcacccagtgattgtatttgatgacttttaagctttcatatgccgttatttaatacctgtcacttccaaatgagagatgtaagggcaacggccgttagcgttctgttttggatcaggctctggagtggacgcccctagcttaggggtccttctaggcagccagaaacctgcggaaaatggtagcgatggcggctgggccgagtgggtgtctggtgccggcgtttgggctacggttgttgttggcgactgtgcttcaagcggtgtctgcttttggggcagagttttcatcggaggcatgcagagagttaggcttttctagcaacttgctttgcagctcttgtgatcttctcggacagttcaacctgcttcagctggatcctgattgcagaggatgctgtcaggaggaagcacaatttgaaaccaaaaagctgtatgcaggagctattcttgaagtttgtggatgaaaattgggaaggttccctcaagtccaagtatgtccgtggttcagaccctgtattaaagcttttggacgacaatgggaacattgctgaagaactgagcattctcaaatggaacacagacagtgtagaagaattcctgagtgaaaagttggaacgcatataaatcttgcttaaattttgtcctatccttttgttaccttatcaaatgaaatattacagcacctagaaaataatttagttttgcttgcttccattgatcagtcttttacttgaggcattaaatatctaattaaatcgtgaaatggcagtatagtccatgatatctaaggagttggcaagcttaacaaaacccattttttataaatgtccatcctcctgcatttgttgataccactaacaaaatgctttgtaacagacttgcggttaattatgcaaatgatagtttgtgataattggtccagttttacgaacaacagatttctaaattagagaggttaacaagacagatgattactatgcctcatgtgctgtgtgctctttgaaaggaatgacagcagactacaaagcaaataagatatactgagcctcaacagattgcctgctcctcagagtctctcctatttttgtattacccagctttctttttaatacaaatgttatttatagtttacaatgaatgcactgcataaaaactttgtagcttcattattgtaaaacatattcaagatcctacagtaagagtgaaacattcacaaagatttgcgttaatgaagactacacagaaaacctttctagggatttgtgtggatcagatacatacttggcaaatttttgagttttacattcttacagaaaagtccatttaaaagtgatcatttgtaagaccaaaatataaataaaaagtttcaaaaa

SEQ ID NO: 455933 - DNA, 1505 bp, Homo sapiens
gagaagaaggcggggctaaaactggcgaaggcgtggcttcttggctgcttgacgaagtgtcgtgaataaaagaaaggagaccgcagaagtaaagaagtggggagtttaggcaagtgcctgatttgggtaatcgaaagcacccagtgattgtatttgatgacttttaagctttcatatgccgttatttaatacctgtcacttccaaatgagagatgtaagggcaacggccgttagcgttctgttttggatcaggctctggagtggacgcccctagcttaggggtccttctaggcagccagaaacctgcggaaaatggtagcgatggcggctgggccgagtgggtgtctggtgccggcgtttgggctacggttgttgttggcgactgtgcttcaagcggtgtctgcttttggggcagagttttcatcggaggcatgcagagagttaggcttttctagcaacttgctttgcagctcttgtgatcttctcggacagttcaacctgcttcagctggatcctgattgcagaggatgctgtcaggaggaagcacaatttgaaaccaaaaagctgtatgcaggagctattcttgaagtttgtggatgaaaattgggaaggttccctcaagtccaagcttttgttaggagtgataaacccaaactgttcagaggactgcaaatcaagtatgtccgtggttcagaccctgtattaaagcttttggacgacaatgggaacattgctgaagaactgagcattctcaaatggaacacagacagtgtagaagaattcctgagtgaaaagttggaacgcatataaatcttgcttaaattttgtcctatccttttgttaccttatcaaatgaaatattacagcacctagaatatctaattaaatcgtgaaatggcagtatagtccatgatatctaaggagttggcaagcttaacaaaacccattttttataaatgtccatcctcctgcatttgttgataccactaacaaaatgctttgtaacagacttgcggttaattatgcaaatgatagtttgtgataattggtccagttttacgaacaacagatttctaaattagagaggttaacaagacagatgattactatgcctcatgtgctgtgtgctctttgaaaggaatgacagcagactacaaagcaaataagatatactgagcctcaacagattgcctgctcctcagagtctctcctatttttgtattacccagctttctttttaatacaaatgttatttatagtttacaatgaatgcactgcataaaaactttgtagcttcattattgtaaaacatattcaagatcctacagtaagagtgaaacattcacaaagatttgcgttaatgaagactacacagaaaacctttctagggatttgtgtggatcagatacatacttggcaaatttttgagttttacattcttacagaaaagtccatttaaaagtgatcatttgtaagaccaaaatataaataaaaagtttcaaaaa

SEQ ID NO: 455934 - DNA, 1351 bp, Homo sapiens
gctggagctcaaggatccttaattaaattaatttccccccccccgagaaacctgcggaaaatggtagcgatggcggctgggccgagtgggtgtctggtgccggcgtttgggctacggttgttgttggcgactgtgcttcaagcggtgtctgcttttggggcagagttttcatcggaggcatgcagagagttaggcttttctagcaacttgctttgcagctcttgtgatcttctcggacagttcaacctgcttcagctggatcctgattgcagaggatgctgtcaggaggaagcacaatttgaaaccaaaaagctgtatgcaggagctattcttgaagtttgtggatgaaaattgggaaggttccctcaagtccaagcttttgttaggagtgataaacccaaactgttcagaggactgcaaatcaagagtgattaagaggtcctattgctccacatcctcaccagctttagtatgtccgtggttcagaccctgtattaaagcttttggacgacaatgggaacattgctgaagaactgagcattctcaaatggaacacagacagtgtagaagaattcctgagtgaaaagttggaacgcatataaatcttgcttaaattttgtcctatccttttgttaccttatcaaatgaaatattacagcacctagaaaataatttagttttgcttgcttccattgatcagtcttttacttgaggcattaaatatctaattaaatcgtgaaatggcagtatagtccatgatatctaaggagttggcaagcttaacaaaacccattttttataaatgtccatcctcctgcatttgttgataccactaacaaaatgctttgtaacagacttgcggttaattatgcaaatgatagtttgtgataattggtccagttttacgaacaacagatttctaaattagagaggttaacaagacagatgattactatgcctcatgtgctgtgtgctctttgaaaggaatgacagcagactacaaagcaaataagatatactgagcctcaacagattgcctgctcctcagagtctctcctatttttgtattacccagctttctttttaatacaaatgttatttatagtttacaatgaatgcactgcataaaaactttgtagcttcattattgtaaaacatattcaagatcctacagtaagagtgaaacattcacaaagatttgcgttaatgaagactacacagaaaacctttctagggatttgtgtggatcagatacatacttggcaaatttttgagttttacattcttacagaaaagtccatttaaaagtgatcatttgtaagaccaaaatataaataaaaagtttcaaaaa

SEQ ID NO: 455935 - DNA, 1222 bp, Homo sapiens
gagaagaaggcggggctaaaactggcgaaggcgtggcttcttggctgcttgacgaagtgtcgtgaataaaagaaaggagaccgcagaagtaaagaagtggggagtttaggtgtctgcttttggggcagagttttcatcggaggcatgcagagagttaggcttttctagcaacttgctttgcagctcttgtgatcttctcggacagttcaacctgcttcagctggatcctgattgcagaggatgctgtcaggaggaagcacaatttgaaaccaaaaagctgtatgcaggagctattcttgaagtttgtggatgaaaattgggaaggttccctcaagtccaagtatgtccgtggttcagaccctgtattaaagcttttggacgacaatgggaacattgctgaagaactgagcattctcaaatggaacacagacagtgtagaagaattcctgagtgaaaagttggaacgcatataaatcttgcttaaattttgtcctatccttttgttaccttatcaaatgaaatattacagcacctagaaaataatttagttttgcttgcttccattgatcagtcttttacttgaggcattaaatatctaattaaatcgtgaaatggcagtatagtccatgatatctaaggagttggcaagcttaacaaaacccattttttataaatgtccatcctcctgcatttgttgataccactaacaaaatgctttgtaacagacttgcggttaattatgcaaatgatagtttgtgataattggtccagttttacgaacaacagatttctaaattagagaggttaacaagacagatgattactatgcctcatgtgctgtgtgctctttgaaaggaatgacagcagactacaaagcaaataagatatactgagcctcaacagattgcctgctcctcagagtctctcctatttttgtattacccagctttctttttaatacaaatgttatttatagtttacaatgaatgcactgcataaaaactttgtagcttcattattgtaaaacatattcaagatcctacagtaagagtgaaacattcacaaagatttgcgttaatgaagactacacagaaaacctttctagggatttgtgtggatcagatacatacttggcaaatttttgagttttacattcttacagaaaagtccatttaaaagtgatcatttgtaagaccaaaatataaataaaaagtttcaaaaa

SEQ ID NO: 455936 - DNA, 1603 bp, Homo sapiens
gagaagaaggcggggctaaaactggcgaaggcgtggcttcttggctgcttgacgaagtgtcgtgaataaaagaaaggagaccgcagaagtaaagaagtggggagtttaggcaagtgcctgatttgggtaatcgaaagcacccagtgattgtatttgatgacttttaagctttcatatgccgttatttaatacctgtcacttccaaatgagagatgtaagggcaacggccgttagcgttctgttttggatcaggctctggagtggacgcccctagcttaggggtccttctaggcagccagaaacctgcggaaaatggtagcgatggcggctgggccgagtgggtgtctggtgccggcgtttgggctacggttgttgttggcgactgtgcttcaagcggtgtctgcttttggggcagagttttcatcggaggcatgcagagagttaggcttttctagcaacttgctttgcagctcttgtgatcttctcggacagttcaacctgcttcagctggatcctgattgcagaggatgctgtcaggaggaagcacaatttgaaaccaaaaagctgtatgcaggagctattcttgaagtttgtggatgaaaattgggaaggttccctcaagtccaagcttttgttaggagtgataaacccaaactgttcagaggactgcaaatcaagagtgattaagaggtcctattgctccacatcctcaccagctttagtatgtccgtggttcagaccctgtattaaagcttttggacgacaatgggaacattgctgaagaactgagcattctcaaatggaacacagacagtgtagaagaattcctgagtgaaaagttggaacgcatataaatcttgcttaaattttgtcctatccttttgttaccttatcaaatgaaatattacagcacctagaaaataatttagttttgcttgcttccattgatcagtcttttacttgaggcattaaatatctaattaaatcgtgaaatggcagtatagtccatgatatctaaggagttggcaagcttaacaaaacccattttttataaatgtccatcctcctgcatttgttgataccactaacaaaatgctttgtaacagacttgcggttaattatgcaaatgatagtttgtgataattggtccagttttacgaacaacagatttctaaattagagaggttaacaagacagatgattactatgcctcatgtgctgtgtgctctttgaaaggaatgacagcagactacaaagcaaataagatatactgagcctcaacagattgcctgctcctcagagtctctcctatttttgtattacccagctttctttttaatacaaatgttatttatagtttacaatgaatgcactgcataaaaactttgtagcttcattattgtaaaacatattcaagatcctacagtaagagtgaaacattcacaaagatttgcgttaatgaagactacacagaaaacctttctagggatttgtgtggatcagatacatacttggcaaatttttgagttttacattcttacagaaaagtccatttaaaagtgatcatttgtaagaccaaaatataaataaaaagtttcaaaaa

SEQ ID NO: 455937 - DNA, 982 bp, Homo sapiens
taagttactttatccaaatcgatcgatactaatgacgccgacaccaccttacttttgttaggagtgataaacccaaactgttcagaggactgcaaatcaagtatgtccgtggttcagaccctgtattaaagcttttggacgacaatgggaacattgctgaagaactgagcattctcaaatggaacacagacagtgtagaagaattcctgagtgaaaagttggaacgcatataaatcttgcttaaattttgtcctatccttttgttaccttatcaaatgaaatattacagcacctagaaaataatttagttttgcttgcttccattgatcagtcttttacttgaggcattaaatatctaattaaatcgtgaaatggcagtatagtccatgatatctaaggagttggcaagcttaacaaaacccattttttataaatgtccatcctcctgcatttgttgataccactaacaaaatgctttgtaacagacttgcggttaattatgcaaatgatagtttgtgataattggtccagttttacgaacaacagatttctaaattagagaggttaacaagacagatgattactatgcctcatgtgctgtgtgctctttgaaaggaatgacagcagactacaaagcaaataagatatactgagcctcaacagattgcctgctcctcagagtctctcctatttttgtattacccagctttctttttaatacaaatgttatttatagtttacaatgaatgcactgcataaaaactttgtagcttcattattgtaaaacatattcaagatcctacagtaagagtgaaacattcacaaagatttgcgttaatgaagactacacagaaaacctttctagggatttgtgtggatcagatacatacttggcaaatttttgagttttacattcttacagaaaagtccatttaaaagtgatcatttgtaagaccaaaatataaataaaaagtttcaaaaa

SEQ ID NO: 455938 - DNA, 1298 bp, Homo sapiens
gctggagctcaaggatccttaattaaattaatttccccccccccgagaaacctgcggaaaatggtagcgatggcggctgggccgagtgggtgtctggtgccggcgtttgggctacggttgttgttggcgactgtgcttcaagcggtgtctgcttttggggcagagttttcatcggaggcatgcagagagttaggcttttctagcaacttgctttgcagctcttgtgatcttctcggacagttcaacctgcttcagctggatcctgattgcagaggatgctgtcaggaggaagcacaatttgaaaccaaaaagtattcatccattgtttctaagcaagaatgccatcactcaaactgtatgcaggagctattcttgaagtttgtggatgaaaattgggaaggttccctcaagtccaagtatgtccgtggttcagaccctgtattaaagcttttggacgacaatgggaacattgctgaagaactgagcattctcaaatggaacacagacagtgtagaagaattcctgagtgaaaagttggaacgcatataaatcttgcttaaattttgtcctatccttttgttaccttatcaaatgaaatattacagcacctagaaaataatttagttttgcttgcttccattgatcagtcttttacttgaggcattaaatatctaattaaatcgtgaaatggcagtatagtccatgatatctaaggagttggcaagcttaacaaaacccattttttataaatgtccatcctcctgcatttgttgataccactaacaaaatgctttgtaacagacttgcggttaattatgcaaatgatagtttgtgataattggtccagttttacgaacaacagatttctaaattagagaggttaacaagacagatgattactatgcctcatgtgctgtgtgctctttgaaaggaatgacagcagactacaaagcaaataagatatactgagcctcaacagattgcctgctcctcagagtctctcctatttttgtattacccagctttctttttaatacaaatgttatttatagtttacaatgaatgcactgcataaaaactttgtagcttcattattgtaaaacatattcaagatcctacagtaagagtgaaacattcacaaagatttgcgttaatgaagactacacagaaaacctttctagggatttgtgtggatcagatacatacttggcaaatttttgagttttacattcttacagaaaagtccatttaaaagtgatcatttgtaagaccaaaatataaataaaaagtttcaaaaa

SEQ ID NO: 455939 - DNA, 1203 bp, Homo sapiens
gctggagctcaaggatccttaattaaattaatttccccccccccgagaaacctgcggaaaatggtagcgatggcggctgggccgagtgggtgtctggtgccggcgtttgggctacggttgttgttggcgactgtgcttcaagcggtgtctgcttttggggcagagttttcatcggaggcatgcagagagttaggcttttctagcaacttgctttgcagctcttgtgatcttctcggacagttcaacctgcttcagctggatcctgattgcagaggatgctgtcaggaggaagcacaatttgaaaccaaaaagctgtatgcaggagctattcttgaagtttgtggatgtaaagcttttggacgacaatgggaacattgctgaagaactgagcattctcaaatggaacacagacagtgtagaagaattcctgagtgaaaagttggaacgcatataaatcttgcttaaattttgtcctatccttttgttaccttatcaaatgaaatattacagcacctagaaaataatttagttttgcttgcttccattgatcagtcttttacttgaggcattaaatatctaattaaatcgtgaaatggcagtatagtccatgatatctaaggagttggcaagcttaacaaaacccattttttataaatgtccatcctcctgcatttgttgataccactaacaaaatgctttgtaacagacttgcggttaattatgcaaatgatagtttgtgataattggtccagttttacgaacaacagatttctaaattagagaggttaacaagacagatgattactatgcctcatgtgctgtgtgctctttgaaaggaatgacagcagactacaaagcaaataagatatactgagcctcaacagattgcctgctcctcagagtctctcctatttttgtattacccagctttctttttaatacaaatgttatttatagtttacaatgaatgcactgcataaaaactttgtagcttcattattgtaaaacatattcaagatcctacagtaagagtgaaacattcacaaagatttgcgttaatgaagactacacagaaaacctttctagggatttgtgtggatcagatacatacttggcaaatttttgagttttacattcttacagaaaagtccatttaaaagtgatcatttgtaagaccaaaatataaataaaaagtttcaaaaa

SEQ ID NO: 455940 - DNA, 991 bp, Homo sapiens
gagcaccagactgtaattattaagttcgcgtacattgcgtatcgatccaaaccacttagcttttagactaggagtgatattccaaactgttcagaggactgcaaatcaagtatgtccgtggttcagaccctgtattaaagcttttggacgacaatgggaacattgctgaagaactgagcattctcaaatggaacacagacagtgtagaagaattcctgagtgaaaagttggaacgcatataaatcttgcttaaattttgtcctatccttttgttaccttatcaaatgaaatattacagcacctagaaaataatttagttttgcttgcttccattgatcagtcttttacttgaggcattaaatatctaattaaatcgtgaaatggcagtatagtccatgatatctaaggagttggcaagcttaacaaaacccattttttataaatgtccatcctcctgcatttgttgataccactaacaaaatgctttgtaacagacttgcggttaattatgcaaatgatagtttgtgataattggtccagttttacgaacaacagatttctaaattagagaggttaacaagacagatgattactatgcctcatgtgctgtgtgctctttgaaaggaatgacagcagactacaaagcaaataagatatactgagcctcaacagattgcctgctcctcagagtctctcctatttttgtattacccagctttctttttaatacaaatgttatttatagtttacaatgaatgcactgcataaaaactttgtagcttcattattgtaaaacatattcaagatcctacagtaagagtgaaacattcacaaagatttgcgttaatgaagactacacagaaaacctttctagggatttgtgtggatcagatacatacttggcaaatttttgagttttacattcttacagaaaagtccatttaaaagtgatcatttgtaagaccaaaatataaataaaaagtttcaaaaa

SEQ ID NO: 455941 - DNA, 938 bp, Homo sapiens
tccgccggctctaccgcggtgtcttaatatatttgagagagaaagaaggaaccttagtatgtccgtggttcagaccctgtattaaagcttttggacgacaatgggaacattgctgaagaactgagcattctcaaatggaacacagacagtgtagaagaattcctgagtgaaaagttggaacgcatataaatcttgcttaaattttgtcctatccttttgttaccttatcaaatgaaatattacagcacctagaaaataatttagttttgcttgcttccattgatcagtcttttacttgaggcattaaatatctaattaaatcgtgaaatggcagtatagtccatgatatctaaggagttggcaagcttaacaaaacccattttttataaatgtccatcctcctgcatttgttgataccactaacaaaatgctttgtaacagacttgcggttaattatgcaaatgatagtttgtgataattggtccagttttacgaacaacagatttctaaattagagaggttaacaagacagatgattactatgcctcatgtgctgtgtgctctttgaaaggaatgacagcagactacaaagcaaataagatatactgagcctcaacagattgcctgctcctcagagtctctcctatttttgtattacccagctttctttttaatacaaatgttatttatagtttacaatgaatgcactgcataaaaactttgtagcttcattattgtaaaacatattcaagatcctacagtaagagtgaaacattcacaaagatttgcgttaatgaagactacacagaaaacctttctagggatttgtgtggatcagatacatacttggcaaatttttgagttttacattcttacagaaaagtccatttaaaagtgatcatttgtaagaccaaaatataaataaaaagtttcaaaaa

SEQ ID NO: 455942 - DNA, 531 bp, Homo sapiens
  misc_feature (29)..(29): n is a, c, g, or t
agtgcacctgaatgcctgactgagtcgantctagagtatcccttcatttaggcaatgatagtttgtgataattggtccagttttacgaacaacagatttctaaattagagaggttaacaagacagatgattactatgcctcatgtgctgtgtgctctttgaaaggaatgacagcagactacaaagcaaataagatatactgagcctcaacagattgcctgctcctcagagtctctcctatttttgtattacccagctttctttttaatacaaatgttatttatagtttacaatgaatgcactgcataaaaactttgtagcttcattattgtaaaacatattcaagatcctacagtaagagtgaaacattcacaaagatttgcgttaatgaagactacacagaaaacctttctagggatttgtgtggatcagatacatacttggcaaatttttgagttttacattcttacagaaaagtccatttaaaagtgatcatttgtaagaccaaaatataaataaaaagtttcaaaaa

SEQ ID NO: 455943 - DNA, 458 bp, Homo sapiens
gctggagctcaaggatccttaattaaattaatttccccccccccgagaaacctgcggaaaatggtagcgatggcggctgggccgagtgggtgtctggtgccggcgtttgggctacggttgttgttggcgactgtgcttcaagcggtgtctgcttttggggcagagttttcatcggaggcatgcagagagttaggcttttctagcaacttgctttgcagctcttgtgatcttctcggacagttcaacctgcttcagctggatcctgattgcagaggatgctgtcaggaggaagcacaatttgaaaccaaaaagctgtatgcaggagctattcttgaagtttgtggatgaaaattgggaaggttccctcaagtccaagagtctcactgtcgcccacactggagtgcagtggcgcaatttcagctcaccgcaacctctgcctcccaggttcaagtgattct

SEQ ID NO: 455944 - DNA, 301 bp, Homo sapiens
ggaggtggaggttgcagtgagctgagattgtgccactacactgcagcctgggtgacagagcaagaccctttctcatgaatgaatgaatgaatgaatgagtgatttttttaattctcctttttttccgaaatcctgtaaaactcttctccttaaagatttcctttaagacttgtttattgtcatgtctaaaagcctttttttaattactaaatttaaactggattgaattgctttgtcttagatgaggctgagaaggttgtttctgaacagaaagtaatgatgacgtccctcttttttgtag

SEQ ID NO: 455945 - DNA, 1593 bp, Homo sapiens
gctggagctcaaggatccttaattaaattaatttccccccccccgagaaacctgcggaaaatggtagcgatggcggctgggccgagtgggtgtctggtgccggcgtttgggctacggttgttgttggcgactgtgcttcaagcggtgtctgcttttggggcagagttttcatcggaggcatgcagagagttaggcttttctagcaacttgctttgcagctcttgtgatcttctcggacagttcaacctgcttcagctggatcctgattgcagaggatgctgtcaggaggaagcacaatttgaaaccaaaaagctgtatgcaggagctattcttgaagtttgtggatgaaaattgggaaggttccctcaagtccaagcttttgttaggagtgataaacccaaactgttcagaggactgcaaatcaagtatgtccgtggttcagaccctgtattaaagcttttggacgacaatgggaacattgctgaagaactgagcattctcaaatggaacacagacagtgtagaagaattcctgagtgaaaagttggaacgcatataaatcttgcttaaattttgtcctatccttttgttaccttatcaaatgaaatattacagcacctagaaaataatttagttttgcttgcttccattgatcagtcttttacttgaggcattaaatatctaattaaatcgtgaaatggcagtatagtccatgatatctaaggagttggcaagcttaacaaaacccattttttataaatgtccatcctcctgcatttgttgataccactaacaaaatgctttgtaacagacttgcggttaattatgcaaatgatagtttgtgataattggtccagttttacgaacaacagatttctaaattagagaggttaacaagacagatgattactatgcctcatgtgctgtgtgctctttgaaaggaatgacagcagactacaaagcaaataagatatactgagcctcaacagattgcctgctcctcagagtctctcctatttttgtattacccagctttctttttaatacaaatgttatttatagtttacaatgaatgcactgcataaaaactttgtagcttcattattgtaaaacatattcaagatcctacagtaagagtgaaacattcacaaagatttgcgttaatgaagactacacagaaaacctttctagggatttgtgtggatcagatacatacttggcaaatttttgagttttacattcttacagaaaagtccatttaaaagtgatcatttgtaagaccaaaatataaataaaaagtttcaaaaatctatctgaatttggaattcttctggtttgttctttcatgtttaaaaatgatgtttttcaatgcatttttttcatgtaagccctttttttagccaaaatgtaaaaatggctgtaatatttaaaacttataacatcttattgttggtaatagtgctttatatttgtctgattttatttttcaaagttttttcatttatgaacacattttcattggtatattatttaaggaatatctcttgatatagaatttttatattaaaaatgatttttctttgcttaaaaatct

SEQ ID NO: 455946 - DNA, 1348 bp, Homo sapiens
gctggagctcaaggatccttaattaaattaatttccccccccccgagaaacctgcggaaaatggtagcgatggcggctgggccgagtgggtgtctggtgccggcgtttgggctacggttgttgttggcgactgtgcttcaagcggtgtctgcttttggggcagagttttcatcggaggcatgcagagagttaggcttttctagcaacttgctttgcagctcttgtgatcttctcggacagttcaacctgcttcagctggatcctgattgcagaggatgctgtcaggaggaagcacaatttgaaaccaaaaagtattcatccattgtttctaagcaagaatgccatcactcaaactgtatgcaggagctattcttgaagtttgtggatgaaaattgggaaggttccctcaagtccaagcttttgttaggagtgataaacccaaactgttcagaggactgcaaatcaagtatgtccgtggttcagaccctgtattaaagcttttggacgacaatgggaacattgctgaagaactgagcattctcaaatggaacacagacagtgtagaagaattcctgagtgaaaagttggaacgcatataaatcttgcttaaattttgtcctatccttttgttaccttatcaaatgaaatattacagcacctagaaaataatttagttttgcttgcttccattgatcagtcttttacttgaggcattaaatatctaattaaatcgtgaaatggcagtatagtccatgatatctaaggagttggcaagcttaacaaaacccattttttataaatgtccatcctcctgcatttgttgataccactaacaaaatgctttgtaacagacttgcggttaattatgcaaatgatagtttgtgataattggtccagttttacgaacaacagatttctaaattagagaggttaacaagacagatgattactatgcctcatgtgctgtgtgctctttgaaaggaatgacagcagactacaaagcaaataagatatactgagcctcaacagattgcctgctcctcagagtctctcctatttttgtattacccagctttctttttaatacaaatgttatttatagtttacaatgaatgcactgcataaaaactttgtagcttcattattgtaaaacatattcaagatcctacagtaagagtgaaacattcacaaagatttgcgttaatgaagactacacagaaaacctttctagggatttgtgtggatcagatacatacttggcaaatttttgagttttacattcttacagaaaagtccatttaaaagtgatcatttgtaagaccaaaatataaataaaaagtttcaaaaa

SEQ ID NO: 455947 - DNA, 1287 bp, Homo sapiens
gctggagctcaaggatccttaattaaattaatttccccccccccgagaaacctgcggaaaatggtagcgatggcggctgggccgagtgggtgtctggtgccggcgtttgggctacggttgttgttggcgactgtgcttcaagcggtgtctgcttttggggcagagttttcatcggaggcatgcagagagttaggcttttctagcaacttgctttgcagctcttgtgatcttctcggacagttcaacctgcttcagctggatcctgattgcagaggatgctgtcaggaggaagcacaatttgaaaccaaaaagcttttgttaggagtgataaacccaaactgttcagaggactgcaaatcaagagtgattaagaggtcctattgctccacatcctcaccagctttagtatgtccgtggttcagaccctgtattaaagcttttggacgacaatgggaacattgctgaagaactgagcattctcaaatggaacacagacagtgtagaagaattcctgagtgaaaagttggaacgcatataaatcttgcttaaattttgtcctatccttttgttaccttatcaaatgaaatattacagcacctagaaaataatttagttttgcttgcttccattgatcagtcttttacttgaggcattaaatatctaattaaatcgtgaaatggcagtatagtccatgatatctaaggagttggcaagcttaacaaaacccattttttataaatgtccatcctcctgcatttgttgataccactaacaaaatgctttgtaacagacttgcggttaattatgcaaatgatagtttgtgataattggtccagttttacgaacaacagatttctaaattagagaggttaacaagacagatgattactatgcctcatgtgctgtgtgctctttgaaaggaatgacagcagactacaaagcaaataagatatactgagcctcaacagattgcctgctcctcagagtctctcctatttttgtattacccagctttctttttaatacaaatgttatttatagtttacaatgaatgcactgcataaaaactttgtagcttcattattgtaaaacatattcaagatcctacagtaagagtgaaacattcacaaagatttgcgttaatgaagactacacagaaaacctttctagggatttgtgtggatcagatacatacttggcaaatttttgagttttacattcttacagaaaagtccatttaaaagtgatcatttgtaagaccaaaatataaataaaaagtttcaaaaa

SEQ ID NO: 455948 - DNA, 463 bp, Homo sapiens
gctggagctcaaggatccttaattaaattaatttccccccccccgagaaacctgcggaaaatggtagcgatggcggctgggccgagtgggtgtctggtgccggcgtttgggctacggttgttgttggcgactgtgcttcaagcggtgtctgcttttggggcagagttttcatcggaggcatgcagagagttaggcttttctagcaacttgctttgcagctcttgtgatcttctcggacagttcaacctgcttcagctggatcctgattgcagaggatgctgtcaggaggaagcacaatttgaaaccaaaaagctgtatgcaggagctattcttgaagtttgtggatgaaaattgggaaggttccctcaagtccaagccttttttgggtttttttttaaaaggggggggcccaaaaagggggctttttgggggtcaaaaattttttaacctgtattaaagcttt

SEQ ID NO: 455949 - DNA, 1337 bp, Homo sapiens
ctaggtcgaggctgggtgtgaatcggcacgaggcaggctggccagcttcctctgcgctccggaaagctgcggcccagcgcggactagtgaggacctccacagctcctgacattgccaggagtcctgtcggcgttttctcccagcctccgccatgccggcggtgctgggttttgaaggcagcgccaataagattggcgtgggcgtggtgcgggatggcaaggtgctggcgaacccgcggcggacttacgtcacgcctcctggcacaggattccttccaggtgatacagccaggcatcaccgagctgttatcctagacctgctgcaggaggcactaacagagtctggattaacctcccaggatatcgactgcattgcatacaccaagggccctggcatgggtgccccactggtttctgtggctgttgtggcccgtactgtggcccagctgtggaataagccattggtgggtgtgaaccactgtataggccacattgagatgggccgcctcatcactggagccaccagcccaaccgtgttgtatgtgagtggaggaaatacgcaggtgattgcatactcggaacatcgttaccgtatctttggggaaaccatcgatattgcagtgggtaattgtctggatcgttttgctcgagtgctgaagatttctaacgacccaagtccaggatacaacattgaacagatggcaaagcgaggcaagaagctagttgagctgccatacactgtaaaggggatggacgtctcattctcagggatcctgtctttcattgaggatgtagcccatcggatgctggccacaggcgagtgtactcctgaggatctgtgtttctccctgcaggaaactgtgtttgcaatgctggtagagatcacagagcgagccatggcacattgtggctcccaggaggccctcattgtgggaggagtggggtgtaatgtgaggctacaggagatgatggcaacaatgtgccaggaacgtggagcccggctttttgctacagatgagagattctgtattgacaatggagcgatgatagcccaggctggctgggagatgtttcgggctggacacaggaccccactcagtgattctggggttacacagaggtatcggacagatgaagtagaggtgacctggagggactaataagatcaacagaatcagagtagatagttccttaatcggaacccaaaggaccccgtgcctcaatctctatcctgatgtcatgggagtcctagcaaagctatagactccaagcaaggcttggggtcctttatggaaccccaggatgactcagcaataaaatatttttggttttttggtt

SEQ ID NO: 455950 - DNA, 663 bp, Homo sapiens
tcccatcttaaaaaggtcatatacgtacccaaacaactttagtctgcacctataaatataaaataccttctggccggccttggtgaatacacgcctataatcccagcactttgagaggctgaggcaggtagattgcttgagaccaggagtttgagaccaggctgggcaacatagtgagacccccatctctacaaaaatataaaaataagccacacatggtagcccagctactcaggaagctgaggtgggaggatcctttgagcctaggaggtggaggctacagtgagctatgatcacaccactccactccagcctgggagacagagcgagaccctgtctcaaaaaaaaattaccactgccactgtgtcataatttagaaggattcatgttctctgcctccaagcagaaaagccagttacctactatcaagactgcatttaagggatatattaggaacttctaagccggaaaaccaatgtatttgaaatgacaatttatttctgcctgaacctacactgtctaggaatctgttcctggaatcctcagggtatacagatttcttctcaaatcagagctgtaaaaactacccattcaccatttgggccacctattgaaattgagaatcactacacatcagagaatcgaccgaccgactataggtac

SEQ ID NO: 455951 - DNA, 1596 bp, Homo sapiens
aaaaaaaaaaaaaaaaacccaatctttcttgtgtacaaaattgtgcggccgctcgcgatgaactagccagcacattgtgtgacactgacttaagattctaactatgtgcaagagggaaaaaaacagtggagaaggctgggctggaccacgggaaagagataggaaaacggatacgaatgtaaggcacagagttggctcggcgtccctggcagttaggaagacaggtccctggaggggccttggcgggtctccgctcgcgggagttccgcggtgtctttcccagtgctatctgcaggctggccagcttcctctgcgctccggaaagctgcggcccagcgcggactagtgaggacctccacagctcctgacattgccaggagtcctgtcggcgttttctcccagcctccgccatgccggcggtgctgggttttgaaggcagcgccaataagattggcgtgggcgtggtgcgggatggcaaggtgctggcgaacccgcggcggacttacgtcacgcctcctggcacaggattccttccaggtgatacagccaggcatcaccgagctgttatcctagacctgctgcaggaggcactaacagagtctggattaacctcccaggatatcgactgcattgcatacaccaagggccctggcatgggtgccccactggtttctgtggctgttgtggcccgtactgtggcccagctgtggaataagccattggtgggtgtgaaccactgtataggccacattgagatgggccgcctcatcactggagccaccagcccaaccgtgttgtatgtgagtggaggaaatacgcaggtgattgcatactcggaacatcgttaccgtatctttggggaaaccatcgatattgcagtgggtaattgtctggatcgttttgctcgagtgctgaagatttctaacgacccaagtccaggatacaacattgaacagatggcaaagcgaggcaagaagctagttgagctgccatacactgtaaaggggatggacgtctcattctcagggatcctgtctttcattgaggatgtagcccatcggatgctggccacaggcgagtgtactcctgaggatctgtgtttctccctgcaggaaactgtgtttgcaatgctggtagagatcacagagcgagccatggcacattgtggctcccaggaggccctcattgtgggaggagtggggtgtaatgtgaggctacaggagatgatggcaacaatgtgccaggaacgtggagcccggctttttgctacagatgagagattctgtattgacaatggagcgatgatagcccaggctggctgggagatgtttcgggctggacacaggaccccactcagtgattctggggttacacagaggtatcggacagatgaagtagaggtgacctggagggactaataagatcaacagaatcagagtagatagttccttaatcggaacccaaaggaccccgtgcctcaatctctatcctgatgtcatgggagtcctagcaaagctatagactccaagcaaggcttggggtcctttatggaaccccaggatgactcagcaataaaatatttttggttttttggtt

SEQ ID NO: 455952 - DNA, 1550 bp, Homo sapiens
ctaggtcgaggctgggtgtgaatcggcacgaggcaggctggccagcttcctctgcgctccggaaagctgcggcccagcgcggactagtgaggacctccacagctcctgacattgccaggagtcctgtcggcgttttctcccagcctccgccatgccggcggtgctgggttttgaaggcagcgccaataagattggcgtgggcgtggtgcgggatggcaaggtgctggcgaacccgcggcggacttacgtcacgcctcctggcacaggattccttccaggtgatacagccaggcatcaccgagctgttatcctagacctgctgcaggaggcactaacagagtctggattaacctcccaggatatcgactgcattgcatacaccaagggccctggcatgggtgccccactggtttctgtggctgttgtggcccgtactgtggcccagctgtggaataagccattggtgggtgtgaaccactgtataggccacattgagatgggccgcctcatcactggagccaccagcccaaccgtgttgtatgtgagtggaggaaatacgcaggtgattgcatactcggaacatcgttaccgtatctttggggaaaccatcgatattgcagtgggtaattgtctggatcgttttgctcgagtgctgaagatttctaacgacccaagtccaggatacaacattgaacagatggcaaagcgaggcaagaagctagttgagctgccatacactgtaaaggggatggacgtctcattctcagggatcctgtctttcattgaggatgtagcccatcggatgctggccacaggcgagtgtactcctgaggatctgtgtttctccctgcaggaaactgtgtttgcaatgctggtagagatcacagagcgagccatggcacattgtggctcccaggaggccctcattgtgggaggagtggggtgtatgtattattgaaaagtgttcctctttcctattcttaacactatgcgtcttcctcctggtactctaaatcattaagcgtttggagtaggcttcccaatccttgcccctaatcccctatgtcattgttctaagtgagtgcacatgacgtgttctgctggaccatgaagagatggctaaaactaagctaatcctgttccctgcctctttgtaggtaatgtgaggctacaggagatgatggcaacaatgtgccaggaacgtggagcccggctttttgctacagatgagagattctgtattgacaatggagcgatgatagcccaggctggctgggagatgtttcgggctggacacaggaccccactcagtgattctggggttacacagaggtatcggacagatgaagtagaggtgacctggagggactaataagatcaacagaatcagagtagatagttccttaatcggaacccaaaggaccccgtgcctcaatctctatcctgatgtcatgggagtcctagcaaagctatagactccaagcaaggcttggggtcctttatggaaccccaggatgactcagcaataaaatatttttggttttttggtt

SEQ ID NO: 455953 - DNA, 1720 bp, Homo sapiens
  misc_feature (1563)..(1563): n is a, c, g, or t
ctaggtcgaggctgggtgtgaatcggcacgaggcaggctggccagcttcctctgcgctccggaaagctgcggcccagcgcggactagtgaggacctccacagctcctgacattgccaggagtcctgtcggcgttttctcccagcctccgccatgccggcggtgctgggttttgaaggcagcgccaataagattggcgtgggcgtggtgcgggatggcaaggtgctggcgaacccgcggcggacttacgtcacgcctcctggcacaggattccttccaggtgatacagccaggcatcaccgagctgttatcctagacctgctgcaggaggcactaacagagtctggattaacctcccaggatatcgactgcattgcatacaccaagggccctggcatgggtgccccactggtttctgtggctgttgtggcccgtactgtggcccagctgtggaataagccattggtgggtgtgaaccactgtataggccacattgagatgggccgcctcatcactggagccaccagcccaaccgtgttgtatgtgagtggaggaaatacgcaggtgattgcatactcggaacatcgttaccgtatctttggggaaaccatcgatattgcagtgggtaattgtctggatcgttttgctcgagtgctgaagatttctaacgacccaagtccaggatacaacattgaacagatggcaaagcgaggcaagaagctagttgagctgccatacactgtaaaggggatggacgtctcattctcagggatcctgtctttcattgaggatgtagcccatcggatgctggccacaggcgagtgtactcctgaggatctgtgtttctccctgcaggaaactgtgtttgcaatgctggtagagatcacagagcgagccatggcacattgtggctcccaggaggccctcattgtgggaggagtggggtgtatgtattattgaaaagtgttcctctttcctattcttaacactatgcgtcttcctcctggtactctaaatcattaagcgtttggagtaggcttcccaatccttgcccctaatcccctatgtcattgttctaagtgagtgcacatgacgtgttctgctggaccatgaagagatggctaaaactaagctaatcctgttccctgcctctttgtaggtaatgtgaggctacaggagatgatggcaacaatgtgccaggaacgtggagcccggctttttgctacagatgagagattctgtattgacaatggagcgatgatagcccaggctggctgggagatgtttcgggctggacacaggaccccactcagtgattctggggttacacagaggtatcggacagatgaagtagaggtgacctggagggactaataagatcaacagaatcagagtagatagttccttaatcggaacccaaaggaccccgtgcctcaatctctatcctgatgtcatgggagtcctagcaaagctatagactccaagcaaggcttggggtcctttatggaaccccaggatgactcagcaataaaatatttttggttttttggttaaaaaaaaaaaanatatatcctttcatccttaccccaaatttttcttataaattctcttataaaaaccttccagatagtcccctttccaaattaaccttttcccgctccctacctttccatggccgtgcctttaaaattcatgggtggaaaaccttgagctttccaatct

SEQ ID NO: 455954 - DNA, 1296 bp, Homo sapiens
  misc_feature (23)..(23): n is a, c, g, or t
cttcaggctagtagaggcgggtngactgcggcccagcgcggactagtgaggacctccacagctcctgacattgccaggagtcctgtcggcgttttctcccagcctccgccatgccggcggtgctgggttttgaaggcagcgccaataagattggcgtgggcgtggtgcgggatggcaaggtgctggcgaacccgcggcggacttacgtcacgcctcctggcacaggattccttccaggtgatacagccaggcatcaccgagctgttatcctagacctgctgcaggaggcactaacagagtctggattaacctcccaggatatcgactgcattgcatacaccaagggccctggcatgggtgccccactggtttctgtggctgttgtggcccgtactgtggcccagctgtggaataagccattggtgggtgtgaaccactgtataggccacattgagatgggccgcctcatcactggagccaccagcccaaccgtgttgtatgtgagtggaggaaatacgcaggtgattgcatactcggaacatcgttaccgtatctttggggaaaccatcgatattgcagtgggtaattgtctggatcgttttgctcgagtgctgaagatttctaacgacccaagtccaggatacaacattgaacagatggcaaagcgaggcaagaagctagttgagctgccatacactgtaaaggggatggacgtctcattctcagggatcctgtctttcattgaggatgtagcccatcggatgctggccacaggcgagtgtactcctgaggatctgtgtttctccctgcaggaaactgtgtttgcaatgctggtagagatcacagagcgagccatggcacattgtggctcccaggaggccctcattgtgggaggagtggggtgtaatgtgaggctacaggagatgatggcaacaatgtgccaggaacgtggagcccggctttttgctacagatgagagattctgtattgacaatggagcgatgatagcccaggctggctgggagatgtttcgggctggacacaggaccccactcagtgattctggggttacacagaggtatcggacagatgaagtagaggtgacctggagggactaataagatcaacagaatcagagtagatagttccttaatcggaacccaaaggaccccgtgcctcaatctctatcctgatgtcatgggagtcctagcaaagctatagactccaagcaaggcttggggtcctttatggaaccccaggatgactcagcaataaaatatttttggttttttggtt

SEQ ID NO: 455955 - DNA, 1104 bp, Homo sapiens
  misc_feature (888)..(888): n is a, c, g, or t
ctaggtcgaggctgggtgtgaatcggcacgaggcaggctggccagcttcctctgcgctccggaaagctgcggcccagcgcggactagtgaggacctccacagctcctgacattgccaggagtcctgtcggcgttttctcccagcctccgccatgccggcggtgctgggttttgaaggcagcgccaataagattggcgtgggcgtggtgcgggatggcaaggtgctggcgaacccgcggcggacttacgtcacgcctcctggcacaggattccttccaggtgatacagccaggcatcaccgagctgttatcctagacctgctgcaggaggcactaacagagtctggattaacctcccaggatatcgactgcattgcatacaccaagggccctggcatgggtgccccactggtttctgtggctgttgtggcccgtactgtggcccagctgtggaataagccattggtgggtgtgaaccactgtataggccacattgagatgggccgcctcatcactggagccaccagcccaaccgtgttgtatgtgagtggaggaaatacgcaggtgattgcatactcggaacatcgttaccgtatctttggggaaaccatcgatattgcagtgggtaattgtctggatcgttttgctcgagtgctgaagatttctaacgacccaagtccaggatacaacattgaacagatggcaaagcgaggcaagaagctagttgagctgccatacactgtaaaggggatggacgtctcattctcagggatcctgtctttcattgaggatgtagcccatcggatgctggccacaggcgagtgtactcctgaggatctgtgtttctccctgcagaaacgtcgttttgccgcctcgctagattcacacgngcgcccggggccttggggttccccgaaggcccatgtgtgagacggggcgtatgtgtagggccacggaatatgttccattgtccgaaagagccggttcgttgacatcgaactcttgtctaggcgaaacacggccgcgtcgtatgtgttgcggccccctttgttgcgttcataagacggcgggaaagaatatgtagccgcccctgtgctacagaccac

SEQ ID NO: 455956 - DNA, 2592 bp, Homo sapiens
cggacgcgtgggtcgacccacgcgtccggttctagatcgcgagcggcctccctaagtgctgggattacaggcgtgagccaccatgcccggccagaaggtattttaaatttataggtgaagctaaagttgtttgggttaccttatatgacctttttaaggttgggattggattcttttccaacagaacacttgattatcattagaaatagttcagcattgtccccagctcatgaaagggttgtgtcgagaagatgaggcacatgtttcccatgaaaatgatgcagaaacttcagcaggtagagggcaagtagttggttgaggcctgaaggatgacatacaaggtcagagacttgggttgtggaaagtataatggaggctacaagagttgatgaaaggagcagtgacggttttgtcttcctcttctcttttaatgtttgcttaggtgtaagaaacagggagggtgattaggtggagaggagtggatagcagaagcagaaaggcaggatttttccttcgcctttgttactgtctttttgacagcagattaagatctgtatcagaaagggaagaaatccctaacagcactgggaagggaaagggacttcttaaggttcgtaggaagccctcggtgttataagtctgcagaatatgtgtcagtaagggacagatattctctgtgctaaaagttggtcacatatgaagaacggccttaatacaaaaaagtggtggtgggtgcctgtaattccagctgcttgggaggctgaggcaggagaattgcttgaacctgggaggcagaggttgcagtgagctgagatcacgccattgcactccagcctaggcgacagaacaagactctgtctcagaaaaaaaaaaaaaagaaaagaaaaatggccttaagtgaattgccattgctgacttggctgggccattagtctgactccatatgagatttttgagttcttcagctctgcttcttggttctaaataccactgcccagctgcatacggtggttcacacctataatcccagcactttgagaggctgaggcaggtagattgcttgagaccaggagtttgagaccaggctgggcaacatagtgagacccccatctctacaaaaatataaaaataagccacacatggtagcccagctactcaggaagctgaggtgggaggatcctttgagcctaggaggtggaggctacagtgagctatgatcacaccactccactccagcctgggagacagagcgagaccctgtctcaaaaaaaaattaccactgccactgtgtcataatttagaaggattcatgttctctgcctccaagcagaaaagccagttacctactatcaagactgcatttaagggatatattaggaacttctaagccggaaaaccaatgtatttgaaatgacaatttatttctgcctgaacctacactgtctaggaatctgttcctggaatcctcagggtatacagatttcttctcaaatcagagctgtaaaaactacccattcaccatttgggaaacacctttcttccacttcttattggaagccctggtggtcatgttgatcctctgctatgtttttctcccaaagccaaataatcctctttacagacttggggtttcatggacatcctcatcacccttaggtgattgcatactcggaacatcgttaccgtatctttggggaaaccatcgatattgcagtgggtaattgtctggatcgttttgctcgagtgctgaaggtaagccagtggggcttgcagagaacataaaatgtggggtgaattttttgggaagccatgggaggtggagggaggaaatagtaaatgagcttcttatgcttcctgcatatctgatttcatcctcttccattccctccttccttatttttttcttctgctagatttctaacgacccaagtccaggatacaacattgaacagatggcaaagcgaggcaagaagctagttgagctgccatacactgtaaaggggatggacgtctcattctcagggatcctgtctttcattgaggatgtagcccatcggatgctggccacaggcgagtgtactcctgaggatctgtgtttctccctgcaggaaactgtgtttgcaatgctggtagagatcacagagcgagccatggcacattgtggctcccaggaggccctcattgtgggaggagtggggtgtaatgtgaggctacaggagatgatggcaacaatgtgccaggaacgtggagcccggctttttgctacagatgagagattctgtattgacaatggagcgatgatagcccaggctggctgggagatgtttcgggctggacacaggaccccactcagtgattctggggttacacagaggtatcggacagatgaagtagaggtgacctggagggactaataagatcaacagaatcagagtagatagttccttaatcggaacccaaaggaccccgtgcctcaatctctatcctgatgtcatgggagtcctagcaaagctatagactccaagcaaggcttggggtcctttatggaaccccaggatgactcagcaataaaatatttttggttttttggtt

SEQ ID NO: 455957 - DNA, 1151 bp, Homo sapiens
ctaggtcgaggctgggtgtgaatcggcacgaggcaggctggccagcttcctctgcgctccggaaagctgcggcccagcgcggactagtgaggacctccacagctcctgacattgccaggagtcctgtcggcgttttctcccagcctccgccatgccggcggtgctgggttttgaaggcagcgccaataagattggcgtgggcgtggtgcgggatggcaaggtgctggcgaacccgcggcggacttacgtcacgcctcctggcacaggattccttccaggtgatacagccaggcatcaccgagctgttatcctagacctgctgcaggaggcactaacagagtctggattaacctcccaggatatcgactgcattgcatacaccaagggccctggcatgggtgccccactggtttctgtggctgttgtggcccgtactgtggcccagctgtggaataagccattggtgggtgtgaaccactgtataggccacattgagatgggccgcctcatcactggagccaccagcccaaccgtgttgtatgtgagtggaggaaatacgcaggtgattgcatactcggaacatcgttaccgtatctttggggaaaccatcgatattgcagtgggtaattgtctggatcgttttgctcgagtgctgaagatttctaacgacccaagtccaggatacaacattgaacagatggcaaagcgaggcaagaagctagttgagctgccatacactgtaaaggggatggacgtctcattctcagggatcctgtctttcattgaggtgagtgtgagaggtgatgagacgggcactttcatgctttttaaatgaagcatatctgttttacttacgattatatttcgtatagctcagtatattcatgtagcacagtactggtccatatcatgtgctgggtaaattcatttagaaggtattcattgaatatctctgtgtgccacatgctgttctagatagtagagatgcagcatggagcaaaacaaaaatccctgtctacatggagcttagattctaaatggggggcgggggagataagaaagaggaaaataatgaagtgccagatgatgatgagtacaggtgaaaaattaagcaggataagtaaggggtgagagatgtcaggacaagtatt

SEQ ID NO: 455958 - DNA, 1434 bp, Homo sapiens
ctttgggacaagctaaggccctgaataccgaatcgagctccggaacccaaccttggtcagtgacagagctgagactgtctcaaaagagaaaaaaaaaaaaaagatgcacgaaagggtatgaggtagataccacttgcattgagacctgaaggctgagtagggtaagaagaagagcatttctgaaagttgaatagcctatatagaagccggaaagagtagatgtgaaaatgtggaagataggatgcttggggaaagtgaaaggactcttactacatcactaaaactcctgttgctttctttaacttcctacctacctttgctacagaaaatccctgtgatctctgacctatgttcattttctaggattccttccaggtgatacagccaggcatcaccgagctgttatcctagacctgctgcaggaggcactaacagagtctggattaacctcccaggatatcgactgcattgcatacaccaagggccctggcatgggtgccccactggtttctgtggctgttgtggcccgtactgtggcccagctgtggaataagccattggtgggtgtgaaccactgtataggccacattgagatgggccgcctcatcactggagccaccagcccaaccgtgttgtatgtgagtggaggaaatacgcaggtgattgcatactcggaacatcgttaccgtatctttggggaaaccatcgatattgcagtgggtaattgtctggatcgttttgctcgagtgctgaagatttctaacgacccaagtccaggatacaacattgaacagatggcaaagcgaggcaagaagctagttgagctgccatacactgtaaaggggatggacgtctcattctcagggatcctgtctttcattgaggatgtagcccatcggatgctggccacaggcgagtgtactcctgaggatctgtgtttctccctgcaggaaactgtgtttgcaatgctggtagagatcacagagcgagccatggcacattgtggctcccaggaggccctcattgtgggaggagtggggtgtaatgtgaggctacaggagatgatggcaacaatgtgccaggaacgtggagcccggctttttgctacagatgagagattctgtattgacaatggagcgatgatagcccaggctggctgggagatgtttcgggctggacacaggaccccactcagtgattctggggttacacagaggtatcggacagatgaagtagaggtgacctggagggactaataagatcaacagaatcagagtagatagttccttaatcggaacccaaaggaccccgtgcctcaatctctatcctgatgtcatgggagtcctagcaaagctatagactccaagcaaggcttggggtcctttatggaaccccaggatgactcagcaataaaatatttttggttttttggtt

SEQ ID NO: 455959 - DNA, 1372 bp, Homo sapiens
ctaggtcgaggctgggtgtgaatcggcacgaggcaggctggccagcttcctctgcgctccggaaagctgcggcccagcgcggactagtgaggacctccacagctcctgacattgccaggagtcctgtcggcgttttctcccagcctccgccatgccggcggtgctgggttttgaaggcagcgccaataagattggcgtgggcgtggtgcgggatggcaaggtgctggcgaacccgcggcggacttacgtcacgcctcctggcacaggattccttccaggtgatacagccaggcatcaccgagctgttatcctagacctgctgcaggaggcactaacagagtctggattaacctcccaggatatcgactgcattgcatacaccaagggccctggcatgggtgccccactggtttctgtggctgttgtggcccgtactgtggcccagctgtggaataagccattggtgggtgtgaaccactgtataggccacattgagatgggccgcctcatcactggagccaccagcccaaccgtgttgtatgtgagtggaggaaatacgcagacttggggtttcatggacatcctcatcacccttaggtgattgcatactcggaacatcgttaccgtatctttggggaaaccatcgatattgcagtgggtaattgtctggatcgttttgctcgagtgctgaagatttctaacgacccaagtccaggatacaacattgaacagatggcaaagcgaggcaagaagctagttgagctgccatacactgtaaaggggatggacgtctcattctcagggatcctgtctttcattgaggatgtagcccatcggatgctggccacaggcgagtgtactcctgaggatctgtgtttctccctgcaggaaactgtgtttgcaatgctggtagagatcacagagcgagccatggcacattgtggctcccaggaggccctcattgtgggaggagtggggtgtaatgtgaggctacaggagatgatggcaacaatgtgccaggaacgtggagcccggctttttgctacagatgagagattctgtattgacaatggagcgatgatagcccaggctggctgggagatgtttcgggctggacacaggaccccactcagtgattctggggttacacagaggtatcggacagatgaagtagaggtgacctggagggactaataagatcaacagaatcagagtagatagttccttaatcggaacccaaaggaccccgtgcctcaatctctatcctgatgtcatgggagtcctagcaaagctatagactccaagcaaggcttggggtcctttatggaaccccaggatgactcagcaataaaatatttttggttttttggtt

SEQ ID NO: 455960 - DNA, 1922 bp, Homo sapiens
ctaggtcgaggctgggtgtgaatcggcacgaggcaggctggccagcttcctctgcgctccggaaagctgcggcccagcgcggactagtgaggacctccacagctcctgacattgccaggagtcctgtcggcgttttctcccagcctccgccatgccggcggtgctgggttttgaaggcagcgccaataagattggcgtgggcgtggtgcgggatggcaaggtgctggcgaacccgcggcggacttacgtcacgcctcctggcacaggattccttccaggtgatacagccaggcatcaccgagctgttatcctagacctgctgcaggaggcactaacagagtctggattaacctcccaggatatcgactgcattgcatacaccaagggccctggcatgggtgccccactggtttctgtggctgttgtggcccgtactgtggcccagctgtggaataagccattggtgggtgtgaaccactgtataggccacattgagatgggccgcctcatcactggagccaccagcccaaccgtgttgtatgtgagtggaggaaatacgcaggtatttagagggctctacccactccatctcaatttctgaggcactgaaccagtattttctttgttctatctgagtcatgggaatgtcaggaacaaagatggacttatctgaacctaaaatactgtagaccagaaaacccccaacagagtttgtaacattgcaaattttggcagcatgatcagaacattagatggcttatcattatcagactttatatctgattataaagattaggaatttctacttcaggaaaggaatgaatgggattgaaaaggattgaaatcttcaaaataatgaatatctgaaagctcttgcattattttgaagcttattttttctataaatcttagcaattgaaactaacagttgctgggtatggcaactcatgcgtgcctgtaatcctagcaactccggaggctgggcaggagaatcacttgaacccaggaggcagaagttgcggtgaaccgagatcgcaccattgcattccagcctgggcaacaagagcaaaactccgtctcaaacaaacaaacaaacaaaaaacaaaaaaaaacaactaaaggacactacctgatttattattttggggtgattgcatactcggaacatcgttaccgtatctttggggaaaccatcgatattgcagtgggtaattgtctggatcgttttgctcgagtgctgaagatttctaacgacccaagtccaggatacaacattgaacagatggcaaagcgaggcaagaagctagttgagctgccatacactgtaaaggggatggacgtctcattctcagggatcctgtctttcattgaggatgtagcccatcggatgctggccacaggcgagtgtactcctgaggatctgtgtttctccctgcaggaaactgtgtttgcaatgctggtagagatcacagagcgagccatggcacattgtggctcccaggaggccctcattgtgggaggagtggggtgtaatgtgaggctacaggagatgatggcaacaatgtgccaggaacgtggagcccggctttttgctacagatgagagattctgtattgacaatggagcgatgatagcccaggctggctgggagatgtttcgggctggacacaggaccccactcagtgattctggggttacacagaggtatcggacagatgaagtagaggtgacctggagggactaataagatcaacagaatcagagtagatagttccttaatcggaacccaaaggaccccgtgcctcaatctctatcctgatgtcatgggagtcctagcaaagctatagactccaagcaaggcttggggtcctttatggaaccccaggatgactcagcaataaaatatttttggttttttggtt

SEQ ID NO: 455961 - DNA, 1010 bp, Homo sapiens
ccccctgggttttatcggcacgaggctccaggatatcgactgcattgcatacaccaagggccctggcatgggtgccccactggtttctgtggctgttgtggcccgtactgtggcccagctgtggaataagccattggtgggtgtgaaccactgtataggccacattgagatgggccgcctcatcactggagccaccagcccaaccgtgttgtatgtgagtggaggaaatacgcaggtgattgcatactcggaacatcgttaccgtatctttggggaaaccatcgatattgcagtgggtaattgtctggatcgttttgctcgagtgctgaagatttctaacgacccaagtccaggatacaacattgaacagatggcaaagcgaggcaagaagctagttgagctgccatacactgtaaaggggatggacgtctcattctcagggatcctgtctttcattgaggatgtagcccatcggatgctggccacaggcgagtgtactcctgaggatctgtgtttctccctgcaggaaactgtgtttgcaatgctggtagagatcacagagcgagccatggcacattgtggctcccaggaggccctcattgtgggaggagtggggtgtaatgtgaggctacaggagatgatggcaacaatgtgccaggaacgtggagcccggctttttgctacagatgagagattctgtattgacaatggagcgatgatagcccaggctggctgggagatgtttcgggctggacacaggaccccactcagtgattctggggttacacagaggtatcggacagatgaagtagaggtgacctggagggactaataagatcaacagaatcagagtagatagttccttaatcggaacccaaaggaccccgtgcctcaatctctatcctgatgtcatgggagtcctagcaaagctatagactccaagcaaggcttggggtcctttatggaaccccaggatgactcagcaataaaatatttttggttttttggtt

SEQ ID NO: 455962 - DNA, 2200 bp, Homo sapiens
ctttgggacaagctaaggccctgaataccgaatcgagctccggaacccaaccttggtcagtgacagagctgagactgtctcaaaagagaaaaaaaaaaaaaagatgcacgaaagggtatgaggtagataccacttgcattgagacctgaaggctgagtagggtaagaagaagagcatttctgaaagttgaatagcctatatagaagccggaaagagtagatgtgaaaatgtggaagataggatgcttggggaaagtgaaaggactcttactacatcactaaaactcctgttgctttctttaacttcctacctacctttgctacagaaaatccctgtgatctctgacctatgttcattttctaggattccttccaggtgatacagccaggcatcaccgagctgttatcctagacctgctgcaggaggcactaacagagtctggattaacctcccaggatatcgactgcattgcatacaccaaggggtatggctgggagagtggtcaacgatggaggaatatacctgcaacctggctaggtcaaaatagccaacaccttacctctgccaccatcactacccctaccccacctcacatcccttatgtcccccacctattgtttttttccaatctctaggattataacttccatttctatctccctaggccctggcatgggtgccccactggtttctgtggctgttgtggcccgtactgtggcccagctgtggaataagccattggtgggtgtgaaccactgtataggccacattgagatgggccgcctcatcactggagccaccagcccaaccgtgttgtatgtgagtggaggaaatacgcaggtatttagagggctctacccactccatctcaatttctgaggcactgaaccagtattttctttgttctatctgagtcatgggaatgtcaggaacaaagatggacttatctgaacctaaaatactgtagaccagaaaacccccaacagagtttgtaacattgcaaattttggcagcatgatcagaacattagatggcttatcattatcagactttatatctgattataaagattaggaatttctacttcaggaaaggaatgaatgggattgaaaaggattgaaatcttcaaaataatgaatatctgaaagctcttgcattattttgaagcttattttttctataaatcttagcaattgaaactaacagttgctgggtatggcaactcatgcgtgcctgtaatcctagcaactccggaggctgggcaggagaatcacttgaacccaggaggcagaagttgcggtgaaccgagatcgcaccattgcattccagcctgggcaacaagagcaaaactccgtctcaaacaaacaaacaaacaaaaaacaaaaaaaaacaactaaaggacactacctgatttattattttggggtgattgcatactcggaacatcgttaccgtatctttggggaaaccatcgatattgcagtgggtaattgtctggatcgttttgctcgagtgctgaagatttctaacgacccaagtccaggatacaacattgaacagatggcaaagcgaggcaagaagctagttgagctgccatacactgtaaaggggatggacgtctcattctcagggatcctgtctttcattgaggatgtagcccatcggatgctggccacaggcgagtgtactcctgaggatctgtgtttctccctgcaggaaactgtgtttgcaatgctggtagagatcacagagcgagccatggcacattgtggctcccaggaggccctcattgtgggaggagtggggtgtaatgtgaggctacaggagatgatggcaacaatgtgccaggaacgtggagcccggctttttgctacagatgagagattctgtattgacaatggagcgatgatagcccaggctggctgggagatgtttcgggctggacacaggaccccactcagtgattctggggttacacagaggtatcggacagatgaagtagaggtgacctggagggactaataagatcaacagaatcagagtagatagttccttaatcggaacccaaaggaccccgtgcctcaatctctatcctgatgtcatgggagtcctagcaaagctatagactccaagcaaggcttggggtcctttatggaaccccaggatgactcagcaataaaatatttttggttttttggtt

SEQ ID NO: 455963 - DNA, 1410 bp, Homo sapiens
aaaaaaaaaaaaaaaaacccaatctttcttgtgtacaaaattgtgcggccgctcgcgatgaactagccagcacattgtgtgacactgacttaagattctaactatgtgcaagagggaaaaaaacagtggagaaggctgggctggaccacgggaaagagataggaaaacggatacgaatgtaaggcacagagttggctcggcgtccctggcagttaggaagacaggtccctggaggggccttggcgggtctccgctcgcgggagttccgcggtgtctttcccagtgctatctgcaggctggccagcttcctctgcgctccggaaagctgcggcccagcgcggactagtgaggacctccacagctcctgacattgccaggagtcctgtcggcgttttctcccagcctccgccatgccggcggtgctgggttttgaaggcagcgccaataagattggcgtgggcgtggtgcgggatggcaaggtgctggcgaacccgcggcggacttacgtcacgcctcctggcacaggattccttccaggtgatacagccaggcatcaccgagctgttatcctagacctgctgcaggaggcactaacagagtctggattaacctcccaggatatcgactgcattgcatacaccaagggccctggcatgggtgccccactggtttctgtggctgttgtggcccgtactgtggcccagctgtggaataagccattggtgggtgtgaaccactgtataggccacattgagatgggccgcctcatcactggagccaccagcccaaccgtgttgtatgtgagtggaggaaatacgcaggtgattgcatactcggaacatcgttaccgtatctttggggaaaccatcgatattgcagtgggtaattgtctggatcgttttgctcgagtgctgaagatttctaacgacccaagtccaggatacaacattgaacagatggcaaagcgaggcaagaagctagttgagctgccatacactgtaaaggggatggacgtctcattctcagggatcctgtctttcattgaggtgagtgtgagaggtgatgagacgggcactttcatgctttttaaatgaagcatatctgttttacttacgattatatttcgtatagctcagtatattcatgtagcacagtactggtccatatcatgtgctgggtaaattcatttagaaggtattcattgaatatctctgtgtgccacatgctgttctagatagtagagatgcagcatggagcaaaacaaaaatccctgtctacatggagcttagattctaaatggggggcgggggagataagaaagaggaaaataatgaagtgccagatgatgatgagtacaggtgaaaaattaagcaggataagtaaggggtgagagatgtcaggacaagtatt

SEQ ID NO: 455964 - DNA, 2916 bp, Homo sapiens
cggacgcgtgggtcgacccacgcgtccggttctagatcgcgagcggcctccctaagtgctgggattacaggcgtgagccaccatgcccggccagaaggtattttaaatttataggtgaagctaaagttgtttgggttaccttatatgacctttttaaggttgggattggattcttttccaacagaacacttgattatcattagaaatagttcagcattgtccccagctcatgaaagggttgtgtcgagaagatgaggcacatgtttcccatgaaaatgatgcagaaacttcagcaggtagagggcaagtagttggttgaggcctgaaggatgacatacaaggtcagagacttgggttgtggaaagtataatggaggctacaagagttgatgaaaggagcagtgacggttttgtcttcctcttctcttttaatgtttgcttaggtgtaagaaacagggagggtgattaggtggagaggagtggatagcagaagcagaaaggcaggatttttccttcgcctttgttactgtctttttgacagcagattaagatctgtatcagaaagggaagaaatccctaacagcactgggaagggaaagggacttcttaaggttcgtaggaagccctcggtgttataagtctgcagaatatgtgtcagtaagggacagatattctctgtgctaaaagttggtcacatatgaagaacggccttaatacaaaaaagtggtggtgggtgcctgtaattccagctgcttgggaggctgaggcaggagaattgcttgaacctgggaggcagaggttgcagtgagctgagatcacgccattgcactccagcctaggcgacagaacaagactctgtctcagaaaaaaaaaaaaaagaaaagaaaaatggccttaagtgaattgccattgctgacttggctgggccattagtctgactccatatgagatttttgagttcttcagctctgcttcttggttctaaataccactgcccagctgcatacggtggttcacacctataatcccagcactttgagaggctgaggcaggtagattgcttgagaccaggagtttgagaccaggctgggcaacatagtgagacccccatctctacaaaaatataaaaataagccacacatggtagcccagctactcaggaagctgaggtgggaggatcctttgagcctaggaggtggaggctacagtgagctatgatcacaccactccactccagcctgggagacagagcgagaccctgtctcaaaaaaaaattaccactgccactgtgtcataatttagaaggattcatgttctctgcctccaagcagaaaagccagttacctactatcaagactgcatttaagggatatattaggaacttctaagccggaaaaccaatgtatttgaaatgacaatttatttctgcctgaacctacactgtctaggaatctgttcctggaatcctcagggtatacagatttcttctcaaatcagagctgtaaaaactacccattcaccatttgggaaacacctttcttccacttcttattggaagccctggtggtcatgttgatcctctgctatgtttttctcccaaagccaaataatcctctttacagacttggggtttcatggacatcctcatcacccttaggtgattgcatactcggaacatcgttaccgtatctttggggaaaccatcgatattgcagtgggtaattgtctggatcgttttgctcgagtgctgaaggtaagccagtggggcttgcagagaacataaaatgtggggtgaattttttgggaagccatgggaggtggagggaggaaatagtaaatgagcttcttatgcttcctgcatatctgatttcatcctcttccattccctccttccttatttttttcttctgctagatttctaacgacccaagtccaggatacaacattgaacagatggcaaagcgaggcaagaagctagttgagctgccatacactgtaaaggggatggacgtctcattctcagggatcctgtctttcattgaggatgtagcccatcggatgctggccacaggcgagtgtactcctgaggatctgtgtttctccctgcaggtaatgcagtaaaaaactgggacagaaagttggggctgaaggttttatattgtagagcagaactaatctgggatgcccctctaatattttctccttatctgtccctgacaggaaactgtgtttgcaatgctggtagagatcacagagcgagccatggcacattgtggctcccaggaggccctcattgtgggaggagtggggtgtatgtattattgaaaagtgttcctctttcctattcttaacactatgcgtcttcctcctggtactctaaatcattaagcgtttggagtaggcttcccaatccttgcccctaatcccctatgtcattgttctaagtgagtgcacatgacgtgttctgctggaccatgaagagatggctaaaactaagctaatcctgttccctgcctctttgtaggtaatgtgaggctacaggagatgatggcaacaatgtgccaggaacgtggagcccggctttttgctacagatgagagattctgtattgacaatggagcgatgatagcccaggctggctgggagatgtttcgggctggacacaggaccccactcagtgattctggggttacacagaggtatcggacagatgaagtagaggtgacctggagggactaataagatcaacagaatcagagtagatagttccttaatcggaacccaaaggaccccgtgcctcaatctctatcctgatgtcatgggagtcctagcaaagctatagactccaagcaaggcttggggtcctttatggaaccccaggatgactcagcaataaaatatttttggttttttggtt

SEQ ID NO: 455965 - DNA, 774 bp, Homo sapiens
ggcagctgaatcagcagtcaagggcctgcctgtttggtactacagcttcaaggcggagattaagaaaacaaatagtgccacgggaggagatcggatcctgagtgcttgcaccggcctaggcctgaactgctttgggggcctcatgacggaccgacctggctcctctgtagcagcagcctcagcaacgcattctcctcgcctggttccgcttcatccactatgtacacgcttgctcccccgctcctcccacaggcgagtgtactcctgaggatctgtgtttctccctgcaggaaactgtgtttgcaatgctggtagagatcacagagcgagccatggcacattgtggctcccaggaggccctcattgtgggaggagtggggtgtaatgtgaggctacaggagatgatggcaacaatgtgccaggaacgtggagcccggctttttgctacagatgagagattctgtattgacaatggagcgatgatagcccaggctggctgggagatgtttcgggctggacacaggaccccactcagtgattctggggttacacagaggtatcggacagatgaagtagaggtgacctggagggactaataagatcaacagaatcagagtagatagttccttaatcggaacccaaaggaccccgtgcctcaatctctatcctgatgtcatgggagtcctagcaaagctatagactccaagcaaggcttggggtcctttatggaaccccaggatgactcagcaataaaatatttttggttttttggtt

SEQ ID NO: 455966 - DNA, 934 bp, Homo sapiens
ctctcgtgtaatcccaaaaccatgatttgttgattcttttgtttttccctttaattgtaggatgtagcccatcggatgctggccacaggcgagtgtactcctgaggatctgtgtttctccctgcaggtaatgcagtaaaaaactgggacagaaagttggggctgaaggttttatattgtagagcagaactaatctgggatgcccctctaatattttctccttatctgtccctgacaggaaactgtgtttgcaatgctggtagagatcacagagcgagccatggcacattgtggctcccaggaggccctcattgtgggaggagtggggtgtatgtattattgaaaagtgttcctctttcctattcttaacactatgcgtcttcctcctggtactctaaatcattaagcgtttggagtaggcttcccaatccttgcccctaatcccctatgtcattgttctaagtgagtgcacatgacgtgttctgctggaccatgaagagatggctaaaactaagctaatcctgttccctgcctctttgtaggtaatgtgaggctacaggagatgatggcaacaatgtgccaggaacgtggagcccggctttttgctacagatgagagattctgtattgacaatggagcgatgatagcccaggctggctgggagatgtttcgggctggacacaggaccccactcagtgattctggggttacacagaggtatcggacagatgaagtagaggtgacctggagggactaataagatcaacagaatcagagtagatagttccttaatcggaacccaaaggaccccgtgcctcaatctctatcctgatgtcatgggagtcctagcaaagctatagactccaagcaaggcttggggtcctttatggaaccccaggatgactcagcaataaaatatttttggttttttggtt

SEQ ID NO: 455967 - DNA, 1783 bp, Homo sapiens
cggacgcgtgggtcgacccacgcgtccggttctagatcgcgagcggcctccctaagtgctgggattacaggcgtgagccaccatgcccggccagaaggtattttaaatttataggtgaagctaaagttgtttgggttaccttatatgacctttttaaggttgggattggattcttttccaacagaacacttgattatcattagaaatagttcagcattgtccccagctcatgaaagggttgtgtcgagaagatgaggcacatgtttcccatgaaaatgatgcagaaacttcagcaggtagagggcaagtagttggttgaggcctgaaggatgacatacaaggtcagagacttgggttgtggaaagtataatggaggctacaagagttgatgaaaggagcagtgacggttttgtcttcctcttctcttttaatgtttgcttaggtgtaagaaacagggagggtgattaggtggagaggagtggatagcagaagcagaaaggcaggatttttccttcgcctttgttactgtctttttgacagcagattaagatctgtatcagaaagggaagaaatccctaacagcactgggaagggaaagggacttcttaaggttcgtaggaagccctcggtgttataagtctgcagaatatgtgtcagtaagggacagatattctctgtgctaaaagttggtcacatatgaagaacggccttaatacaaaaaagtggtggtgggtgcctgtaattccagctgcttgggaggctgaggcaggagaattgcttgaacctgggaggcagaggttgcagtgagctgagatcacgccattgcactccagcctaggcgacagaacaagactctgtctcagaaaaaaaaaaaaaagaaaagaaaaatggccttaagtgaattgccattgctgacttggctgggccattagtctgactccatatgagatttttgagttcttcagctctgcttcttggttctaaataccactgcccagctgcatacggtggttcacacctataatcccagcactttgagaggctgaggcaggtagattgcttgagaccaggagtttgagaccaggctgggcaacatagtgagacccccatctctacaaaaatataaaaataagccacacatggtagcccagctactcaggaagctgaggtgggaggatcctttgagcctaggaggtggaggctacagtgagctatgatcacaccactccactccagcctgggagacagagcgagaccctgtctcaaaaaaaaattaccactgccactgtgtcataatttagaaggattcatgttctctgcctccaagcagaaaagccagttacctactatcaagactgcatttaagggatatattaggaacttctaagccggaaaaccaatgtatttgaaatgacaatttatttctgcctgaacctacactgtctaggaatctgttcctggaatcctcagggtatacagatttcttctcaaatcagagctgtaaaaactacccattcaccatttgggaaacacctttcttccacttcttattggaagccctggtggtatcggacagatgaagtagaggtgacctggagggactaataagatcaacagaatcagagtagatagttccttaatcggaacccaaaggaccccgtgcctcaatctctatcctgatgtcatgggagtcctagcaaagctatagactccaagcaaggcttggggtcctttatggaaccccaggatgactcagcaataaaatatttttggttttttggtt

SEQ ID NO: 455968 - DNA, 900 bp, Homo sapiens
aaaaaaaaaaaaaaaaacccaatctttcttgtgtacaaaattgtgcggccgctcgcgatgaactagccagcacattgtgtgacactgacttaagattctaactatgtgcaagagggaaaaaaacagtggagaaggctgggctggaccacgggaaagagataggaaaacggatacgaatgtaaggcacagagttggctcggcgtccctggcagttaggaagacaggtccctggaggggccttggcgggtctccgctcgcgggagttccgcggtgtctttcccagtgctatctgcaggctggccagcttcctctgcgctccggaaagctgcggcccagcgcggactagtgaggacctccacagctcctgacattgccaggagtcctgtcggcgttttctcccagcctccgccatgccggcggtgctgggttttgaaggcagcgccaataagattggcgtgggcgtggtgcgggatggcaaggtgctggcgaacccgcggcggacttacgtcacgcctcctggcacaggattccttccaggtgatacagccaggcatcaccgagctgttatcctagacctgctgcaggaggcactaacagagtctggattaacctcccaggatatcgactgcattgcatacaccaaggacaggaccccactcagtgattctggggttacacagaggtatcggacagatgaagtagaggtgacctggagggactaataagatcaacagaatcagagtagatagttccttaatcggaacccaaaggaccccgtgcctcaatctctatcctgatgtcatgggagtcctagcaaagctatagactccaagcaaggcttggggtcctttatggaaccccaggatgactcagcaataaaatatttttggttttttggtt

SEQ ID NO: 455969 - DNA, 1005 bp, Homo sapiens
aaaaaaaaaaaaaaaaacccaatctttcttgtgtacaaaattgtgcggccgctcgcgatgaactagccagcacattgtgtgacactgacttaagattctaactatgtgcaagagggaaaaaaacagtggagaaggctgggctggaccacgggaaagagataggaaaacggatacgaatgtaaggcacagagttggctcggcgtccctggcagttaggaagacaggtccctggaggggccttggcgggtctccgctcgcgggagttccgcggtgtctttcccagtgctatctgcaggctggccagcttcctctgcgctccggaaagctgcggcccagcgcggactagtgaggacctccacagctcctgacattgccaggagtcctgtcggcgttttctcccagcctccgccatgccggcggtgctgggttttgaaggcagcgccaataagattggcgtgggcgtggtgcgggatggcaaggtgctggcgaacccgcggcggacttacgtcacgcctcctggcacaggttggtgagtaggggacttaagagttttccgcgcacttccccgcacagaatcagccttccatcttcctaaatactagtgaggtgcagctttcgatccgagtctcattgaaattatgtgacattattaacgtcacaaggctgatgactagaagagttacaggcacttggacgtggatctgatgagttcatttaccttttactgagcgcattttatgtgctaagtattcagaaatagatgttatactgctgtggagtcagacatataaatagatgtttatactacagcatgataaacagtataatagagatggactcgaaatattctgtttaaaaaacgcttagcaggagtatagattccagttgccctgaatatacactccctttttaaaaaaaaattattttttgaaatattctaggatgagtagagagatgagagtggaaagactcccggcttacatgtcagacagaactggctggctt

SEQ ID NO: 455970 - DNA, 460 bp, Homo sapiens
ttatatctgattataaagattaggaatttctacttcaggaaaggaatgaatgggattgaaaaggattgaaatcttcaaaataatgaatatctgaaagctcttgcattattttgaagcttattttttctataaatcttagcaattgaaactaacagttgctgggtatggcaactcatgcctgtaattccagcactttgggaggtcgaggcgggtggatcatctgaggtcaggagtttgagcccagcctggccaacgtggcaaaaccccatctgtactaaaaataacaaaaattaatttgatgtggtggcaggtgtgcctgtaatcctagcaactccggaggctgggcaggagaatcacttgaacccaggaggcagaagttgcggtgaaccgagatcgcaccattgcattccagcctgggcaacaagagcaaaactccgtctcaaacaaacaaacaaacaaa

SEQ ID NO: 455971 - DNA, 1993 bp, Homo sapiens
ctaggtcgaggctgggtgtgaatcggcacgaggcaggctggccagcttcctctgcgctccggaaagctgcggcccagcgcggactagtgaggacctccacagctcctgacattgccaggagtcctgtcggcgttttctcccagcctccgccatgccggcggtgctgggttttgaaggcagcgccaataagattggcgtgggcgtggtgcgggatggcaaggtgctggcgaacccgcggcggacttacgtcacgcctcctggcacaggattccttccaggtgatacagccaggcatcaccgagctgttatcctagacctgctgcaggaggcactaacagagtctggattaacctcccaggatatcgactgcattgcatacaccaagggccctggcatgggtgccccactggtttctgtggctgttgtggcccgtactgtggcccagctgtggaataagccattggtgggtgtgaaccactgtataggccacattgagatgggccgcctcatcactggagccaccagcccaaccgtgttgtatgtgagtggaggaaatacgcaggtgattgcatactcggaacatcgttaccgtatctttggggaaaccatcgatattgcagtgggtaattgtctggatcgttttgctcgagtgctgaagatttctaacgacccaagtccaggatacaacattgaacagatggcaaagcgaggcaagaagctagttgagctgccatacactgtaaaggggatggacgtctcattctcagggatcctgtctttcattgaggatgtagcccatcggatgctggccacaggcgagtgtactcctgaggatctgtgtttctccctgcaggaaactgtgtttgcaatgctggtagagatcacagagcgagccatggcacattgtggctcccaggaggccctcattgtgggaggagtggggtgtaatgtgaggctacaggagatgatggcaacaatgtgccaggaacgtggagcccggctttttgctacagatgagagattctgtattgacaatggagcgatgatagcccaggctggctgggagatgtttcgggctggacacaggaccccactcagtgattctggggttacacagaggtatcggacagatgaagtagaggtgacctggagggactaataagatcaacagaatcagagtagatagttccttaatcggaacccaaaggaccccgtgcctcaatctctatcctgatgtcatgggagtcctagcaaagctatagactccaagcaaggcttggggtcctttatggaaccccaggatgactcagcaataaaatatttttggttttttggtttgtatgtggtgattggattgtgttgttcaggaccaatgtagatttggtgctggataaattcttgttggagcttgctgctgtggaaccaagaatgaggtatctttttttttttttttaagaaacggaatcttgctgtgtttcccaggctggtctcgaactgggctcaagcagtcttaccacctcagcctcctgagtaaggatgccattgtgcctggcaacaatagtagtatcataactattattatagcatcgggtcccgtgctaactgctttacattcattctctcatttaaattctttgaagtaggtgtgcaagacttctctcaaaatagcctggaggctcacacctgttatcccagtgctgtgggaggccaagtcaggaggatcccttgagcccaggagtttgagcccagcctgggcaaatagcaagacaccatctatttgaaaaatgtaaaaattatctgggcatggtggcgcacatctgtagtcccagctccaagggaggctgaggcgggaagatagcttgagcccaggagtttgaggttgcagtgagctgtgattgagccactgcattccagcctgagtgacagaacaaaaccttgtctcttaaaaacaaacaaacaaacagcctggagattggtctaacttgtaactcta

SEQ ID NO: 455972 - DNA, 1691 bp, Homo sapiens
ctaggtcgaggctgggtgtgaatcggcacgaggcaggctggccagcttcctctgcgctccggaaagctgcggcccagcgcggactagtgaggacctccacagctcctgacattgccaggagtcctgtcggcgttttctcccagcctccgccatgccggcggtgctgggttttgaaggcagcgccaataagattggcgtgggcgtggtgcgggatggcaaggtgctggcgaacccgcggcggacttacgtcacgcctcctggcacaggattccttccaggtgatacagccaggcatcaccgagctgttatcctagacctgctgcaggaggcactaacagagtctggattaacctcccaggatatcgactgcattgcatacaccaagggccctggcatgggtgccccactggtttctgtggctgttgtggcccgtactgtggcccagctgtggaataagccattggtgggtgtgaaccactgtataggccacattgagatgggccgcctcatcactggagccaccagcccaaccgtgttgtatgtgagtggaggaaatacgcaggtgattgcatactcggaacatcgttaccgtatctttggggaaaccatcgatattgcagtgggtaattgtctggatcgttttgctcgagtgctgaagatttctaacgacccaagtccaggatacaacattgaacagatggcaaagcgaggcaagaagctagttgagctgccatacactgtaaaggggatggacgtctcattctcagggatcctgtctttcattgaggatgtagcccatcggatgctggccacaggcgagtgtactcctgaggatctgtgtttctccctgcaggaaactgtgtttgcaatgctggtagagatcacagagcgagccatggcacattgtggctcccaggaggccctcattgtgggaggagtggggtgtatgtattattgaaaagtgttcctctttcctattcttaacactatgcgtcttcctcctggtactctaaatcattaagcgtttggagtaggcttcccaatccttgcccctaatcccctatgtcattgttctaagtgagtgcacatgacgtgttctgctggaccatgaagagatggctaaaactaagctaatcctgttccctgcctctttgtaggtaatgtgaggctacaggagatgatggcaacaatgtgccaggaacgtggagcccggctttttgctacagatgagagattctgtattgacaatggagcgatgatagcccaggctggctgggagatgtttcgggctggacacaggaccccactcagtgattctggggttacacagagggtgagtgattcacctcttggtgagggtagattattgggacatagacaaaaacagcagggaagagtccaggaacatgagggcagagaagaatgaaggatgttaagggctcgctctccaccatgtttcttctgtttttccacgtatcggacagatgaagtagaggtgacctggagggactaataagatcaacagaatcagagtagatagttccttaatcggaacccaaaggaccccgtgcctcaatctctatcctgatgtcatgggagtcctagcaaagctatagactccaagcaaggcttggggtcctttatggaaccccaggatgactcagcaataaaatatttttggttttttggtt

SEQ ID NO: 455973 - DNA, 1252 bp, Homo sapiens
ctaggtcgaggctgggtgtgaatcggcacgaggcaggctggccagcttcctctgcgctccggaaagctgcggcccagcgcggactagtgaggacctccacagctcctgacattgccaggagtcctgtcggcgttttctcccagcctccgccatgccggcggtgctgggttttgaaggcagcgccaataagattggcgtgggcgtggtgcgggatggcaaggtgctggcgaacccgcggcggacttacgtcacgcctcctggcacaggattccttccaggtgatacagccaggcatcaccgagctgttatcctagacctgctgcaggaggcactaacagagtctggattaacctcccaggatatcgactgcattgcatacaccaagggccctggcatgggtgccccactggtttctgtggctgttgtggcccgtactgtggcccagctgtggaataagccattggtgggtgtgaaccactgtataggccacattgagatgggccgcctcatcactggagccaccagcccaaccgtgttgtatgtgagtggaggaaatacgcaggtgattgcatactcggaacatcgttaccgtatctttggggaaaccatcgatattgcagtgggtaattgtctggatcgttttgctcgagtgctgaagatttctaacgacccaagtccaggatacaacattgaacagatggcaaagcgaggcaagaagctagttgagctgccatacactgtaaaggggatggacgtctcattctcagggatcctgtctttcattgaggatgtagcccatcggatgctggccacaggcgagtgtactcctgaggatctgtgtttctccctgcaggaaactgtgtttgcaatgctggtagagatcacagagcgagccatggcacattgtggctcccaggaggccctcattgtgggaggagtggggtgtaatgtgaggctacaggagatgatggcaacaatgtgccaggaacgtggagcccggctttttgctacagatgagagattctgtattgacaatggagcgatgatagcccaggctggctgggagatgtttcgggctggacacaggaccccactcagtgattctggggttacacagagcagaagttatctgaaccagatgaagtagaagtggacctgtaggggacttaaataggaataactcggaattcagaaggttgaaaggttcccttaaattcgtaacctcgggacccccggggcctttttttttttg

SEQ ID NO: 455974 - DNA, 1498 bp, Homo sapiens
ctaggtcgaggctgggtgtgaatcggcacgaggcaggctggccagcttcctctgcgctccggaaagctgcggcccagcgcggactagtgaggacctccacagctcctgacattgccaggagtcctgtcggcgttttctcccagcctccgccatgccggcggtgctgggttttgaaggcagcgccaataagattggcgtgggcgtggtgcgggatggcaaggtgctggcgaacccgcggcggacttacgtcacgcctcctggcacaggattccttccaggtgatacagccaggcatcaccgagctgttatcctagacctgctgcaggaggcactaacagagtctggattaacctcccaggatatcgactgcattgcatacaccaagggccctggcatgggtgccccactggtttctgtggctgttgtggcccgtactgtggcccagctgtggaataagccattggtgggtgtgaaccactgtataggccacattgagatgggccgcctcatcactggagccaccagcccaaccgtgttgtatgtgagtggaggaaatacgcaggtgattgcatactcggaacatcgttaccgtatctttggggaaaccatcgatattgcagtgggtaattgtctggatcgttttgctcgagtgctgaaggtaagccagtggggcttgcagagaacataaaatgtggggtgaattttttgggaagccatgggaggtggagggaggaaatagtaaatgagcttcttatgcttcctgcatatctgatttcatcctcttccattccctccttccttatttttttcttctgctagatttctaacgacccaagtccaggatacaacattgaacagatggcaaagcgaggcaagaagctagttgagctgccatacactgtaaaggggatggacgtctcattctcagggatcctgtctttcattgaggatgtagcccatcggatgctggccacaggcgagtgtactcctgaggatctgtgtttctccctgcaggaaactgtgtttgcaatgctggtagagatcacagagcgagccatggcacattgtggctcccaggaggccctcattgtgggaggagtggggtgtaatgtgaggctacaggagatgatggcaacaatgtgccaggaacgtggagcccggctttttgctacagatgagagattctgtattgacaatggagcgatgatagcccaggctggctgggagatgtttcgggctggacacaggaccccactcagtgattctggggttacacagaggtatcggacagatgaagtagaggtgacctggagggactaataagatcaacagaatcagagtagatagttccttaatcggaacccaaaggaccccgtgcctcaatctctatcctgatgtcatgggagtcctagcaaagctatagactccaagcaaggcttggggtcctttatggaaccccaggatgactcagcaataaaatatttttggttttttggtt

SEQ ID NO: 455975 - DNA, 1533 bp, Homo sapiens
ctaggtcgaggctgggtgtgaatcggcacgaggcaggctggccagcttcctctgcgctccggaaagctgcggcccagcgcggactagtgaggacctccacagctcctgacattgccaggagtcctgtcggcgttttctcccagcctccgccatgccggcggtgctgggttttgaaggcagcgccaataagattggcgtgggcgtggtgcgggatggcaaggtgctggcgaacccgcggcggacttacgtcacgcctcctggcacaggattccttccaggtgatacagccaggcatcaccgagctgttatcctagacctgctgcaggaggcactaacagagtctggattaacctcccaggatatcgactgcattgcatacaccaagggccctggcatgggtgccccactggtttctgtggctgttgtggcccgtactgtggcccagctgtggaataagccattggtgggtgtgaaccactgtataggccacattgagatgggccgcctcatcactggagccaccagcccaaccgtgttgtatgtgagtggaggaaatacgcaggtgcctgtaatcctagcaactccggaggctgggcaggagaatcacttgaacccaggaggcagaagttgcggtgaaccgagatcgcaccattgcattccagcctgggcaacaagagcaaaactccgtctcaaacaaacaaacaaacaaaaaacaaaaaaaaacaactaaaggacactacctgatttattattttggggtgattgcatactcggaacatcgttaccgtatctttggggaaaccatcgatattgcagtgggtaattgtctggatcgttttgctcgagtgctgaagatttctaacgacccaagtccaggatacaacattgaacagatggcaaagcgaggcaagaagctagttgagctgccatacactgtaaaggggatggacgtctcattctcagggatcctgtctttcattgaggatgtagcccatcggatgctggccacaggcgagtgtactcctgaggatctgtgtttctccctgcaggaaactgtgtttgcaatgctggtagagatcacagagcgagccatggcacattgtggctcccaggaggccctcattgtgggaggagtggggtgtaatgtgaggctacaggagatgatggcaacaatgtgccaggaacgtggagcccggctttttgctacagatgagagattctgtattgacaatggagcgatgatagcccaggctggctgggagatgtttcgggctggacacaggaccccactcagtgattctggggttacacagaggtatcggacagatgaagtagaggtgacctggagggactaataagatcaacagaatcagagtagatagttccttaatcggaacccaaaggaccccgtgcctcaatctctatcctgatgtcatgggagtcctagcaaagctatagactccaagcaaggcttggggtcctttatggaaccccaggatgactcagcaataaaatatttttggttttttggtt

SEQ ID NO: 455976 - DNA, 1072 bp, Homo sapiens
  misc_feature (14)..(14): n is a, c, g, or t
  misc_feature (22)..(22): n is a, c, g, or t
  misc_feature (32)..(32): n is a, c, g, or t
ctgatctagagttncctctgtnattcaagcantcgagctgttatcctagacctgctgcaggaggcactaacagagtctggattaacctcccaggatatcgactgcattgcatacaccaagggccctggcatgggtgccccactggtttctgtggctgttgtggcccgtactgtggcccagctgtggaataagccattggtgggtgtgaaccactgtataggccacattgagatgggccgcctcatcactggagccaccagcccaaccgtgttgtatgtgagtggaggaaatacgcaggtgattgcatactcggaacatcgttaccgtatctttggggaaaccatcgatattgcagtgggtaattgtctggatcgttttgctcgagtgctgaagatttctaacgacccaagtccaggatacaacattgaacagatggcaaagcgaggcaagaagctagttgagctgccatacactgtaaaggggatggacgtctcattctcagggatcctgtctttcattgaggatgtagcccatcggatgctggccacaggcgagtgtactcctgaggatctgtgtttctccctgcaggaaactgtgtttgcaatgctggtagagatcacagagcgagccatggcacattgtggctcccaggaggccctcattgtgggaggagtggggtgtaatgtgaggctacaggagatgatggcaacaatgtgccaggaacgtggagcccggctttttgctacagatgagagattctgtattgacaatggagcgatgatagcccaggctggctgggagatgtttcgggctggacacaggaccccactcagtgattctggggttacacagaggtatcggacagatgaagtagaggtgacctggagggactaataagatcaacagaatcagagtagatagttccttaatcggaacccaaaggaccccgtgcctcaatctctatcctgatgtcatgggagtcctagcaaagctatagactccaagcaaggcttggggtcctttatggaaccccaggatgactcagcaataaaatatttttggttttttggtt

SEQ ID NO: 455977 - DNA, 1777 bp, Homo sapiens
aaaaaaaaaaaaaaaaacccaatctttcttgtgtacaaaattgtgcggccgctcgcgatgaactagccagcacattgtgtgacactgacttaagattctaactatgtgcaagagggaaaaaaacagtggagaaggctgggctggaccacgggaaagagataggaaaacggatacgaatgtaaggcacagagttggctcggcgtccctggcagttaggaagacaggtccctggaggggccttggcgggtctccgctcgcgggagttccgcggtgtctttcccagtgctatctgcaggctggccagcttcctctgcgctccggaaagctgcggcccagcgcggactagtgaggacctccacagctcctgacattgccaggagtcctgtcggcgttttctcccagcctccgccatgccggcggtgctgggttttgaaggcagcgccaataagattggcgtgggcgtggtgcgggatggcaaggtgctggcgaacccgcggcggacttacgtcacgcctcctggcacaggattccttccaggtgatacagccaggcatcaccgagctgttatcctagacctgctgcaggaggcactaacagagtctggattaacctcccaggatatcgactgcattgcatacaccaaggggtatggctgggagagtggtcaacgatggaggaatatacctgcaacctggctaggtcaaaatagccaacaccttacctctgccaccatcactacccctaccccacctcacatcccttatgtcccccacctattgtttttttccaatctctaggattataacttccatttctatctccctaggccctggcatgggtgccccactggtttctgtggctgttgtggcccgtactgtggcccagctgtggaataagccattggtgggtgtgaaccactgtataggccacattgagatgggccgcctcatcactggagccaccagcccaaccgtgttgtatgtgagtggaggaaatacgcaggtgattgcatactcggaacatcgttaccgtatctttggggaaaccatcgatattgcagtgggtaattgtctggatcgttttgctcgagtgctgaagatttctaacgacccaagtccaggatacaacattgaacagatggcaaagcgaggcaagaagctagttgagctgccatacactgtaaaggggatggacgtctcattctcagggatcctgtctttcattgaggatgtagcccatcggatgctggccacaggcgagtgtactcctgaggatctgtgtttctccctgcaggaaactgtgtttgcaatgctggtagagatcacagagcgagccatggcacattgtggctcccaggaggccctcattgtgggaggagtggggtgtaatgtgaggctacaggagatgatggcaacaatgtgccaggaacgtggagcccggctttttgctacagatgagagattctgtattgacaatggagcgatgatagcccaggctggctgggagatgtttcgggctggacacaggaccccactcagtgattctggggttacacagaggtatcggacagatgaagtagaggtgacctggagggactaataagatcaacagaatcagagtagatagttccttaatcggaacccaaaggaccccgtgcctcaatctctatcctgatgtcatgggagtcctagcaaagctatagactccaagcaaggcttggggtcctttatggaaccccaggatgactcagcaataaaatatttttggttttttggtt

SEQ ID NO: 455978 - DNA, 1595 bp, Homo sapiens
ctaggtcgaggctgggtgtgaatcggcacgaggcaggctggccagcttcctctgcgctccggaaagctgcggcccagcgcggactagtgaggacctccacagctcctgacattgccaggagtcctgtcggcgttttctcccagcctccgccatgccggcggtgctgggttttgaaggcagcgccaataagattggcgtgggcgtggtgcgggatggcaaggtgctggcgaacccgcggcggacttacgtcacgcctcctggcacaggattccttccaggtgatacagccaggcatcaccgagctgttatcctagacctgctgcaggaggcactaacagagtctggattaacctcccaggatatcgactgcattgcatacaccaagggccctggcatgggtgccccactggtttctgtggctgttgtggcccgtactgtggcccagctgtggaataagccattggtgggtgtgaaccactgtataggccacattgagatgggccgcctcatcactggagccaccagcccaaccgtgttgtatgtgagtggaggaaatacgcaggtgcctgtaatcctagcaactccggaggctgggcaggagaatcacttgaacccaggaggcagaagttgcggtgaaccgagatcgcaccattgcattccagcctgggcaacaagagcaaaactccgtctcaaacaaacaaacaaacaaaaaacaaaaaaaaacaactaaaggacactacctgatttattattttggggtgattgcatactcggaacatcgttaccgtatctttggggaaaccatcgatattgcagtgggtaattgtctggatcgttttgctcgagtgctgaagatttctaacgacccaagtccaggatacaacattgaacagatggcaaagcggtaaggggacataaggtggaagcaggctggctgctggggcttcagggatttccccatatacgaggcaagaagctagttgagctgccatacactgtaaaggggatggacgtctcattctcagggatcctgtctttcattgaggatgtagcccatcggatgctggccacaggcgagtgtactcctgaggatctgtgtttctccctgcaggaaactgtgtttgcaatgctggtagagatcacagagcgagccatggcacattgtggctcccaggaggccctcattgtgggaggagtggggtgtaatgtgaggctacaggagatgatggcaacaatgtgccaggaacgtggagcccggctttttgctacagatgagagattctgtattgacaatggagcgatgatagcccaggctggctgggagatgtttcgggctggacacaggaccccactcagtgattctggggttacacagaggtatcggacagatgaagtagaggtgacctggagggactaataagatcaacagaatcagagtagatagttccttaatcggaacccaaaggaccccgtgcctcaatctctatcctgatgtcatgggagtcctagcaaagctatagactccaagcaaggcttggggtcctttatggaaccccaggatgactcagcaataaaatatttttggttttttggtt

SEQ ID NO: 455979 - DNA, 1822 bp, Homo sapiens
ctaggtcgaggctgggtgtgaatcggcacgaggcaggctggccagcttcctctgcgctccggaaagctgcggcccagcgcggactagtgaggacctccacagctcctgacattgccaggagtcctgtcggcgttttctcccagcctccgccatgccggcggtgctgggttttgaaggcagcgccaataagattggcgtgggcgtggtgcgggatggcaaggtgctggcgaacccgcggcggacttacgtcacgcctcctggcacaggattccttccaggtgatacagccaggcatcaccgagctgttatcctagacctgctgcaggaggcactaacagagtctggattaacctcccaggatatcgactgcattgcatacaccaagggccctggcatgggtgccccactggtttctgtggctgttgtggcccgtactgtggcccagctgtggaataagccattggtgggtgtgaaccactgtataggccacattgagatgggccgcctcatcactggagccaccagcccaaccgtgttgtatgtgagtggaggaaatacgcaggtgattgcatactcggaacatcgttaccgtatctttggggaaaccatcgatattgcagtgggtaattgtctggatcgttttgctcgagtgctgaaggtaagccagtggggcttgcagagaacataaaatgtggggtgaattttttgggaagccatgggaggtggagggaggaaatagtaaatgagcttcttatgcttcctgcatatctgatttcatcctcttccattccctccttccttatttttttcttctgctagatttctaacgacccaagtccaggatacaacattgaacagatggcaaagcgaggcaagaagctagttgagctgccatacactgtaaaggggatggacgtctcattctcagggatcctgtctttcattgaggatgtagcccatcggatgctggccacaggcgagtgtactcctgaggatctgtgtttctccctgcaggtaatgcagtaaaaaactgggacagaaagttggggctgaaggttttatattgtagagcagaactaatctgggatgcccctctaatattttctccttatctgtccctgacaggaaactgtgtttgcaatgctggtagagatcacagagcgagccatggcacattgtggctcccaggaggccctcattgtgggaggagtggggtgtatgtattattgaaaagtgttcctctttcctattcttaacactatgcgtcttcctcctggtactctaaatcattaagcgtttggagtaggcttcccaatccttgcccctaatcccctatgtcattgttctaagtgagtgcacatgacgtgttctgctggaccatgaagagatggctaaaactaagctaatcctgttccctgcctctttgtaggtaatgtgaggctacaggagatgatggcaacaatgtgccaggaacgtggagcccggctttttgctacagatgagagattctgtattgacaatggagcgatgatagcccaggctggctgggagatgtttcgggctggacacaggaccccactcagtgattctggggttacacagaggtatcggacagatgaagtagaggtgacctggagggactaataagatcaacagaatcagagtagatagttccttaatcggaacccaaaggaccccgtgcctcaatctctatcctgatgtcatgggagtcctagcaaagctatagactccaagcaaggcttggggtcctttatggaaccccaggatgactcagcaataaaatatttttggttttttggtt

SEQ ID NO: 455980 - DNA, 1136 bp, Homo sapiens
  misc_feature (924)..(924): n is a, c, g, or t
  misc_feature (935)..(935): n is a, c, g, or t
  misc_feature (939)..(939): n is a, c, g, or t
  misc_feature (943)..(943): n is a, c, g, or t
  misc_feature (949)..(949): n is a, c, g, or t
  misc_feature (951)..(951): n is a, c, g, or t
  misc_feature (953)..(953): n is a, c, g, or t
  misc_feature (955)..(955): n is a, c, g, or t
  misc_feature (961)..(961): n is a, c, g, or t
  misc_feature (968)..(969): n is a, c, g, or t
  misc_feature (973)..(974): n is a, c, g, or t
  misc_feature (980)..(980): n is a, c, g, or t
aaaaaaaaaaaaaaaaacccaatctttcttgtgtacaaaattgtgcggccgctcgcgatgaactagccagcacattgtgtgacactgacttaagattctaactatgtgcaagagggaaaaaaacagtggagaaggctgggctggaccacgggaaagagataggaaaacggatacgaatgtaaggcacagagttggctcggcgtccctggcagttaggaagacaggtccctggaggggccttggcgggtctccgctcgcgggagttccgcggtgtctttcccagtgctatctgcaggctggccagcttcctctgcgctccggaaagctgcggcccagcgcggactagtgaggacctccacagctcctgacattgccaggagtcctgtcggcgttttctcccagcctccgccatgccggcggtgctgggttttgaaggcagcgccaataagattggcgtgggcgtggtgcgggatggcaaggtgctggcgaacccgcggcggacttacgtcacgcctcctggcacaggattccttccaggtgatacagccaggcatcaccgagctgttatcctagacctgctgcaggaggcactaacagagtctggattaacctcccaggatatcgactgcattgcatacaccaagggccctggcatgggtgccccactggtttctgtggctgttgtggcccgtactgtggcccagctgtggaataagccattggtgggtgtgaaccactgtataggccacattgagatgggccgcctcatcactggagccaccagcccaaccgtgttgtatgtgagtggaggaaatacgcaggtgattgcatactcggaacatcgttaccgtatctttggggaaaccatcgatattgcagtgggtaattgtctggatcgttttgctcgagtgctgaagattctancgaccagtccnggtncacnttgacngntngncagcgnggcaganntggnnggtgcntacctggacgggggggggcctcccaggctgctcctgggggggccctcggtgcccgcgggtcctgggactgtccccgcaccgtggcgcggccacacgccgcattgcccgccttggggggtgtggccccaccccaggcgtaaattggaccgcggtgcc

SEQ ID NO: 455981 - DNA, 704 bp, Homo sapiens
gatacgctagtacgaggctgggttatgaatcggccgagggtgaaggagagtgggcgtctggcggggtccgcagtttcagcagagccgctgcagccatggccccaatcaaggtgggagatgccatcccagcagtggaggtgtttgaaggggagccagggaacaaggtgaacctggcagagctgttcaagggcaagaagggtgtgctgtttggagttcctggggccttcacccctggatgttccaagacacacctgccagggtttgtggagcaggctgaggctctgaaggccaagggagtccaggtggtggcctgtctgagtgttaatgatgcctttgtgactggcgagtggggccgagcccacaaggcggaaggcaaggttcggctcctggctgatcccactggggcctttgggaaggagacagacttattactagatgattcgctggtgtccatctttgggaatcgacgtctcaagaggttctccatggtggtacaggatggcatagtgaaggccctgaatgtggaaccagatggcacaggcctcacctgcagcctggcacccaatatcatctcacagctctgaggccctgggccagattacttcctccacccctccctatctcacctgcccagccctgtgctggggccctgcaattggaatgttggccagatttctgcaataaacacttgtggtttgcggcca

SEQ ID NO: 455982 - DNA, 917 bp, Homo sapiens
ccacgcgtcggacccacgcgtcctggccgtggggcgggtatgggactagctggcgtgtgcgccctgagacgctcagcgggctatatactcgtcggtggggccggcggtcagtctgcggcagcggcagcaagacggtgcagtgaaggagagtgggcgtctggcggggtccgcagtttcagcagagccgctgcagccatggccccaatcaaggtgggagatgccatcccagcagtggaggtgtttgaaggggagccagggaacaaggtgaacctggcagagctgttcaagggcaagaagggtgtgctgtttggagttcctggggccttcacccctggatgttccaagacacacctgccagggtttgtggagcaggctgaggctctgaaggccaagggagtccaggtggtggcctgtctgagtgttaatgatgcctttgtgactggcgagtggggccgagcccacaaggcggaaggcaaggttcggctcctggctgatcccactggggcctttgggaaggagacagacttattactagatgattcgctggtgtccatctttgggaatcgacgtctcaagaggttctccatggtggtacaggatggcatagtgaaggccctgaatgtggaaccagatggcacaggcctcacctgcagcctggcacccaatatcatctcacagctctgaggccctgggccagattacttcctccacccctccctatctcacctgcccagccctgtgctggggccctgcaattggaatgttggccagatttctgcaataaacacttgtggtttgcggccaaaaacagagacaccacagacataagaaacaaaaaggggcggggcataaagaaaccccgagggagccggtaggagagcaccggtgtagtaaaggaggcccaaaggggggtatag

SEQ ID NO: 455983 - DNA, 889 bp, Homo sapiens
cccttcggctaggtacgaggcctcggtgtttactcggcggtgtcgccgctgtgccgctagcggtgccccgcctgctgcggtggcaccagccaggaggcggagtggaagtggccgtggggcgggtatgggactagctggcgtgtgcgccctgagacgctcagcgggctatatactcgtcggtggggccggcggtcagtctgcggcagcggcagcaagacggtgcagtgaaggagagtgggcgtctggcggggtccgcagtttcagcagagccgctgcagccatggccccaatcaaggtgggagatgccatcccagcagtggaggtgtttgaaggggagccagggaacaaggtgaacctggcagagctgttcaagggcaagaagggtgtgctgtttggagttcctggggccttcacccctggatgttccaagacacacctgccagggtttgtggagcaggctgaggctctgaaggccaagggagtccaggtggtggcctgtctgagtgttaatgatgcctttgtgactggcgagtggggccgagcccacaaggcggaaggcaaggttcggctcctggctgatcccactggggcctttgggaaggagacagacttattactagatgattcgctggtgtccatctttgggaatcgacgtctcaagaggttctccatggtggtacaggatggcatagtgaaggccctgaatgtggaaccagatggcacaggcctcacctgcagcctggcacccaatatcatctcacagctctgaggccctgggccagattacttcctccacccctccctatctcacctgcccagccctgtgctggggccctgcaattggaatgttggccagatttctgcaataaacacttgtggtttgcggcca

SEQ ID NO: 455984 - DNA, 1483 bp, Homo sapiens
  misc_feature (1483)..(1483): n is a, c, g, or t
tcgcgcctgcgcagtggaggcggccaggcccgccttccgcagggtgtcgccgctgtgccgctagcggtgccccgcctgctgcggtggcaccagccaggaggcggagtggaagtggccgtggggcgggtatgggactagctggcgtgtgcgccctgagacgctcagcgggctatatactcgtcggtggggccggcggtcagtctgcggcagcggcagcaagacggtgcagtgaaggagagtgggcgtctggcggggtccgcagtttcagcagagccgctgcagccatggccccaatcaaggtgggagatgccatcccagcagtggaggtgtttgaaggggagccagggaacaaggtgaacctggcagagctgttcaagggcaagaagggtgtgctgtttggagttcctggggccttcacccctggatgttccaagacacacctgccagggtttgtggagcaggctgaggctctgaaggccaagggagtccaggtggtggcctgtctgagtgttaatgatgcctttgtgactggcgagtggggccgagcccacaaggcggaaggcaaggttcggctcctggctgatcccactggggcctttgggaaggagacagacttattactagatgattcgctggtgtccatctttgggaatcgacgtctcaagaggttctccatggtggtacaggatggcatagtgaaggccctgaatgtggaaccagatggcacaggcctcacctgcagcctggcacccaatatcatctcacagctctgaggccctgggccagattacttcctccacccctccctatctcacctgcccagccctgtgctggggccctgcaattggaatgttggccagatttctgcaataaacacttgtggtttgcggccaaaaaaaaaaaaaaaaaaaaaaaaaaaaaaaaaaaaaaaaacaaaaaaaaaaaaaacaaaaaaaaaaaaaacacagagcaacaacacaaaatacaacaaacaaaggcgagaggggcggcgctccccaaaagaaacatcccacagccggggggacacaacaggagaaaagcctgagcaccgacggattcatttaccaacacagaggagtcgacaccatcatggggaactgcacctttaacaaccagaaacaagcacgcgcgcagaggaattactaaaccaaacgctccgcgtaagagcgtaagaacaaaccgaacagcctgcggccaaaccatcagggggagagcacaaaacaccaacccacacagggacgccgagcacacacaacgtaggcgatgcacacacaccaccccccaacagagcacatgacgagcacggtgccgccgcggcatccaacacctaacaacccacctcaaccagcatgcacataccgagtggcctccgcaacacacgacgtgcatatcagatcacagctgcagagacagaaaaaagaggcaagaaaggcgcaagatagctacaagacacaccctcccn

SEQ ID NO: 455985 - DNA, 1031 bp, Homo sapiens
  misc_feature (915)..(915): n is a, c, g, or t
tcgcgcctgcgcagtggaggcggccaggcccgccttccgcagggtgtcgccgctgtgccgctagcggtgccccgcctgctgcggtggcaccagccaggaggcggagtggaagtggccgtggggcgggtatgggactagctggcgtgtgcgccctgagacgctcagcgggctatatactcgtcggtggggccggcggtcagtctgcggcagcggcagcaagacggtgcagtgaaggagagtgggcgtctggcggggtccgcagtttcagcagagccgctgcagccatggccccaatcaaggtgggagatgccatcccagcagtggaggtgtttgaaggggagccagggaacaaggtgaacctggcagagctgttcaagggcaagaagggtgtgctgtttggagttcctggggccttcacccctggatgttccaagacacacctgccagggtttgtggagcaggctgaggctctgaaggccaagggagtccaggtggtggcctgtctgagtgttaatgatgcctttgtgactggcgagtggggccgagcccacaaggcggaaggcaaggttcggctcctggctgatcccactggggcctttgggaaggagacagacttattactagatgattcgctggtgtccatctttgggaatcgacgtctcaagaggttctccatggtggtacaggatggcatagtgaaggccctgaatgtggaaccagatggcacaggcctcacctgcagcctggcacccaatatcatctcacagctctgaggccctgggccagattacttcctccacccctccctatctcacctgcccagccctgtgctggggccctgcaattggaatgttggccagatttctgcaataaacacttgtggtttgcggccaggggcaaaaaaaaaaaaaaatnatatacgaaagcacagaataagtataaatagcaaggggggaaaatagaaaaagagagagaaaataaaaaaggggtggtaaaaggagagtgaatgggagagataaagaaagagaata

SEQ ID NO: 455986 - DNA, 1006 bp, Homo sapiens
tcgcgcctgcgcagtggaggcggccaggcccgccttccgcagggtgtcgccgctgtgccgctagcggtgccccgcctgctgcggtggcaccagccaggaggcggagtggaagtggccgtggggcgggtatgggactagctggcgtgtgcgccctgagacgctcagcgggctatatactcgtcggtggggccggcggtcagtctgcggcagcggcagcaagacggtgcagtgaaggagagtgggcgtctggcggggtccgcagtttcagcagagccgctgcagccatggccccaatcaaggtgggagatgccatcccagcagtggaggtgtttgaaggggagccagggaacaaggtgaacctggcagagctgttcaagggcaagaagggtgtgctgtttggagttcctggggccttcacccctggatgttccaagacacacctgccagggtttgtggagcaggctgaggctctgaaggccaagggagtccaggtggtggcctgtctgagtgttaatgatgcctttgtgactggcgagtggggccgagcccacaaggcggaaggcaaggttcggctcctggctgatcccactggggcctttgggaaggagacagacttattactagatgattcgctggtgtccatctttgggaatcgacgtctcaagaggttctccatggtggtacaggatggcatagtgaaggccctgaatgtggaaccagatggcacaggcctcacctgcagcctggcacccaatatcatctcacagctctgaggccctgggccagattacttcctccacccctccctatctcacctgcccagccctgtgctggggccctgcaattggaatgttggccagatttctgcaataaacacttgtggtttgcggccaaaaacagagacaccacagacataagaaacaaaaaggggcggggcataaagaaaccccgagggagccggtaggagagcaccggtgtagtaaaggaggcccaaaggggggtatag

SEQ ID NO: 455987 - DNA, 960 bp, Homo sapiens
tcgcgcctgcgcagtggaggcggccaggcccgccttccgcagggtgtcgccgctgtgccgctagcggtgccccgcctgctgcggtggcaccagccaggaggcggagtggaagtggccgtggggcgggtatgggactagctggcgtgtgcgccctgagacgctcagcgggctatatactcgtcggtggggccggcggtcagtctgcggcagcggcagcaagacggtgcagtgaaggagagtgggcgtctggcggggtccgcagtttcagcagagccgctgcagccatggccccaatcaaggtgggagatgccatcccagcagtggaggtgtttgaaggggagccagggaacaaggtgaacctggcagagctgttcaagggcaagaagggtgtgctgtttggagttcctggggccttcacccctggatgttccaagacacacctgccagggtttgtggagcaggctgaggctctgaaggccaagggagtccaggtggtggcctgtctgagtgttaatgatgcctttgtgactggcgagtggggccgagcccacaaggcggaaggcaaggttcggctcctggctgatcccactggggcctttgggaaggagacagacttattactagatgattcgctggtgtccatctttgggaatcgacgtctcaagaggttctccatggtggtacaggatggcatagtgaaggccctgaatgtggaaccagatggcacaggcctcacctgcagcctggcacccaatatcatctcacagctctgaggccctgggccagattacttcctccacccctccctatctcacctgcccagccctgtgctggggccctgcaattggaatgttggccagatttctgcaataaacacttgtggtttgcggccacatatataagaatatattcgtttcttacgacagtaaacataaatgtgaattatctgcgtattcgtat

SEQ ID NO: 455988 - DNA, 944 bp, Homo sapiens
tcgcgcctgcgcagtggaggcggccaggcccgccttccgcagggtgtcgccgctgtgccgctagcggtgccccgcctgctgcggtggcaccagccaggaggcggagtggaagtggccgtggggcgggtatgggactagctggcgtgtgcgccctgagacgctcagcgggctatatactcgtcggtggggccggcggtcagtctgcggcagcggcagcaagacggtgcagtgaaggagagtgggcgtctggcggggtccgcagtttcagcagagccgctgcagccatggccccaatcaaggtgggagatgccatcccagcagtggaggtgtttgaaggggagccagggaacaaggtgaacctggcagagctgttcaagggcaagaagggtgtgctgtttggagttcctggggccttcacccctggatgttccaagacacacctgccagggtttgtggagcaggctgaggctctgaaggccaagggagtccaggtggtggcctgtctgagtgttaatgatgcctttgtgactggcgagtggggccgagcccacaaggcggaaggcaaggttcggctcctggctgatcccactggggcctttgggaaggagacagacttattactagatgattcgctggtgtccatctttgggaatcgacgtctcaagaggttctccatggtggtacaggatggcatagtgaaggccctgaatgtggaaccagatggcacaggcctcacctgcagcctggcacccaatatcatctcacagctctgaggccctgggccagattacttcctccacccctccctatctcacctgcccagccctgtgctggggccctgcaattggaatgttggccagatttctgcaataaacacttgtggtttgcggccaaaaaaaaaagtcgacgcggccgcgaatttagtagtagtagtaggcggccgc

SEQ ID NO: 455989 - DNA, 624 bp, Homo sapiens
ggaacctggcccttttcgagaacaccggcggtgggagatgccatcccagcagtggaggtgtttgaaggggagccagggaacaaggtgaacctggcagagctgttcaagggcaagaagggtgtgctgtttggagttcctggggccttcacccctggatgttccaagacacacctgccagggtttgtggagcaggctgaggctctgaaggccaagggagtccaggtggtggcctgtctgagtgttaatgatgcctttgtgactggcgagtggggccgagcccacaaggcggaaggcaaggttcggctcctggctgatcccactggggcctttgggaaggagacagacttattactagatgattcgctggtgtccatctttgggaatcgacgtctcaagaggttctccatggtggtacaggatggcatagtgaaggccctgaatgtggaaccagatggcacaggcctcacctgcagcctggcacccaatatcatctcacagctctgaggccctgggccagattacttcctccacccctccctatctcacctgcccagccctgtgctggggccctgcaattggaatgttggccagatttctgcaataaacacttgtggtttgcggcca

SEQ ID NO: 455990 - DNA, 1531 bp, Homo sapiens
  misc_feature (1531)..(1531): n is a, c, g, or t
tcgcgcctgcgcagtggaggcggccaggcccgccttccgcagggtgtcgccgctgtgccgctagcggtgccccgcctgctgcggtggcaccagccaggaggcggagtggaagtggccgtggggcgggtatgggactagctggcgtgtgcgccctgagacgctcagcgggctatatactcgtcggtggggccggcggtcagtctgcggcagcggcagcaagacggtgcagtgaaggagagtgggcgtctggcggggtccgcagtttcagcagagccgctgcagccatggccccaatcaaggtgggagatgccatcccagcagtggaggtgtttgaaggggagccagggaacaaggtgaacctggcagagctgttcaagggcaagaagggtgtgctgtttggagttcctggggccttcacccctggatgttccaagacacacctgccagggtttgtggagcaggctgaggctctgaaggccaagggagtccaggtggtggcctgtctgagtgttaatgatgcctttgtgactggcgagtggggccgagcccacaaggcggaaggcaaggttcggctcctggctgatcccactggggcctttgggaaggagacagacttattactagatgattcgctggtgtccatctttgggaatcgacgtctcaagagcctccaagcccaagctgatgcagctgcctgggcccctctttccggcaggttctccatggtggtacaggatggcatagtgaaggccctgaatgtggaaccagatggcacaggcctcacctgcagcctggcacccaatatcatctcacagctctgaggccctgggccagattacttcctccacccctccctatctcacctgcccagccctgtgctggggccctgcaattggaatgttggccagatttctgcaataaacacttgtggtttgcggccaaaaaaaaaaaaaaaaaaaaaaaaaaaaaaaaaaaaaaaaacaaaaaaaaaaaaaacaaaaaaaaaaaaaacacagagcaacaacacaaaatacaacaaacaaaggcgagaggggcggcgctccccaaaagaaacatcccacagccggggggacacaacaggagaaaagcctgagcaccgacggattcatttaccaacacagaggagtcgacaccatcatggggaactgcacctttaacaaccagaaacaagcacgcgcgcagaggaattactaaaccaaacgctccgcgtaagagcgtaagaacaaaccgaacagcctgcggccaaaccatcagggggagagcacaaaacaccaacccacacagggacgccgagcacacacaacgtaggcgatgcacacacaccaccccccaacagagcacatgacgagcacggtgccgccgcggcatccaacacctaacaacccacctcaaccagcatgcacataccgagtggcctccgcaacacacgacgtgcatatcagatcacagctgcagagacagaaaaaagaggcaagaaaggcgcaagatagctacaagacacaccctcccn

SEQ ID NO: 455991 - DNA, 843 bp, Homo sapiens
tcgcgcctgcgcagtggaggcggccaggcccgccttccgcagggtgtcgccgctgtgccgctagcggtgccccgcctgctgcggtggcaccagccaggaggcggagtggaagtggccgtggggcgggtatgggactagctggcgtgtgcgccctgagacgctcagcgggctatatactcgtcggtggggccggcggtcagtctgcggcagcggcagcaagacggtgcagtgaaggagagtgggcgtctggcggggtccgcagtttcagcagagccgctgcagccatggccccaatcaaggtgggagatgccatcccagcagtggaggtgtttgaaggggagccagggaacaaggtgaacctggcagagctgttcaagggcaagaagggtgtgctgtttggagttcctggggccttcacccctggatgttccaagacacacctgccagggtttgtggagcaggctgaggctctgaaggccaagggagtccaggtggtggcctgtctgagtgttaatgatgcctttgtgactggcgagtggggccgagcccacaaggcggaaggcaaggttcggctcctggctgatcccactggggcctttgggaaggagacagacttattactagatgattcgctggtgtccatctttgggaatcgacgtctcaagagcagatggcacaggcctcacctgcagcctggcacccaatatcatctcacagctctgaggccctgggccagattacttcctccacccctccctatctcacctgcccagccctgtgctggggccctgcaattggaatgttggccagatttctgcaataaacacttgtggtttgcggcca

SEQ ID NO: 455992 - DNA, 626 bp, Homo sapiens
tcgcgcctgcgcagtggaggcggccaggcccgccttccgcagggtgtcgccgctgtgccgctagcggtgccccgcctgctgcggtggcaccagccaggaggcggagtggaagtggccgtggggcgggtatgggactagctggcgtgtgcgccctgagacgctcagcgggctatatactcgtcggtggggccggcggtcagtctgcggcagcggcagcaagacggtgcagtgaaggagagtgggcgtctggcggggtccgcagtttcagcagagccgctgcagccatggccccaatcaaggttcggctcctggctgatcccactggggcctttgggaaggagacagacttattactagatgattcgctggtgtccatctttgggaatcgacgtctcaagaggttctccatggtggtacaggatggcatagtgaaggccctgaatgtggaaccagatggcacaggcctcacctgcagcctggcacccaatatcatctcacagctctgaggccctgggccagattacttcctccacccctccctatctcacctgcccagccctgtgctggggccctgcaattggaatgttggccagatttctgcaataaacacttgtggtttgcggcca

SEQ ID NO: 455993 - DNA, 761 bp, Homo sapiens
tcgcgcctgcgcagtggaggcggccaggcccgccttccgcagggtgtcgccgctgtgccgctagcggtgccccgcctgctgcggtggcaccagccaggaggcggagtggaagtggccgtggggcgggtatgggactagctggcgtgtgcgccctgagacgctcagcgggctatatactcgtcggtggggccggcggtcagtctgcggcagcggcagcaagacggtgcagtgaaggagagtgggcgtctggcggggtccgcagtttcagcagagccgctgcagccatggccccaatcaaggtgggagatgccatcccagcagtggaggtgtttgaaggggagccagggaacaaggtgaacctggcagagctgttcaagggcaagaagggtgtgctgtttggagttcctggggccttcacccctggatgttccaaggttcggctcctggctgatcccactggggcctttgggaaggagacagacttattactagatgattcgctggtgtccatctttgggaatcgacgtctcaagaggttctccatggtggtacaggatggcatagtgaaggccctgaatgtggaaccagatggcacaggcctcacctgcagcctggcacccaatatcatctcacagctctgaggccctgggccagattacttcctccacccctccctatctcacctgcccagccctgtgctggggccctgcaattggaatgttggccagatttctgcaataaacacttgtggtttgcggcca

SEQ ID NO: 455994 - DNA, 923 bp, Homo sapiens
gggaaaccttccctccctttctctgttgtcaccaatggccccttaagaggagcagggccaccttgaaacttggaggatatggggtaacccagtgggagcgggcagggagggcccttggaaactgacagggctggagtatcctgctgggtttcagccccggttcctgcaggcacagctgccaggctctctgttcaccttcctgcctctggtttgccccggctccctcaccccccttaccctggagtccttccttctaggtgggagatgccatcccagcagtggaggtgtttgaaggggagccagggaacaaggtgaacctggcagagctgttcaagggcaagaagggtgtgctgtttggagttcctggggccttcacccctggatgttccaagacacacctgccagggtttgtggagcaggctgaggctctgaaggccaagggagtccaggtggtggcctgtctgagtgttaatgatgcctttgtgactggcgagtggggccgagcccacaaggcggaaggcaaggtgaggtgaggggcctgcagggagtcaggaccaggtaggatattcttcttgtgacctttactttctctgcaggttcggctcctggctgatcccactggggcctttgggaaggagacagacttattactagatgattcgctggtgtccatctttgggaatcgacgtctcaagaggttctccatggtggtacaggatggcatagtgaaggccctgaatgtggaaccagatggcacaggcctcacctgcagcctggcacccaatatcatctcacagctctgaggccctgggccagattacttcctccacccctccctatctcacctgcccagccctgtgctggggccctgcaattggaatgttggccagatttctgcaataaacacttgtggtttgcggcca

SEQ ID NO: 455995 - DNA, 677 bp, Homo sapiens
tcgcgcctgcgcagtggaggcggccaggcccgccttccgcagggtgtcgccgctgtgccgctagcggtgccccgcctgctgcggtggcaccagccaggaggcggagtggaagtggccgtggggcgggtatgggactagctggcgtgtgcgccctgagacgctcagcgggctatatactcgtcggtggggccggcggtcagtctgcggcagcggcagcaagacggtgcagtgaaggagagtgggcgtctggcggggtccgcagtttcagcagagccgctgcagccatggccccaatcaaggttcggctcctggctgatcccactggggcctttgggaaggagacagacttattactagatgattcgctggtgtccatctttgggaatcgacgtctcaagaggttctccatggtggtacaggatggcatagtgaaggccctgaatgtggaaccagatggcacaggcctcacctgcagcctggcacccaatatcatctcacagctctgaggccctgggccagattacttcctccacccctccctatctcacctgcccagccctgtgctggggccctgcaattggaatgttggccagatttctgcaataaacacttgtggtttgcggccaaaaaaaaaagtcgacgcggccgcgaatttagtagtagtagtaggcggccgc

SEQ ID NO: 455996 - DNA, 893 bp, Homo sapiens
tcgcgcctgcgcagtggaggcggccaggcccgccttccgcagggtgtcgccgctgtgccgctagcggtgccccgcctgctgcggtggcaccagccaggaggcggagtggaagtggccgtggggcgggtatgggactagctggcgtgtgcgccctgagacgctcagcgggctatatactcgtcggtggggccggcggtcagtctgcggcagcggcagcaagacggtgcagtgaaggagagtgggcgtctggcggggtccgcagtttcagcagagccgctgcagccatggccccaatcaaggtgggagatgccatcccagcagtggaggtgtttgaaggggagccagggaacaaggtgaacctggcagagctgttcaagggcaagaagggtgtgctgtttggagttcctggggccttcacccctggatgttccaagacacacctgccagggtttgtggagcaggctgaggctctgaaggccaagggagtccaggtggtggcctgtctgagtgttaatgatgcctttgtgactggcgagtggggccgagcccacaaggcggaaggcaaggttcggctcctggctgatcccactggggcctttgggaaggagacagacttattactagatgattcgctggtgtccatctttgggaatcgacgtctcaagaggttctccatggtggtacaggatggcatagtgaaggccctgaatgtggaaccagatggcacaggcctcacctgcagcctggcacccaatatcatctcacagctctgaggccctgggccagattacttcctccacccctccctatctcacctgcccagccctgtgctggggccctgcaattggaatgttggccagatttctgcaataaacacttgtggtttgcggcca

SEQ ID NO: 455997 - DNA, 923 bp, Homo sapiens
  misc_feature (923)..(923): n is a, c, g, or t
attcgctggtgtccatcttgggaatcatctagtaataaggtctgtctccttcccaaaggccccagtgggaaggagacagacttattactagatgattcgctggtgtccatctttgggaatcgacgtctcaagaggttctccatggtggtacaggatggcatagtgaaggccctgaatgtggaaccagatggcacaggcctcacctgcagcctggcacccaatatcatctcacagctctgaggccctgggccagattacttcctccacccctccctatctcacctgcccagccctgtgctggggccctgcaattggaatgttggccagatttctgcaataaacacttgtggtttgcggccaaaaaaaaaaaaaacaaaaaaaaaaaaaacaaaaaaaaaaaaaacacagagcaacaacacaaaatacaacaaacaaaggcgagaggggcggcgctccccaaaagaaacatcccacagccggggggacacaacaggagaaaagcctgagcaccgacggattcatttaccaacacagaggagtcgacaccatcatggggaactgcacctttaacaaccagaaacaagcacgcgcgcagaggaattactaaaccaaacgctccgcgtaagagcgtaagaacaaaccgaacagcctgcggccaaaccatcagggggagagcacaaaacaccaacccacacagggacgccgagcacacacaacgtaggcgatgcacacacaccaccccccaacagagcacatgacgagcacggtgccgccgcggcatccaacacctaacaacccacctcaaccagcatgcacataccgagtggcctccgcaacacacgacgtgcatatcagatcacagctgcagagacagaaaaaagaggcaagaaaggcgcaagatagctacaagacacaccctcccn

SEQ ID NO: 455998 - DNA, 1023 bp, Homo sapiens
tcgcgcctgcgcagtggaggcggccaggcccgccttccgcagggtgtcgccgctgtgccgctagcggtgccccgcctgctgcggtggcaccagccaggaggcggagtggaagtggccgtggggcgggtatgggactagctggcgtgtgcgccctgagacgctcagcgggctatatactcgtcggtggggccggcggtcagtctgcggcagcggcagcaagacggtgcagtgaaggagagtgggcgtctggcggggtccgcagtttcagcagagccgctgcagccatggccccaatcaaggtgggagatgccatcccagcagtggaggtgtttgaaggggagccagggaacaaggtgaacctggcagagctgttcaagggcaagaagggtgtgctgtttggagttcctggggccttcacccctggatgttccaagacacacctgccagggtttgtggagcaggctgaggctctgaaggccaagggagtccaggtggtggcctgtctgagtgttaatgatgcctttgtgactggcgagtggggccgagcccacaaggcggaaggcaaggttcggctcctggctgatcccactggggcctttgggaaggagacagacttattactagatgattcgctggtgtccatctttgggaatcgacgtctcaagaggttctccatggtggtacaggatggcatagtgaaggccctgaatgtggaaccagatggcacaggcctcacctgcagcctggcacccaatatcatctcacagctctgaggccctgggccagattacttcctccacccctccctatctcacctgcccagccctgtgctggggccctgcaattggaatgttggccagatttctgcaataaacacttgtggtttgcggccaaaaaaaaaaaaaaaaaaaaaaaaaaaactgggggtttttttggtggggaaaaagggttttgagggctggctattttgtccgccctttttgtaaggggaatgggggcccaaaggggcgtttataaagagtt

SEQ ID NO: 455999 - DNA, 915 bp, Homo sapiens
tcgcgcctgcgcagtggaggcggccaggcccgccttccgcagggtgtcgccgctgtgccgctagcggtgccccgcctgctgcggtggcaccagccaggaggcggagtggaagtggccgtggggcgggtatgggactagctggcgtgtgcgccctgagacgctcagcgggctatatactcgtcggtggggccggcggtcagtctgcggcagcggcagcaagacggtgcagtgaaggagagtgggcgtctggcggggtccgcagtttcagcagagccgctgcagccatggccccaatcaaggtgggagatgccatcccagcagtggaggtgtttgaaggggagccagggaacaaggtgaacctggcagagctgttcaagggcaagaagggtgtgctgtttggagttcctggggccttcacccctggatgttccaagacacacctgccagggtttgtggagcaggctgaggctctgaaggccaagggagtccaggtggtggcctgtctgagtgttaatgatgcctttgtgactggcgagtggggccgagcccacaaggcggaaggcaaggttcggctcctggctgatcccactggggcctttgggaaggagacagacttattactagatgattcgctggtgtccatctttgggaatcgacgtctcaagaggttctccatggtggtacaggatggcatagtgaaggccctgaatgtggaaccagatggcacaggcctcacctgcagcctggcacccaatatcatctcacagctctgaggccctgggccagattacttcctccacccctccctatctcacctgcccagccctgtgctggggccctgcaattggaatgttggccagatttctgcaataaacacttgtggtttgcggccacatctccttggttatgaatggc

SEQ ID NO: 456000 - DNA, 1456 bp, Homo sapiens
  misc_feature (1456)..(1456): n is a, c, g, or t
tcgcgcctgcgcagtggaggcggccaggcccgccttccgcagggtgtcgccgctgtgccgctagcggtgccccgcctgctgcggtggcaccagccaggaggcggagtggaagtggccgtggggcgggtatgggactagctggcgtgtgcgccctgagacgctcagcgggctatatactcgtcggtggggccggcggtcagtctgcggcagcggcagcaagacggtgcagtgaaggagagtgggcgtctggcggggtccgcagtttcagcagagccgctgcagccatggccccaatcaaggtgggagatgccatcccagcagtggaggtgtttgaaggggagccagggaacaaggtgaacctggcagagctgttcaagggcaagaagggtgtgctgtttggagttcctggggccttcacccctggatgttccaagacacacctgccagggtttgtggagcaggctgaggctctgaaggccaagggagtccaggtggtggcctgtctgagtgttaatgatgcctttgtgactggcgagtggggccgagcccacaaggcggaaggcaaggttcggctcctggctgatcccactggggcctttgggaaggagacagacttattactagatgattcgctggtgtccatctttgggaatcgacgtctcaagaggttctccatggtggtacaggatggcatagtgaaggccctgaatgtggaaccagatggcacaggcctcacctgcagcctggcacccaatatcatctcacagctctgaggccctgggccagattacttcctccacccctccctatctcacctgcccagccctgtgctggggccctgcaattggaatgttggccagatttctgcaataaacacttgtggtttgcggccaaaaaaaaaaaaaacaaaaaaaaaaaaaacaaaaaaaaaaaaaacacagagcaacaacacaaaatacaacaaacaaaggcgagaggggcggcgctccccaaaagaaacatcccacagccggggggacacaacaggagaaaagcctgagcaccgacggattcatttaccaacacagaggagtcgacaccatcatggggaactgcacctttaacaaccagaaacaagcacgcgcgcagaggaattactaaaccaaacgctccgcgtaagagcgtaagaacaaaccgaacagcctgcggccaaaccatcagggggagagcacaaaacaccaacccacacagggacgccgagcacacacaacgtaggcgatgcacacacaccaccccccaacagagcacatgacgagcacggtgccgccgcggcatccaacacctaacaacccacctcaaccagcatgcacataccgagtggcctccgcaacacacgacgtgcatatcagatcacagctgcagagacagaaaaaagaggcaagaaaggcgcaagatagctacaagacacaccctcccn

SEQ ID NO: 456001 - DNA, 1076 bp, Homo sapiens
cccttcggctaggtacgaggcctcggtgtttactcggcggtgtcgccgctgtgccgctagcggtgccccgcctgctgcggtggcaccagccaggaggcggagtggaagtggccgtggggcgggtatgggactagctggcgtgtgcgccctgagacgctcagcgggctatatactcgtcggtggggccggcggtcagtctgcggcagcggcagcaagacggtgcagtgaaggagagtgggcgtctggcggggtccgcagtttcagcagagccgctgcagccatggccccaatcaaggctggagtgcagtgacgcaatctctgctcactgcagcctccgcctcccgggttcaagcgattctactgcctcagcctcctgagtagctgggactacagatgcgagccaccacgcccagctattgtatttttagtagagacgggatttcaccccgttgttcagattggtctcgaactcctgacctcaggtgggagatgccatcccagcagtggaggtgtttgaaggggagccagggaacaaggtgaacctggcagagctgttcaagggcaagaagggtgtgctgtttggagttcctggggccttcacccctggatgttccaagacacacctgccagggtttgtggagcaggctgaggctctgaaggccaagggagtccaggtggtggcctgtctgagtgttaatgatgcctttgtgactggcgagtggggccgagcccacaaggcggaaggcaaggttcggctcctggctgatcccactggggcctttgggaaggagacagacttattactagatgattcgctggtgtccatctttgggaatcgacgtctcaagaggttctccatggtggtacaggatggcatagtgaaggccctgaatgtggaaccagatggcacaggcctcacctgcagcctggcacccaatatcatctcacagctctgaggccctgggccagattacttcctccacccctccctatctcacctgcccagccctgtgctggggccctgcaattggaatgttggccagatttctgcaataaacacttgtggtttgcggcca

SEQ ID NO: 456002 - DNA, 481 bp, Homo sapiens
accctttgttccccttcctcagacacacctgccagggtttgtggagcaggctgaggctctgaaggccaagggagtccaggtggtggcctgtctgagtgttaatgatgcctttgtgactggcgagtggggccgagcccacaaggcggaaggcaaggttcggctcctggctgatcccactggggcctttgggaaggagacagacttattactagatgattcgctggtgtccatctttgggaatcgacgtctcaagaggttctccatggtggtacaggatggcatagtgaaggccctgaatgtggaaccagatggcacaggcctcacctgcagcctggcacccaatatcatctcacagctctgaggccctgggccagattacttcctccacccctccctatctcacctgcccagccctgtgctggggccctgcaattggaatgttggccagatttctgcaataaacacttgtggtttgcggcca

SEQ ID NO: 456003 - DNA, 2001 bp, Homo sapiens
  misc_feature (2001)..(2001): n is a, c, g, or t
tcgcgcctgcgcagtggaggcggccaggcccgccttccgcagggtgtcgccgctgtgccgctagcggtgccccgcctgctgcggtggcaccagccaggaggcggagtggaagtggccgtggggcgggtatgggactagctggcgtgtgcgccctgagacgctcagcgggctatatactcgtcggtggggccggcggtcagtctgcggcagcggcagcaagacggtgcagtgaaggagagtgggcgtctggcggggtccgcagtttcagcagagccgctgcagccatggccccaatcaaggtgggagatgccatcccagcagtggaggtgtttgaaggggagccagggaacaaggtgaacctggcagagctgttcaagggcaagaagggtgtgctgtttggagttcctggggccttcacccctggatgttccaagacacacctgccagggtttgtggagcaggctgaggctctgaaggccaagggagtccaggtggtggcctgtctgagtgttaatgatgcctttgtgactggcgagtggggccgagcccacaaggcggaaggcaaggttcggctcctggctgatcccactggggcctttgggaaggagacagacttattactagatgattcgctggtgtccatctttgggaatcgacgtctcaagagggtaaaagtggagagtcctctgtggagagagtcctctgtgggagagagtcctctgtgggagagagtcctctgtggagagggtcctctgtgggaagagtcgtctgtgggggagagtcctctgtgtgggagagtcgtctgtggggagagtcctgtgtggggagagtcctctgtggagagagtcctctgtgggggagagtcctgtgtgggggagagtcctctgtggggagagtcctctgtgtggagagagtcctgtgtgggagagagtcctgtgtggggagagtcttctgtaggggagagtcctctggggagagagtcctgtgtgggggagagttctctgtggggagagtcctctgtgtggagagagtcctgtgtggtggtgagtcctctgtgggggagagtcctctgtggggggagtcctctctggagttctcttgggcccctggctgttcactgcctgtctccatgcccagcctccaagcccaagctgatgcagctgcctgggcccctctttccggcaggttctccatggtggtacaggatggcatagtgaaggccctgaatgtggaaccagatggcacaggcctcacctgcagcctggcacccaatatcatctcacagctctgaggccctgggccagattacttcctccacccctccctatctcacctgcccagccctgtgctggggccctgcaattggaatgttggccagatttctgcaataaacacttgtggtttgcggccaaaaaaaaaaaaaaaaaaaaaaaaaaaaaaaaaaaaaaaaacaaaaaaaaaaaaaacaaaaaaaaaaaaaacacagagcaacaacacaaaatacaacaaacaaaggcgagaggggcggcgctccccaaaagaaacatcccacagccggggggacacaacaggagaaaagcctgagcaccgacggattcatttaccaacacagaggagtcgacaccatcatggggaactgcacctttaacaaccagaaacaagcacgcgcgcagaggaattactaaaccaaacgctccgcgtaagagcgtaagaacaaaccgaacagcctgcggccaaaccatcagggggagagcacaaaacaccaacccacacagggacgccgagcacacacaacgtaggcgatgcacacacaccaccccccaacagagcacatgacgagcacggtgccgccgcggcatccaacacctaacaacccacctcaaccagcatgcacataccgagtggcctccgcaacacacgacgtgcatatcagatcacagctgcagagacagaaaaaagaggcaagaaaggcgcaagatagctacaagacacaccctcccn

SEQ ID NO: 456004 - DNA, 966 bp, Homo sapiens
  misc_feature (772)..(772): n is a, c, g, or t
tcgcgcctgcgcagtggaggcggccaggcccgccttccgcagggtgtcgccgctgtgccgctagcggtgccccgcctgctgcggtggcaccagccaggaggcggagtggaagtggccgtggggcgggtatgggactagctggcgtgtgcgccctgagacgctcagcgggctatatactcgtcggtggggccggcggtcagtctgcggcagcggcagcaagacggtgcagtgaaggagagtgggcgtctggcggggtccgcagtttcagcagagccgctgcagccatggccccaatcaaggtgggagatgccatcccagcagtggaggtgtttgaaggggagccagggaacaaggtgaacctggcagagctgttcaagggcaagaagggtgtgctgtttggagttcctggggccttcacccctggatgttccaaggttcggctcctggctgatcccactggggcctttgggaaggagacagacttattactagatgattcgctggtgtccatctttgggaatcgacgtctcaagaggttctccatggtggtacaggatggcatagtgaaggccctgaatgtggaaccagatggcacaggcctcacctgcagcctggcacccaatatcatctcacagctctgaggccctgggccagattacttcctccacccctccctatctcacctgcccagccctgtgctggggccctgcaattggaatgttggccagatttctgcaataaacacttgtggtttgcggccaaaaaaaaaaanaaaacaacactcctccatcccacccccccacacacacccctcaccccccccccccgcctcacccgcccacgcctcgcaccgccccccccggctggcgccccccccccccacccgggccacccccacccccaccgcccgccgcggctcctcccccccgcccccccccccgctctgcacccccccctcccagcgcc

SEQ ID NO: 456005 - DNA, 741 bp, Homo sapiens
  misc_feature (448)..(448): n is a, c, g, or t
  misc_feature (461)..(461): n is a, c, g, or t
  misc_feature (479)..(479): n is a, c, g, or t
  misc_feature (503)..(503): n is a, c, g, or t
  misc_feature (521)..(521): n is a, c, g, or t
  misc_feature (525)..(526): n is a, c, g, or t
  misc_feature (534)..(534): n is a, c, g, or t
  misc_feature (543)..(543): n is a, c, g, or t
  misc_feature (546)..(546): n is a, c, g, or t
  misc_feature (548)..(548): n is a, c, g, or t
  misc_feature (554)..(554): n is a, c, g, or t
  misc_feature (566)..(566): n is a, c, g, or t
  misc_feature (572)..(572): n is a, c, g, or t
  misc_feature (578)..(578): n is a, c, g, or t
  misc_feature (603)..(603): n is a, c, g, or t
  misc_feature (610)..(610): n is a, c, g, or t
  misc_feature (618)..(618): n is a, c, g, or t
  misc_feature (643)..(643): n is a, c, g, or t
  misc_feature (646)..(646): n is a, c, g, or t
  misc_feature (651)..(651): n is a, c, g, or t
  misc_feature (654)..(654): n is a, c, g, or t
  misc_feature (658)..(659): n is a, c, g, or t
  misc_feature (663)..(663): n is a, c, g, or t
  misc_feature (669)..(671): n is a, c, g, or t
  misc_feature (674)..(675): n is a, c, g, or t
  misc_feature (678)..(678): n is a, c, g, or t
  misc_feature (681)..(681): n is a, c, g, or t
  misc_feature (684)..(685): n is a, c, g, or t
  misc_feature (689)..(689): n is a, c, g, or t
  misc_feature (691)..(691): n is a, c, g, or t
  misc_feature (695)..(695): n is a, c, g, or t
  misc_feature (710)..(710): n is a, c, g, or t
  misc_feature (723)..(724): n is a, c, g, or t
tcgcgcctgcgcagtggaggcggccaggcccgccttccgcagggtgtcgccgctgtgccgctagcggtgccccgcctgctgcggtggcaccagccaggaggcggagtggaagtggccgtggggcgggtatgggactagctggcgtgtgcgccctgagacgctcagcgggctatatactcgtcggtggggccggcggtcagtctgcggcagcggcagcaagacggtgcagtgaaggagagtgggcgtctggcggggtccgcagtttcagcagagccgctgcagccatggccccaatcaaggtgggagatgccatcccagcagtggaggtgtttgaaggggagccagggaacaaggtgaacctggcagagctgttcaagggcaagaagggtgtgctgtttggagttcctggggccttcacccctggatgttccaagacacacctggccangggtttgtgggancaaggctgaaggctctgnaaggccaaagggagttccaaggtnggttggccctgtctagantgtnnaaagaatngcctttgtngantnggcganattggggccgancccacnaaggcngggaacggccaagggtccggctccnggggctngatcccantggggggccttttgggaaaggaganaanacttnttntctnngatntgctcnnntgnnggnganatnngggngngtgngatgatgtgatatgngtgtgatgtgtgnntatgatgatgatgatga

SEQ ID NO: 456006 - DNA, 6196 bp, Homo sapiens
  misc_feature (174)..(174): n is a, c, g, or t
  misc_feature (1714)..(1714): n is a, c, g, or t
  misc_feature (1724)..(1724): n is a, c, g, or t
  misc_feature (4328)..(4328): n is a, c, g, or t
  misc_feature (4360)..(4360): n is a, c, g, or t
tgtccatgtatactattgattagctcccacttgcaaatgagaacacgtggtatttgattttcttttctgggttagttcacttaggatgatggtctccagctccatgttgctgcaaaggacatgatttcgttctttttttatggctgcctcttttgtttcttaaatctgaatttncatgtggcttcaatgctagtctggcctaccctttccttcccaaagtcaccaccaactcactcccacccccacctcatgcagtgcacccctcacagcccccacccttggcagtgacatttggatttccagggcctttcctgatcctttagagacatcctctcccggccaagtcctgcaagggagacttgagtcagaggttcgatgggctggggtgaggtgggccacacaattaccacacccactcccaggcctattcccggtgatctaagcacacagaagcaggctggtacttagggaagaaggcaccagtgtatgccagagcttaggatggcgtgaggaccaaatggaaagatagatattgtaagtggttgttgggagaaggaaggctggaggtgggggtactttgtgggctgcttccaggagctcccacccacaggcacaagtcttcctagctggcagaagaagccaggaacaaggctgaattctgacagaacccgcctggagctccatttcagttgcagagacctttatcttatgcagctgtcttttgcccagcctcctctgcagatgccataggacctcctctttcttttcttttctttctttttttttgagactgagtcttgctctatgaccagactggaatgcagtggcacaatctcagctcactgcaacctccgcctcccgggttcaggcgattctcctccctcagcctcccaaatagctgggattataggcatgcgccaccatgcccagctaatttttgtatttttagtagagacagggtttcactgtgttggccaggatggtctccatctcttgacctcgtgattcacctgcctcggcctcccaaagtgctgggattacaggcatgacccaccgtgccctgccaggacttcctctttctttttttttttttctttttttttttgagacggagtttcactcttgttgcccaggctgaagtgcaatggcacgatctcggctcaccgcaacctccgcctcccaggttcaagcgattctcctgcctcagcacccccgagaagctgggattacaggcacgcaccaccacgcccggctaattttgtatttttagtagagatgaggtttcttcatgttagtcaggctggtctcgaactcccgacctcaggtgatccgcccacctcggcctcccaaagtgctgggattacaggcatgagccaccgcgccctgccaggacctcctctttctgatataacacctgcatttgtttggcagacatctgtgtagttctgttcacaggagaaaaaagtcagattactaaacaccagtgtttaacagtggccatcagtaggtggtagcttcagagagtatttgctttcttatcgactatggtttcatgtattctctgttttgttttttactataagcatattttgtttttatataagggagaaataaagctcttctcaattgggagaaattactgcctgcctataatgaatgaggccctgctgggcactggctgggggcttgatgagtaggatatggtccctgtttntggagggtcntcaaactaaagaggaaagaagataggggaacaaaacagtgcggttggtgttctaagtatcctctgatcacagaagagaaagctgcccctacccagggacatgatcctgagccacctggattgtgagggagaatcaggcattgatgaggaggggaatgaggaagtagtctgcctacaggggacatagctcggcacagctccacagagctaggggctgcaacttggggcatgagaagagagagcagcaagagaaccatttgagaaggctgtcctttctctgtcatcactcctgatgccctggtgagctccacggtgcaggaacctccatgtgtgtgctgcatccccaagttctggtggcagcaggtgcttagcagcccttgtccagtctcgcctgtgacactgctgctcccttcccctgtcctgacctcctggttggctgtcctgccagagccttgcctggaagatgaaattccagctaccctgtgggagcagtaacgccttcttccttcttctcaatctccagaaatgtcaaatgtctttcctccaggacccaagtttcttcaccatggggatgtggtccattggtgcaggagccctgggggctgctgccttggcattgctgcttgccaacacagacgtgtttctgtccaagccccagaaagcggccctggagtacctggaggatatagacctgaaaacactggagaagggtaagtggtgacccttcaggtctcagtacttttccaaggagctgggatacaggcttactgctttctttctaaactctctcctttttttaattgaaaagataatataacaacattaggaaaaatttaataacaatttttaaactaggaataattctgttaccctaacacagtaattttgattttggcatattcctttccatgtgtacatattacgtagttgtgcttggcttaggtgctgttttacattttagcttttcttatcaaaagcatttctcattctctgttgttgtctctgtaattataatgataaattgctccataatatttagtaataattacaatcttttactaaaccagtgcttccagagtgtattctgaggaattccaggcttgtgggatcgtcaaactaaaaggagttcctgagtgaacaagtatgggagacaccttttatccaattccatgctcctgatgctcagcacagacatatgcttattagaatgaggtgtctggattgctgctgattcaggcatggccagcccctccctgtgaagaagctgtggtgtctgaggaatcacttcaaggtcacccgttagagcagacctgcctatctccctcttctgggggactgctagaatccattgtggacagcttagagccacacacccaaatgtgttagctctgcctccttgctgtgtgctctcagtgttagagctgtagcttggtgggatttcagtcatgccagtggtgtggcaagagagttggagtggtgaaggtctcattgatggcgtggtcaccatgttagccccccaggtggaagtcatcgtcatctgtttagtaagtaaggaagcttgcgaaaggaaggcaggagattgtgcaggtttatagtaggtcaccttagtaagatactaggagagagagagacctgttaagctttgttcaacccagggtttcccaatcttatttgattacagactcttctccccaccctctcacccacctgaccccattttttttttttccacataacatctacgggaacatggatccctctgggaaatactaaaataattaagggctcatatttattgagccctcaccaactctatattaccagacattgtggtgagcacttttatattcatctttcaatatgccctgtggcccaaagtggagctactagatatttgcattttacaaatgaggaagctgaggttcaaagagcaaaaataacttgcccagagttacacagctagattcagattcagttggaccttagagctgggcttgttgaactacagtactgtactaccccaaagcattttattcctaggcatcttctatcctctccttcgttaataatattgcaggtaacatatttaggttaaaaatttgagactttttcagtttgggccatgtttctgttctgaaggattattatacaatatctgatgacatcagcaatagacaaaatggccatttttccagaaatgtcccacttctgaatgttcaggttagaaaaaagattttcatggtgggagggacctaccgggtatataacaggattcttaagcttggttaactttcttcaggaaggtgtgtattctgtctgtctgtgtttcctgtgtgtcttttcccacgtgtgaaatgcctgtccaggtcctctactaggccgggtctctgaccttggctggacttagtgtggttcatgagctgcttagtgattggggctgggctgggaggagatatcgaatttctttttttcctctcttagaaccaaggactttcaaagcaaaggagctatgggaaaaaaatggagctgtgattatggccgtgcggaggccaggctgtttcctctgtcgagaggtgagtgcagatgaggatctattcagagaaanggatcctggcaagtaggggccattgttttccngccagaaccaagggtcggtaagccagctttagccttttacccacatgttctgttctgttatttgctctaggtatttcttttgatttgtgctcttttttttttttttttttaaacaactcaccctctcctactggggttagcaacacatctcagtttcccttagtactcccaggcctttcaccctgtgctgtaccttctgagtcctggaccatattccaatttaatcaggggcagtgaccaggtccaattccatgcttctgatgctcagcacagatatatgatgtgcctggattgcttctgattcgggtgtggtcagtccctccctgtgatgaagctgcagtgtcggaggaaacacttcaaggttacctattagagcagacctgcctgtctctctttccttggggagctcttagagtccatcgtggacagctgagagccacattctcacatgttagctctgcctccttgctgtgtgctctcagcattgaatctgtagctcagtgggatttcagtcatgccagtagtgcatttggcatgagagtttgttgaaagttggagctcactgactgggtggtctccaggttggcccctcgaagggaagacatcatctatttgtaggtgatggagcttatcagtggaaggaaggaactgtgattgttgaaacacaaaatgctagtgtgagaaggaacattgccactacttggatctagccttgtccctttataggtaggcaaactgaggaccagagtggttagtggtctgtttgtggtcacacagccagtcagtggcagaagacccagattctgaaattactgccctgcctgggagaaaactgggaatgacagtattcctgctcttgagacaactttgcatctcaagcagtggctgtggccctgtccaaattgtcatcctcattctcctggttcccctccctgaccctgagacaccacctttcagccttgctgatctctccatgcttgtgtggctgggctggtgaagaatccacttgcactgctggatgcatgtgatgcctgcagtaccctacccccagggcactgtgtgcctgctatctcagtgggtcctcaccatagcccttggaaatacagcttgttttactctcattttattattctcattacagaggaggaaacagttacagaggttgtaacaaagccacccggatcggggagatgtattaattttctgttgctgtaacaaattacctcaaactcaatggctttaaccagcacagatttatcttgtagttctagaggtcagaattccaaagcggaatctggttgcattccttctgaagactataggggagaatccatttcttttgccttttccagctgttagaggccacctatgtatattggtttatggccccttcctctatttttaggtcagcaatggctggcaagtcagcaacagcatggaagcctgttttgacttgatttctcggggccattaaaatccagaaggttccaagagcaacagctctccctaattataacctgtttccctctgtactggtctgtgcccacatagaacatttagtggaaacttacgtttccaaaaagatgggtggatggcaatctgagttattttgagtggcccaactaggaggtatgtgactcagtttccacgtcatggctttgtatagtgccacaccaggagtaaagagccaggaaaagtgagtaagacctttcatctcagccaggtgcagtggctcatgcctataatcccagcactttgggaggctgaggtgagaagatcacttgagcccaggaatttgagaccaccctaggcaacatagcgagaccctgtctctac

SEQ ID NO: 456007 - DNA, 684 bp, Homo sapiens
cgagttatttcccataatgcacccaaaggtggaaacactccctttaaaaaggtcccgccatccaatttggaaaaccaacttttccagcattccgaaaaccttacctggagccaggatgcccctgatcatctctgataactttaaaaggaaggcctcagaagcagccccagaagcaaaagtttctctctgaccttctcctgccctcttgtttctggcttttcattctcccccaaggctacccatagaaactagaatccctcttccccaaggcaggtcatcagaaaccagaaccggttttacccaaagccagccataaaacctaaaaatagtcctctcactccccattcccctttctgtgtaaaaactggttggaaagaaatgatctgacctaccgtgtttgactgtcgtaagatacccattccagagagggtcccaccccgtgcccagaaggaaggaatcctgcacagagaggccaagaagaatctagacagccttgctgggtttcccctctcagtctattactattagatcatacccttcttgtccaatcatatttctacacagtccataatctgttgaacctaaacataaaaatggacaattcccctgtatcttggggtcttcattctgagggctcacatacaattatgatcaaataaatttgtttgctttttctcctgttaa

SEQ ID NO: 456008 - DNA, 512 bp, Homo sapiens
gtcgcccaggctggagtgcagtggcgcgatctcggctcactgcaacctccgaggctgaggcaggagaatcacttgaacctgggaggtggaggttgcggtgagctgagatcacaccactgtattccagcctgggtgactgagactctaactaaaaaaaaaaaaaaaaaaaaattgattgctgtgcctcattacaaatgcatatgatgtttgagtgctgttgtttgaaattatttttcttttcgggtcttcaaaaattcaagaaaagttgatgattgacttgaagattacaaaatttaaggttttttggcatgtgtgttttctattaataattggttatatgatgtcaaagtaatactttcataatagaattgacatgctctgggatagtttgacaaaggtaaattataaagtgaaatctcttgtttcattatcttccattctaacctcagagatctgtttctctagaaaaaatgtccatctctggctttaataaaattatgcatcagaaatca

SEQ ID NO: 456009 - DNA, 461 bp, Homo sapiens
tttttgaggcagagtttcactcttgttgcccagggtggaggttgcggtgagctgagatcacaccactgtattccagcctgggtgactgagactctaactaaaaaaaaaaaaaaaaaaaaattgattgctgtgcctcattacaaatgcatatgatgtttgagtgctgttgtttgaaattatttttcttttcgggtcttcaaaaattcaagaaaagttgatgattgacttgaagattacaaaatttaaggttttttggcatgtgtgttttctattaataattggttatatgatgtcaaagtaatactttcataatagaattgacatgctctgggatagtttgacaaaggtaaattataaagtgaaatctcttgtttcattatcttccattctaacctcagagatctgtttctctagaaaaaatgtccatctctggctttaataaaattatgcatcagaaatca

SEQ ID NO: 456010 - DNA, 602 bp, Homo sapiens
agataactttggggtatcttgtgtcttagtgcattttttttcactgtatgagaagaaagtggcttccagtttcttagaagactaaagaaaaatgagggtctctcttttagatggtcattcagtgccttccaaagtctaacctctgagctccacttccacacctttgggcctttctgtgttagcttcatttttttctcttcacctggtatgttcttttacctgcatctctacttgtagacatcctggttaccctccgtgcctctgtgaggccttccctgattgcccttgaaggctccctggttctctgagataaactggctgaagcttttgactttgggatttagttggtgggtgagattgacatctcggtctggcttcatttcatagaaacgacacatattggctatttcctttgctgcagggaatcccagcttctcgaaagcttccggggtaatcaaggatagaggcagagccagaatttgcctccttcccgtactgcctctggtttgtcgtgtttattccagaattagccaggccagccttcttgatgcctcctctgtctatacataggcatgttccctcaaggaccaactcaagcccac

SEQ ID NO: 456011 - DNA, 5759 bp, Homo sapiens
  misc_feature (4245)..(4245): n is a, c, g, or t
  misc_feature (4354)..(4354): n is a, c, g, or t
  misc_feature (4366)..(4366): n is a, c, g, or t
tggatatacttctttgtcaagagaagcagaggtgtggacgctgtgtatgaaatgtctttcctccaggacccaagtttcttcaccatggggatgtggtccattggtgcaggagccctgggggctgctgccttggcattgctgcttgccaacacagacgtgtttctgtccaagccccagaaagcggccctggagtacctggaggatatagacctgaaaacactggagaaggaaccaaggactttcaaagcaaaggagctatgggaaaaaaatggagctgtgattatggccgtgcggaggccaggctgtttcctctgtcgagaggaagctgcggatctgtcctccctgaaaagcatgttggaccagctgggcgtccccctctatgcagtggtaaaggagcacatcaggactgaagtgaaggatttccagccttatttcaaaggagaaatcttcctggatgaaaagaaaaagttctatggtccacaaaggcggaagatgatgtttatgggatttatccgtctgggagtgtggtacaacttcttccgagcctggaacggaggcttctctggaaacctggaaggagaaggcttcatccttgggggagttttcgtggtgggatcaggaaagcagggcattcttcttgagcaccgagaaaaagaatttggagacaaagtaaacctactttctgttctggaagctgctaagatgatcaaaccacagactttggcctcagagaaaaaatgattgtgtgaaactgcccagctcagggataaccagggacattcacctgtgttcatgggatgtattgtttccactcgtgtccctaaggagtgagaaacccatttatactctactctcagtatggattattaatgtattttaatattctgtttaggcccactaaggcaaaatagccccaaaacaagactgacaaaaatctgaaaaactaatgaggattattaagctaaaacctgggaaataggaggcttaaaattgactgccaggctgggtgcagtggctcacacctgtaatcccagcactttgggaggccaaggtgagcaagtcacttgaggtcgggagttcgagaccagcctgagcaacatggcgaaaccccgtctctactaaaaatacaaaaatcacccgggtgtggtggcaggcacctgtagtcccagctacccgggaggctgaggcaggagaatcacttgaacctgggaggtggaggttgcggtgagctgagatcacaccactgtattccagcctgggtgactgagactctaactaaaaaaaaaaaaaaaaaaaaattgattgctgtgcctcattacaaatgcatatgatgtttgagtgctgttgtttgaaattatttttcttttcgggtcttcaaaaattcaagaaaagttgatgattgacttgaagattacaaaatttaaggttttttggcatgtgtgttttctattaataattggttatatgatgtcaaagtaatactttcataatagaattgacatgctctgggatagtttgacaaaggtaaattataaagtgaaatctcttgtttcattatcttccattctaacctcagagatctgtttctctagaaaaaatgtccatctctggctttaataaaattatgcatcagaaatcacctgtatgtataagattttctgataaaactaataattatatttaccatataattggctgaaagtaaaaaaagtcagcattctccatggctgaggggtaaagtgcctcgggggattcctctggttctagctatctaagtggtttgaaaatgaccaggaaaaattcatcctgtcattcacgttagtaattttgctgtctttcctagaggaatgactttggtgtttaaaattggtagctgtttttctattggtcttttagcctaatttggcaaatcagaagaaaggacatagagatgatgaaatataactttatcttttttgtttgaattttgtcgtgtaagtttgagtgacatcatcaagacctaccagggagctcggccacagggagtctactcaaggcatcaaactggcccaggagtagaaaggtgggggtggaaataggaaatagtgtttacccaggggactggcccagccaggaggagaaaggaatcagtgtttacccaggaaagcaagaatggatactgatgttggaggtaaagctgggaaagtaggagagcatcgggattgagtatgcagagtgagttagggttgagtggttcgggactaagacccactaagaccatgcctgcacctgacttcatgtagcagtggttgcatggggtatgcatgggcccttaaagggctgggcttctgcagcatttgaggccatagcctttggtacttgcacagggttggtacctgtcatccttgggactccagctactgataggataactcagtacctaaacttagaactttaatacctaagacacttgatggtgaaacagttctcttgcaactaaagaagaacctgaggtcaggtgtggtggctcacgcctgtaatcctagcactttgggaagtcgaggtagaaggatcacttgaggtcaggagttcgagaccagcctggccagcatggtgaaaccccatctctactaaaaatacaaaatattagacagacggggtggtacatgcctgtaatcccagctacttgggaggctgaggcaggagaatcgcttgaacccaggaggcagaggttgcagtgagccgagatcgtgccactgcactccagcttgggcaacaagagcgaaactccatatcaaaaaaaaaaacctgagaggacattgcaccaatggagatgcatcaagagaaacatgtttggttttttgtgagctctcaccaacttttttcccctgggtcctcacgtgcagtgtggtcttctctttctgattagcatgtcattttggaaagagcactggattgagtcatgaggcataatcaatttctagtttaccagtgtgatcttaagcaaagatctaactcattggcaaaatgggcgtgattccttcccattcagggctgtttatgataagtcactgagggaatgataaatattatgacactgcttctcagactgtaatgtacatgcacatcacataaggaccttattaaaatggagacttaaaaagctggacgctaaaggcaataatgacagattttactcaataactactgcagaaggagagagtcctcagtatagaactgagcttagctccaatctgtgcagaggtgatggaattttaaagaggggagggaggaggttcaaatagaactagggaagtgcaaaattacaaaaagctggtaaggagattggtcaatgtgattcggctatctgtgtctactaactctcaaatttatttatcaaagttaggatcctagcctcccacagagaccaggagtcggccttatcattcctgataattatatgacaaagggatggctcccagaaaaagtgagaaacacattcctgtgcagcagaagatacatatatcccccaaagggacagaaaggatttacaattgtaaattttataaagtatgtcctctaagaagagggagggactgggtgccatggctcatgcctataatcccagcactttgggtggccaaggtgggtgcatcacctgaggtcaggagttcaagagcagcctggccaacatggtgaaaccctgtctctactaaaaatacaaaagttagcctgttgtggtggcgcgcacctgtaatcccagctactcgggtggctgaggcaggagaatcgcttgaacccaggaggcggagggtgcagtgagccgggatcacgccactgcacttcagcctgggtgacagagtgtgactccatctcaagaaaaacgagggagattagaaacctatgatcaggcattggctgaaacaaatggtaaattcttttggcagccttgagcttccccaggcagggacccaaaggggcctgggttatccctgagacagggccttgagctgctagaaactatgctagtgtttgttcaagtctctccgtgtccggggtgagcaaaattgtttgtgctgaaaatcaatgatttgcagctctcaagattccagtgggcagtctgggtgggcctgagtttctgctttttttttttctttatgtacagggtcttgctctgtcacctaggctagagtgtaattagtggccccagtcatggctcactgcagctgcaaactggctgcaagctgttctggctcagcctaccangttactgggcttacaggtggatgccaccgtacccaacagattttatttttgtagggatgggggtctccctgtattgcccaggctggtctcaaactcctggcctcccaangtgtttagattncaggtgtaagccaccacacgtggccagcctctgcatttctaacaggttccaggtgatcttgatgttctgctggtccatgggtcacactttgagaagcatggttctaaaggactatacagattaaagtcattaatctctgtgggctttggacttgaagtttcagcagcctttgacaagcatttgcaggtttcctttttatttatttgataaactgagaatccacatgcaaagaaatgcaagaaaattcaaagaacgtaagaaaatgtccttgctgtaaagctggtggttctcaatctcggatacacagtagaatcacctggtgcgggggttgggggcggggtgcagtgtaaaaattattaaatcagaatctctggggtaggccccaagcaacttttttttttttttttttagatagaatcttgcttgtcacctaggctaggagtgcagtggtgcaatcatggctcactgccgccttaacttctgggctcaagtgatatcctcccgacctcagcctccctagtagctgggactacaggcgtggactaccacacccaacaaatttttaaattttttgtagaggcaagctcttatactatcttgcacaggctggtctcgaactcctgggctcaagcagtcatcctgcctcagccttccaaagctcagggattacagacatgagccacagcaccaggccaacaatatttcttaaagctcctggagtgattccaatatgcagccaaggttgaaaaccaccctttaaaaggctcggcatccagtgtggaagaccagcacactcacgtcaggagaccttacctggagccaggatgcccctgatcatctctgataactttaaaaggaaggcctcagaagcagccccagaagcaaaagtttctctctgaccttctcctgccctcttgtttctggcttttcattctcccccaaggctacccatagaaactagaatccctcttccccaaggcaggtcatcagaaaccagaaccggttttacccaaagccagccataaaacctaaaaatagtcctctcactccccattcccctttctgtgtaaaaactggttggaaagaaatgatctgacctaccgtgtttgactgtcgtaagatacccattccagagagggtcccaccccgtgcccagaaggaaggaatcctgcacagagaggccaagaagaatctagacagccttgctgggtttcccctctcagtctattactattagatcatacccttcttgtccaatcatatttctacacagtccataatctgttgaacctaaacataaaaatggacaattcccctgtatcttggggtcttcattctgagggctcacatacaattatgatcaaataaatttgtttgctttttctcctgttaa

SEQ ID NO: 456012 - DNA, 4455 bp, Homo sapiens
agcggacatggcggtggcgcggtagcgcgcgatgcagcacaggctagaggctgcgcaagcgcggggcccgcccctgggaccctccgggccgggcggtttggccccttagcgcccgggcgtcggggcggtaaaaggccggcagaagggaggcacttgagaaatgtctttcctccaggacccaagtttcttcaccatggggatgtggtccattggtgcaggagccctgggggctgctgccttggcattgctgcttgccaacacagacgtgtttctgtccaagccccagaaagcggccctggagtacctggaggatatagacctgaaaacactggagaaggaaccaaggactttcaaagcaaaggagctatgggaaaaaaatggagctgtgattatggccgtgcggaggccaggctgtttcctctgtcgagaggaagctgcggatctgtcctccctgaaaagcatgttggaccagctgggcgtccccctctatgcagtggtaaaggagcacatcaggactgaagtgaaggatttccagccttatttcaaaggagaaatcttcctggatgaaaagaaaaagttctatggtccacaaaggcggaagatgatgtttatgggatttatccgtctgggagtgtggtacaacttcttccgagcctggaacggaggcttctctggaaacctggaaggagaaggcttcatccttgggggagttttcgtggtgggatcaggaaagcagggcattcttcttgagcaccgagaaaaagaatttggagacaaagtaaacctactttctgttctggaagctgctaagatgatcaaaccacagactttggcctcagagaaaaaatgattgtgtgaaactgcccagctcagggataaccagggacattcacctgtgttcatgggatgtattgtttccactcgtgtccctaaggagtgagaaacccatttatactctactctcagtatggattattaatgtattttaatattctgtttaggcccactaaggcaaaatagccccaaaacaagactgacaaaaatctgaaaaactaatgaggattattaagctaaaacctgggaaataggaggcttaaaattgactgccaggctgggtgcagtggctcacacctgtaatcccagcactttgggaggccaaggtgagcaagtcacttgaggtcgggagttcgagaccagcctgagcaacatggcgaaaccccgtctctactaaaaatacaaaaatcacccgggtgtggtggcaggcacctgtagtcccagctacccgggaggctgaggcaggagaatcacttgaacctgggaggtggaggttgcggtgagctgagatcacaccactgtattccagcctgggtgactgagactctaactaaaaaaaaaaaaaaaaaaaaattgattgctgtgcctcattacaaatgcatatgatgtttgagtgctgttgtttgaaattatttttcttttcgggtcttcaaaaattcaagaaaagttgatgattgacttgaagattacaaaatttaaggttttttggcatgtgtgttttctattaataattggttatatgatgtcaaagtaatactttcataatagaattgacatgctctgggatagtttgacaaaggtaaattataaagtgaaatctcttgtttcattatcttccattctaacctcagagatctgtttctctagaaaaaatgtccatctctggctttaataaaattatgcatcagaaatcacctgtatgtataagattttctgataaaactaataattatatttaccatataattggctgaaagtaaaaaaagtcagcattctccatggctgaggggtaaagtgcctcgggggattcctctggttctagctatctaagtggtttgaaaatgaccaggaaaaattcatcctgtcattcacgttagtaattttgctgtctttcctagaggaatgactttggtgtttaaaattggtagctgtttttctattggtcttttagcctaatttggcaaatcagaagaaaggacatagagatgatgaaatataactttatcttttttgtttgaattttgtcgtgtaagtttgagtgacatcatcaagacctaccagggagctcggccacagggagtctactcaaggcatcaaactggcccaggagtagaaaggtgggggtggaaataggaaatagtgtttacccaggggactggcccagccaggaggagaaaggaatcagtgtttacccaggaaagcaagaatggatactgatgttggaggtaaagctgggaaagtaggagagcatcgggattgagtatgcagagtgagttagggttgagtggttcgggactaagacccactaagaccatgcctgcacctgacttcatgtagcagtggttgcatggggtatgcatgggcccttaaagggctgggcttctgcagcatttgaggccatagcctttggtacttgcacagggttggtacctgtcatccttgggactccagctactgataggataactcagtacctaaacttagaactttaatacctaagacacttgatggtgaaacagttctcttgcaactaaagaagaacctgaggtcaggtgtggtggctcacgcctgtaatcctagcactttgggaagtcgaggtagaaggatcacttgaggtcaggagttcgagaccagcctggccagcatggtgaaaccccatctctactaaaaatacaaaatattagacagacggggtggtacatgcctgtaatcccagctacttgggaggctgaggcaggagaatcgcttgaacccaggaggcagaggttgcagtgagccgagatcgtgccactgcactccagcttgggcaacaagagcgaaactccatatcaaaaaaaaaaacctgagaggacattgcaccaatggagatgcatcaagagaaacatgtttggttttttgtgagctctcaccaacttttttcccctgggtcctcacgtgcagtgtggtcttctctttctgattagcatgtcattttggaaagagcactggattgagtcatgaggcataatcaatttctagtttaccagtgtgatcttaagcaaagatctaactcattggcaaaatgggcgtgattccttcccattcagggctgtttatgataagtcactgagggaatgataaatattatgacactgcttctcagactgtaatgtacatgcacatcacataaggaccttattaaaatggagacttaaaaagctggacgctaaaggcaataatgacagattttactcaataactactgcagaaggagagagtcctcagtatagaactgagcttagctccaatctgtgcagaggtgatggaattttaaagaggggagggaggaggttcaaatagaactagggaagtgcaaaattacaaaaagctggtaaggagattggtcaatgtgattcggctatctgtgtctactaactctcaaatttatttatcaaagttaggatcctagcctcccacagagaccaggagtcggccttatcattcctgataattatatgacaaagggatggctcccagaaaaagtgagaaacacattcctgtgcagcagaagatacatatatcccccaaagggacagaaaggatttacaattgtaaattttataaagtatgtcctctaagaagagggagggactgggtgccatggctcatgcctataatcccagcactttgggtggccaaggtgggtgcatcacctgaggtcaggagttcaagagcagcctggccaacatggtgaaaccctgtctctactaaaaatacaaaagttagcctgttgtggtggcgcgcacctgtaatcccagctactcgggtggctgaggcaggagaatcgcttgaacccaggaggcggagggtgcagtgagccgggatcacgccactgcacttcagcctgggtgacagagtgtgactccatctcaagaaaaacgagggagattagaaacctatgatcaggcattggctgaaacaaatggtaaattcttttggcagccttgagcttccccaggcagggacccaaaggggcctgggttatccctgagacagggccttgagctgctagaaactatgctagtgtttgttcaagtctctccgtgtccggggtgagcaaaattgtttgtgctgaaaatcaatgatttgcagctctcaagattccagtgggcagtctgggtgggcctgagtttctgctttttttttttctttatgtacagagtgtgactccatctcaagaaaaacgagggagattagaaacctatgatcatacccttcttgtccaatcatatttctacacagtccataatctgttgaacctaaacataaaaatggacaattcccctgtatcttggggtcttcattctgagggctcacatacaattatgatcaaataaatttgtttgctttttctcctgttaa

SEQ ID NO: 456013 - DNA, 5758 bp, Homo sapiens
  misc_feature (4244)..(4244): n is a, c, g, or t
  misc_feature (4353)..(4353): n is a, c, g, or t
  misc_feature (4365)..(4365): n is a, c, g, or t
gctatggatcgaggcgtgggtgaattggccgaggggacgctgtgtatgaaatgtctttcctccaggacccaagtttcttcaccatggggatgtggtccattggtgcaggagccctgggggctgctgccttggcattgctgcttgccaacacagacgtgtttctgtccaagccccagaaagcggccctggagtacctggaggatatagacctgaaaacactggagaaggaaccaaggactttcaaagcaaaggagctatgggaaaaaaatggagctgtgattatggccgtgcggaggccaggctgtttcctctgtcgagaggaagctgcggatctgtcctccctgaaaagcatgttggaccagctgggcgtccccctctatgcagtggtaaaggagcacatcaggactgaagtgaaggatttccagccttatttcaaaggagaaatcttcctggatgaaaagaaaaagttctatggtccacaaaggcggaagatgatgtttatgggatttatccgtctgggagtgtggtacaacttcttccgagcctggaacggaggcttctctggaaacctggaaggagaaggcttcatccttgggggagttttcgtggtgggatcaggaaagcagggcattcttcttgagcaccgagaaaaagaatttggagacaaagtaaacctactttctgttctggaagctgctaagatgatcaaaccacagactttggcctcagagaaaaaatgattgtgtgaaactgcccagctcagggataaccagggacattcacctgtgttcatgggatgtattgtttccactcgtgtccctaaggagtgagaaacccatttatactctactctcagtatggattattaatgtattttaatattctgtttaggcccactaaggcaaaatagccccaaaacaagactgacaaaaatctgaaaaactaatgaggattattaagctaaaacctgggaaataggaggcttaaaattgactgccaggctgggtgcagtggctcacacctgtaatcccagcactttgggaggccaaggtgagcaagtcacttgaggtcgggagttcgagaccagcctgagcaacatggcgaaaccccgtctctactaaaaatacaaaaatcacccgggtgtggtggcaggcacctgtagtcccagctacccgggaggctgaggcaggagaatcacttgaacctgggaggtggaggttgcggtgagctgagatcacaccactgtattccagcctgggtgactgagactctaactaaaaaaaaaaaaaaaaaaaaattgattgctgtgcctcattacaaatgcatatgatgtttgagtgctgttgtttgaaattatttttcttttcgggtcttcaaaaattcaagaaaagttgatgattgacttgaagattacaaaatttaaggttttttggcatgtgtgttttctattaataattggttatatgatgtcaaagtaatactttcataatagaattgacatgctctgggatagtttgacaaaggtaaattataaagtgaaatctcttgtttcattatcttccattctaacctcagagatctgtttctctagaaaaaatgtccatctctggctttaataaaattatgcatcagaaatcacctgtatgtataagattttctgataaaactaataattatatttaccatataattggctgaaagtaaaaaaagtcagcattctccatggctgaggggtaaagtgcctcgggggattcctctggttctagctatctaagtggtttgaaaatgaccaggaaaaattcatcctgtcattcacgttagtaattttgctgtctttcctagaggaatgactttggtgtttaaaattggtagctgtttttctattggtcttttagcctaatttggcaaatcagaagaaaggacatagagatgatgaaatataactttatcttttttgtttgaattttgtcgtgtaagtttgagtgacatcatcaagacctaccagggagctcggccacagggagtctactcaaggcatcaaactggcccaggagtagaaaggtgggggtggaaataggaaatagtgtttacccaggggactggcccagccaggaggagaaaggaatcagtgtttacccaggaaagcaagaatggatactgatgttggaggtaaagctgggaaagtaggagagcatcgggattgagtatgcagagtgagttagggttgagtggttcgggactaagacccactaagaccatgcctgcacctgacttcatgtagcagtggttgcatggggtatgcatgggcccttaaagggctgggcttctgcagcatttgaggccatagcctttggtacttgcacagggttggtacctgtcatccttgggactccagctactgataggataactcagtacctaaacttagaactttaatacctaagacacttgatggtgaaacagttctcttgcaactaaagaagaacctgaggtcaggtgtggtggctcacgcctgtaatcctagcactttgggaagtcgaggtagaaggatcacttgaggtcaggagttcgagaccagcctggccagcatggtgaaaccccatctctactaaaaatacaaaatattagacagacggggtggtacatgcctgtaatcccagctacttgggaggctgaggcaggagaatcgcttgaacccaggaggcagaggttgcagtgagccgagatcgtgccactgcactccagcttgggcaacaagagcgaaactccatatcaaaaaaaaaaacctgagaggacattgcaccaatggagatgcatcaagagaaacatgtttggttttttgtgagctctcaccaacttttttcccctgggtcctcacgtgcagtgtggtcttctctttctgattagcatgtcattttggaaagagcactggattgagtcatgaggcataatcaatttctagtttaccagtgtgatcttaagcaaagatctaactcattggcaaaatgggcgtgattccttcccattcagggctgtttatgataagtcactgagggaatgataaatattatgacactgcttctcagactgtaatgtacatgcacatcacataaggaccttattaaaatggagacttaaaaagctggacgctaaaggcaataatgacagattttactcaataactactgcagaaggagagagtcctcagtatagaactgagcttagctccaatctgtgcagaggtgatggaattttaaagaggggagggaggaggttcaaatagaactagggaagtgcaaaattacaaaaagctggtaaggagattggtcaatgtgattcggctatctgtgtctactaactctcaaatttatttatcaaagttaggatcctagcctcccacagagaccaggagtcggccttatcattcctgataattatatgacaaagggatggctcccagaaaaagtgagaaacacattcctgtgcagcagaagatacatatatcccccaaagggacagaaaggatttacaattgtaaattttataaagtatgtcctctaagaagagggagggactgggtgccatggctcatgcctataatcccagcactttgggtggccaaggtgggtgcatcacctgaggtcaggagttcaagagcagcctggccaacatggtgaaaccctgtctctactaaaaatacaaaagttagcctgttgtggtggcgcgcacctgtaatcccagctactcgggtggctgaggcaggagaatcgcttgaacccaggaggcggagggtgcagtgagccgggatcacgccactgcacttcagcctgggtgacagagtgtgactccatctcaagaaaaacgagggagattagaaacctatgatcaggcattggctgaaacaaatggtaaattcttttggcagccttgagcttccccaggcagggacccaaaggggcctgggttatccctgagacagggccttgagctgctagaaactatgctagtgtttgttcaagtctctccgtgtccggggtgagcaaaattgtttgtgctgaaaatcaatgatttgcagctctcaagattccagtgggcagtctgggtgggcctgagtttctgctttttttttttctttatgtacagggtcttgctctgtcacctaggctagagtgtaattagtggccccagtcatggctcactgcagctgcaaactggctgcaagctgttctggctcagcctaccangttactgggcttacaggtggatgccaccgtacccaacagattttatttttgtagggatgggggtctccctgtattgcccaggctggtctcaaactcctggcctcccaangtgtttagattncaggtgtaagccaccacacgtggccagcctctgcatttctaacaggttccaggtgatcttgatgttctgctggtccatgggtcacactttgagaagcatggttctaaaggactatacagattaaagtcattaatctctgtgggctttggacttgaagtttcagcagcctttgacaagcatttgcaggtttcctttttatttatttgataaactgagaatccacatgcaaagaaatgcaagaaaattcaaagaacgtaagaaaatgtccttgctgtaaagctggtggttctcaatctcggatacacagtagaatcacctggtgcgggggttgggggcggggtgcagtgtaaaaattattaaatcagaatctctggggtaggccccaagcaacttttttttttttttttttagatagaatcttgcttgtcacctaggctaggagtgcagtggtgcaatcatggctcactgccgccttaacttctgggctcaagtgatatcctcccgacctcagcctccctagtagctgggactacaggcgtggactaccacacccaacaaatttttaaattttttgtagaggcaagctcttatactatcttgcacaggctggtctcgaactcctgggctcaagcagtcatcctgcctcagccttccaaagctcagggattacagacatgagccacagcaccaggccaacaatatttcttaaagctcctggagtgattccaatatgcagccaaggttgaaaaccaccctttaaaaggctcggcatccagtgtggaagaccagcacactcacgtcaggagaccttacctggagccaggatgcccctgatcatctctgataactttaaaaggaaggcctcagaagcagccccagaagcaaaagtttctctctgaccttctcctgccctcttgtttctggcttttcattctcccccaaggctacccatagaaactagaatccctcttccccaaggcaggtcatcagaaaccagaaccggttttacccaaagccagccataaaacctaaaaatagtcctctcactccccattcccctttctgtgtaaaaactggttggaaagaaatgatctgacctaccgtgtttgactgtcgtaagatacccattccagagagggtcccaccccgtgcccagaaggaaggaatcctgcacagagaggccaagaagaatctagacagccttgctgggtttcccctctcagtctattactattagatcatacccttcttgtccaatcatatttctacacagtccataatctgttgaacctaaacataaaaatggacaattcccctgtatcttggggtcttcattctgagggctcacatacaattatgatcaaataaatttgtttgctttttctcctgttaa

SEQ ID NO: 456014 - DNA, 7963 bp, Homo sapiens
  misc_feature (174)..(174): n is a, c, g, or t
  misc_feature (1714)..(1714): n is a, c, g, or t
  misc_feature (1724)..(1724): n is a, c, g, or t
  misc_feature (6449)..(6449): n is a, c, g, or t
  misc_feature (6558)..(6558): n is a, c, g, or t
  misc_feature (6570)..(6570): n is a, c, g, or t
tgtccatgtatactattgattagctcccacttgcaaatgagaacacgtggtatttgattttcttttctgggttagttcacttaggatgatggtctccagctccatgttgctgcaaaggacatgatttcgttctttttttatggctgcctcttttgtttcttaaatctgaatttncatgtggcttcaatgctagtctggcctaccctttccttcccaaagtcaccaccaactcactcccacccccacctcatgcagtgcacccctcacagcccccacccttggcagtgacatttggatttccagggcctttcctgatcctttagagacatcctctcccggccaagtcctgcaagggagacttgagtcagaggttcgatgggctggggtgaggtgggccacacaattaccacacccactcccaggcctattcccggtgatctaagcacacagaagcaggctggtacttagggaagaaggcaccagtgtatgccagagcttaggatggcgtgaggaccaaatggaaagatagatattgtaagtggttgttgggagaaggaaggctggaggtgggggtactttgtgggctgcttccaggagctcccacccacaggcacaagtcttcctagctggcagaagaagccaggaacaaggctgaattctgacagaacccgcctggagctccatttcagttgcagagacctttatcttatgcagctgtcttttgcccagcctcctctgcagatgccataggacctcctctttcttttcttttctttctttttttttgagactgagtcttgctctatgaccagactggaatgcagtggcacaatctcagctcactgcaacctccgcctcccgggttcaggcgattctcctccctcagcctcccaaatagctgggattataggcatgcgccaccatgcccagctaatttttgtatttttagtagagacagggtttcactgtgttggccaggatggtctccatctcttgacctcgtgattcacctgcctcggcctcccaaagtgctgggattacaggcatgacccaccgtgccctgccaggacttcctctttctttttttttttttctttttttttttgagacggagtttcactcttgttgcccaggctgaagtgcaatggcacgatctcggctcaccgcaacctccgcctcccaggttcaagcgattctcctgcctcagcacccccgagaagctgggattacaggcacgcaccaccacgcccggctaattttgtatttttagtagagatgaggtttcttcatgttagtcaggctggtctcgaactcccgacctcaggtgatccgcccacctcggcctcccaaagtgctgggattacaggcatgagccaccgcgccctgccaggacctcctctttctgatataacacctgcatttgtttggcagacatctgtgtagttctgttcacaggagaaaaaagtcagattactaaacaccagtgtttaacagtggccatcagtaggtggtagcttcagagagtatttgctttcttatcgactatggtttcatgtattctctgttttgttttttactataagcatattttgtttttatataagggagaaataaagctcttctcaattgggagaaattactgcctgcctataatgaatgaggccctgctgggcactggctgggggcttgatgagtaggatatggtccctgtttntggagggtcntcaaactaaagaggaaagaagataggggaacaaaacagtgcggttggtgttctaagtatcctctgatcacagaagagaaagctgcccctacccagggacatgatcctgagccacctggattgtgagggagaatcaggcattgatgaggaggggaatgaggaagtagtctgcctacaggggacatagctcggcacagctccacagagctaggggctgcaacttggggcatgagaagagagagcagcaagagaaccatttgagaaggctgtcctttctctgtcatcactcctgatgccctggtgagctccacggtgcaggaacctccatgtgtgtgctgcatccccaagttctggtggcagcaggtgcttagcagcccttgtccagtctcgcctgtgacactgctgctcccttcccctgtcctgacctcctggttggctgtcctgccagagccttgcctggaagatgaaattccagctaccctgtgggagcagtaacgccttcttccttcttctcaatctccagaaatgtcaaatgtctttcctccaggacccaagtttcttcaccatggggatgtggtccattggtgcaggagccctgggggctgctgccttggcattgctgcttgccaacacagacgtgtttctgtccaagccccagaaagcggccctggagtacctggaggatatagacctgaaaacactggagaaggaaccaaggactttcaaagcaaaggagctatgggaaaaaaatggagctgtgattatggccgtgcggaggccaggctgtttcctctgtcgagaggaagctgcggatctgtcctccctgaaaagcatgttggaccagctgggcgtccccctctatgcagtggtaaaggagcacatcaggactgaagtgaaggatttccagccttatttcaaaggagaaatcttcctggatgaaaagaaaaagttctatggtccacaaaggcggaagatgatgtttatgggatttatccgtctgggagtgtggtacaacttcttccgagcctggaacggaggcttctctggaaacctggaaggagaaggcttcatccttgggggagttttcgtggtgggatcaggaaagcagggcattcttcttgagcaccgagaaaaagaatttggagacaaagtaaacctactttctgttctggaagctgctaagatgatcaaaccacagactttggcctcagagaaaaaatgattgtgtgaaactgcccagctcagggataaccagggacattcacctgtgttcatgggatgtattgtttccactcgtgtccctaaggagtgagaaacccatttatactctactctcagtatggattattaatgtattttaatattctgtttaggcccactaaggcaaaatagccccaaaacaagactgacaaaaatctgaaaaactaatgaggattattaagctaaaacctgggaaataggaggcttaaaattgactgccaggctgggtgcagtggctcacacctgtaatcccagcactttgggaggccaaggtgagcaagtcacttgaggtcgggagttcgagaccagcctgagcaacatggcgaaaccccgtctctactaaaaatacaaaaatcacccgggtgtggtggcaggcacctgtagtcccagctacccgggaggctgaggcaggagaatcacttgaacctgggaggtggaggttgcggtgagctgagatcacaccactgtattccagcctgggtgactgagactctaactaaaaaaaaaaaaaaaaaaaaattgattgctgtgcctcattacaaatgcatatgatgtttgagtgctgttgtttgaaattatttttcttttcgggtcttcaaaaattcaagaaaagttgatgattgacttgaagattacaaaatttaaggttttttggcatgtgtgttttctattaataattggttatatgatgtcaaagtaatactttcataatagaattgacatgctctgggatagtttgacaaaggtaaattataaagtgaaatctcttgtttcattatcttccattctaacctcagagatctgtttctctagaaaaaatgtccatctctggctttaataaaattatgcatcagaaatcacctgtatgtataagattttctgataaaactaataattatatttaccatataattggctgaaagtaaaaaaagtcagcattctccatggctgaggggtaaagtgcctcgggggattcctctggttctagctatctaagtggtttgaaaatgaccaggaaaaattcatcctgtcattcacgttagtaattttgctgtctttcctagaggaatgactttggtgtttaaaattggtagctgtttttctattggtcttttagcctaatttggcaaatcagaagaaaggacatagagatgatgaaatataactttatcttttttgtttgaattttgtcgtgtaagtttgagtgacatcatcaagacctaccagggagctcggccacagggagtctactcaaggcatcaaactggcccaggagtagaaaggtgggggtggaaataggaaatagtgtttacccaggggactggcccagccaggaggagaaaggaatcagtgtttacccaggaaagcaagaatggatactgatgttggaggtaaagctgggaaagtaggagagcatcgggattgagtatgcagagtgagttagggttgagtggttcgggactaagacccactaagaccatgcctgcacctgacttcatgtagcagtggttgcatggggtatgcatgggcccttaaagggctgggcttctgcagcatttgaggccatagcctttggtacttgcacagggttggtacctgtcatccttgggactccagctactgataggataactcagtacctaaacttagaactttaatacctaagacacttgatggtgaaacagttctcttgcaactaaagaagaacctgaggtcaggtgtggtggctcacgcctgtaatcctagcactttgggaagtcgaggtagaaggatcacttgaggtcaggagttcgagaccagcctggccagcatggtgaaaccccatctctactaaaaatacaaaatattagacagacggggtggtacatgcctgtaatcccagctacttgggaggctgaggcaggagaatcgcttgaacccaggaggcagaggttgcagtgagccgagatcgtgccactgcactccagcttgggcaacaagagcgaaactccatatcaaaaaaaaaaacctgagaggacattgcaccaatggagatgcatcaagagaaacatgtttggttttttgtgagctctcaccaacttttttcccctgggtcctcacgtgcagtgtggtcttctctttctgattagcatgtcattttggaaagagcactggattgagtcatgaggcataatcaatttctagtttaccagtgtgatcttaagcaaagatctaactcattggcaaaatgggcgtgattccttcccattcagggctgtttatgataagtcactgagggaatgataaatattatgacactgcttctcagactgtaatgtacatgcacatcacataaggaccttattaaaatggagacttaaaaagctggacgctaaaggcaataatgacagattttactcaataactactgcagaaggagagagtcctcagtatagaactgagcttagctccaatctgtgcagaggtgatggaattttaaagaggggagggaggaggttcaaatagaactagggaagtgcaaaattacaaaaagctggtaaggagattggtcaatgtgattcggctatctgtgtctactaactctcaaatttatttatcaaagttaggatcctagcctcccacagagaccaggagtcggccttatcattcctgataattatatgacaaagggatggctcccagaaaaagtgagaaacacattcctgtgcagcagaagatacatatatcccccaaagggacagaaaggatttacaattgtaaattttataaagtatgtcctctaagaagagggagggactgggtgccatggctcatgcctataatcccagcactttgggtggccaaggtgggtgcatcacctgaggtcaggagttcaagagcagcctggccaacatggtgaaaccctgtctctactaaaaatacaaaagttagcctgttgtggtggcgcgcacctgtaatcccagctactcgggtggctgaggcaggagaatcgcttgaacccaggaggcggagggtgcagtgagccgggatcacgccactgcacttcagcctgggtgacagagtgtgactccatctcaagaaaaacgagggagattagaaacctatgatcaggcattggctgaaacaaatggtaaattcttttggcagccttgagcttccccaggcagggacccaaaggggcctgggttatccctgagacagggccttgagctgctagaaactatgctagtgtttgttcaagtctctccgtgtccggggtgagcaaaattgtttgtgctgaaaatcaatgatttgcagctctcaagattccagtgggcagtctgggtgggcctgagtttctgctttttttttttctttatgtacagggtcttgctctgtcacctaggctagagtgtaattagtggccccagtcatggctcactgcagctgcaaactggctgcaagctgttctggctcagcctaccangttactgggcttacaggtggatgccaccgtacccaacagattttatttttgtagggatgggggtctccctgtattgcccaggctggtctcaaactcctggcctcccaangtgtttagattncaggtgtaagccaccacacgtggccagcctctgcatttctaacaggttccaggtgatcttgatgttctgctggtccatgggtcacactttgagaagcatggttctaaaggactatacagattaaagtcattaatctctgtgggctttggacttgaagtttcagcagcctttgacaagcatttgcaggtttcctttttatttatttgataaactgagaatccacatgcaaagaaatgcaagaaaattcaaagaacgtaagaaaatgtccttgctgtaaagctggtggttctcaatctcggatacacagtagaatcacctggtgcgggggttgggggcggggtgcagtgtaaaaattattaaatcagaatctctggggtaggccccaagcaacttttttttttttttttttagatagaatcttgcttgtcacctaggctaggagtgcagtggtgcaatcatggctcactgccgccttaacttctgggctcaagtgatatcctcccgacctcagcctccctagtagctgggactacaggcgtggactaccacacccaacaaatttttaaattttttgtagaggcaagctcttatactatcttgcacaggctggtctcgaactcctgggctcaagcagtcatcctgcctcagccttccaaagctcagggattacagacatgagccacagcaccaggccaacaatatttcttaaagctcctggagtgattccaatatgcagccaaggttgaaaaccaccctttaaaaggctcggcatccagtgtggaagaccagcacactcacgtcaggagaccttacctggagccaggatgcccctgatcatctctgataactttaaaaggaaggcctcagaagcagccccagaagcaaaagtttctctctgaccttctcctgccctcttgtttctggcttttcattctcccccaaggctacccatagaaactagaatccctcttccccaaggcaggtcatcagaaaccagaaccggttttacccaaagccagccataaaacctaaaaatagtcctctcactccccattcccctttctgtgtaaaaactggttggaaagaaatgatctgacctaccgtgtttgactgtcgtaagatacccattccagagagggtcccaccccgtgcccagaaggaaggaatcctgcacagagaggccaagaagaatctagacagccttgctgggtttcccctctcagtctattactattagatcatacccttcttgtccaatcatatttctacacagtccataatctgttgaacctaaacataaaaatggacaattcccctgtatcttggggtcttcattctgagggctcacatacaattatgatcaaataaatttgtttgctttttctcctgttaa

SEQ ID NO: 456015 - DNA, 9734 bp, Homo sapiens
  misc_feature (174)..(174): n is a, c, g, or t
  misc_feature (1714)..(1714): n is a, c, g, or t
  misc_feature (1724)..(1724): n is a, c, g, or t
  misc_feature (8220)..(8220): n is a, c, g, or t
  misc_feature (8329)..(8329): n is a, c, g, or t
  misc_feature (8341)..(8341): n is a, c, g, or t
tgtccatgtatactattgattagctcccacttgcaaatgagaacacgtggtatttgattttcttttctgggttagttcacttaggatgatggtctccagctccatgttgctgcaaaggacatgatttcgttctttttttatggctgcctcttttgtttcttaaatctgaatttncatgtggcttcaatgctagtctggcctaccctttccttcccaaagtcaccaccaactcactcccacccccacctcatgcagtgcacccctcacagcccccacccttggcagtgacatttggatttccagggcctttcctgatcctttagagacatcctctcccggccaagtcctgcaagggagacttgagtcagaggttcgatgggctggggtgaggtgggccacacaattaccacacccactcccaggcctattcccggtgatctaagcacacagaagcaggctggtacttagggaagaaggcaccagtgtatgccagagcttaggatggcgtgaggaccaaatggaaagatagatattgtaagtggttgttgggagaaggaaggctggaggtgggggtactttgtgggctgcttccaggagctcccacccacaggcacaagtcttcctagctggcagaagaagccaggaacaaggctgaattctgacagaacccgcctggagctccatttcagttgcagagacctttatcttatgcagctgtcttttgcccagcctcctctgcagatgccataggacctcctctttcttttcttttctttctttttttttgagactgagtcttgctctatgaccagactggaatgcagtggcacaatctcagctcactgcaacctccgcctcccgggttcaggcgattctcctccctcagcctcccaaatagctgggattataggcatgcgccaccatgcccagctaatttttgtatttttagtagagacagggtttcactgtgttggccaggatggtctccatctcttgacctcgtgattcacctgcctcggcctcccaaagtgctgggattacaggcatgacccaccgtgccctgccaggacttcctctttctttttttttttttctttttttttttgagacggagtttcactcttgttgcccaggctgaagtgcaatggcacgatctcggctcaccgcaacctccgcctcccaggttcaagcgattctcctgcctcagcacccccgagaagctgggattacaggcacgcaccaccacgcccggctaattttgtatttttagtagagatgaggtttcttcatgttagtcaggctggtctcgaactcccgacctcaggtgatccgcccacctcggcctcccaaagtgctgggattacaggcatgagccaccgcgccctgccaggacctcctctttctgatataacacctgcatttgtttggcagacatctgtgtagttctgttcacaggagaaaaaagtcagattactaaacaccagtgtttaacagtggccatcagtaggtggtagcttcagagagtatttgctttcttatcgactatggtttcatgtattctctgttttgttttttactataagcatattttgtttttatataagggagaaataaagctcttctcaattgggagaaattactgcctgcctataatgaatgaggccctgctgggcactggctgggggcttgatgagtaggatatggtccctgtttntggagggtcntcaaactaaagaggaaagaagataggggaacaaaacagtgcggttggtgttctaagtatcctctgatcacagaagagaaagctgcccctacccagggacatgatcctgagccacctggattgtgagggagaatcaggcattgatgaggaggggaatgaggaagtagtctgcctacaggggacatagctcggcacagctccacagagctaggggctgcaacttggggcatgagaagagagagcagcaagagaaccatttgagaaggctgtcctttctctgtcatcactcctgatgccctggtgagctccacggtgcaggaacctccatgtgtgtgctgcatccccaagttctggtggcagcaggtgcttagcagcccttgtccagtctcgcctgtgacactgctgctcccttcccctgtcctgacctcctggttggctgtcctgccagagccttgcctggaagatgaaattccagctaccctgtgggagcagtaacgccttcttccttcttctcaatctccagaaatgtcaaatgtctttcctccaggacccaagtttcttcaccatggggatgtggtccattggtgcaggagccctgggggctgctgccttggcattgctgcttgccaacacagacgtgtttctgtccaagccccagaaagcggccctggagtacctggaggatatagacctgaaaacactggagaagggtaagtggtgacccttcaggtctcagtacttttccaaggagctgggatacaggcttactgctttctttctaaactctctcctttttttaattgaaaagataatataacaacattaggaaaaatttaataacaatttttaaactaggaataattctgttaccctaacacagtaattttgattttggcatattcctttccatgtgtacatattacgtagttgtgcttggcttaggtgctgttttacattttagcttttcttatcaaaagcatttctcattctctgttgttgtctctgtaattataatgataaattgctccataatatttagtaataattacaatcttttactaaaccagtgcttccagagtgtattctgaggaattccaggcttgtgggatcgtcaaactaaaaggagttcctgagtgaacaagtatgggagacaccttttatccaattccatgctcctgatgctcagcacagacatatgcttattagaatgaggtgtctggattgctgctgattcaggcatggccagcccctccctgtgaagaagctgtggtgtctgaggaatcacttcaaggtcacccgttagagcagacctgcctatctccctcttctgggggactgctagaatccattgtggacagcttagagccacacacccaaatgtgttagctctgcctccttgctgtgtgctctcagtgttagagctgtagcttggtgggatttcagtcatgccagtggtgtggcaagagagttggagtggtgaaggtctcattgatggcgtggtcaccatgttagccccccaggtggaagtcatcgtcatctgtttagtaagtaaggaagcttgcgaaaggaaggcaggagattgtgcaggtttatagtaggtcaccttagtaagatactaggagagagagagacctgttaagctttgttcaacccagggtttcccaatcttatttgattacagactcttctccccaccctctcacccacctgaccccattttttttttttccacataacatctacgggaacatggatccctctgggaaatactaaaataattaagggctcatatttattgagccctcaccaactctatattaccagacattgtggtgagcacttttatattcatctttcaatatgccctgtggcccaaagtggagctactagatatttgcattttacaaatgaggaagctgaggttcaaagagcaaaaataacttgcccagagttacacagctagattcagattcagttggaccttagagctgggcttgttgaactacagtactgtactaccccaaagcattttattcctaggcatcttctatcctctccttcgttaataatattgcaggtaacatatttaggttaaaaatttgagactttttcagtttgggccatgtttctgttctgaaggattattatacaatatctgatgacatcagcaatagacaaaatggccatttttccagaaatgtcccacttctgaatgttcaggttagaaaaaagattttcatggtgggagggacctaccgggtatataacaggattcttaagcttggttaactttcttcaggaaggtgtgtattctgtctgtctgtgtttcctgtgtgtcttttcccacgtgtgaaatgcctgtccaggtcctctactaggccgggtctctgaccttggctggacttagtgtggttcatgagctgcttagtgattggggctgggctgggaggagatatcgaatttctttttttcctctcttagaaccaaggactttcaaagcaaaggagctatgggaaaaaaatggagctgtgattatggccgtgcggaggccaggctgtttcctctgtcgagaggaagctgcggatctgtcctccctgaaaagcatgttggaccagctgggcgtccccctctatgcagtggtaaaggagcacatcaggactgaagtgaaggatttccagccttatttcaaaggagaaatcttcctggatgaaaagaaaaagttctatggtccacaaaggcggaagatgatgtttatgggatttatccgtctgggagtgtggtacaacttcttccgagcctggaacggaggcttctctggaaacctggaaggagaaggcttcatccttgggggagttttcgtggtgggatcaggaaagcagggcattcttcttgagcaccgagaaaaagaatttggagacaaagtaaacctactttctgttctggaagctgctaagatgatcaaaccacagactttggcctcagagaaaaaatgattgtgtgaaactgcccagctcagggataaccagggacattcacctgtgttcatgggatgtattgtttccactcgtgtccctaaggagtgagaaacccatttatactctactctcagtatggattattaatgtattttaatattctgtttaggcccactaaggcaaaatagccccaaaacaagactgacaaaaatctgaaaaactaatgaggattattaagctaaaacctgggaaataggaggcttaaaattgactgccaggctgggtgcagtggctcacacctgtaatcccagcactttgggaggccaaggtgagcaagtcacttgaggtcgggagttcgagaccagcctgagcaacatggcgaaaccccgtctctactaaaaatacaaaaatcacccgggtgtggtggcaggcacctgtagtcccagctacccgggaggctgaggcaggagaatcacttgaacctgggaggtggaggttgcggtgagctgagatcacaccactgtattccagcctgggtgactgagactctaactaaaaaaaaaaaaaaaaaaaaattgattgctgtgcctcattacaaatgcatatgatgtttgagtgctgttgtttgaaattatttttcttttcgggtcttcaaaaattcaagaaaagttgatgattgacttgaagattacaaaatttaaggttttttggcatgtgtgttttctattaataattggttatatgatgtcaaagtaatactttcataatagaattgacatgctctgggatagtttgacaaaggtaaattataaagtgaaatctcttgtttcattatcttccattctaacctcagagatctgtttctctagaaaaaatgtccatctctggctttaataaaattatgcatcagaaatcacctgtatgtataagattttctgataaaactaataattatatttaccatataattggctgaaagtaaaaaaagtcagcattctccatggctgaggggtaaagtgcctcgggggattcctctggttctagctatctaagtggtttgaaaatgaccaggaaaaattcatcctgtcattcacgttagtaattttgctgtctttcctagaggaatgactttggtgtttaaaattggtagctgtttttctattggtcttttagcctaatttggcaaatcagaagaaaggacatagagatgatgaaatataactttatcttttttgtttgaattttgtcgtgtaagtttgagtgacatcatcaagacctaccagggagctcggccacagggagtctactcaaggcatcaaactggcccaggagtagaaaggtgggggtggaaataggaaatagtgtttacccaggggactggcccagccaggaggagaaaggaatcagtgtttacccaggaaagcaagaatggatactgatgttggaggtaaagctgggaaagtaggagagcatcgggattgagtatgcagagtgagttagggttgagtggttcgggactaagacccactaagaccatgcctgcacctgacttcatgtagcagtggttgcatggggtatgcatgggcccttaaagggctgggcttctgcagcatttgaggccatagcctttggtacttgcacagggttggtacctgtcatccttgggactccagctactgataggataactcagtacctaaacttagaactttaatacctaagacacttgatggtgaaacagttctcttgcaactaaagaagaacctgaggtcaggtgtggtggctcacgcctgtaatcctagcactttgggaagtcgaggtagaaggatcacttgaggtcaggagttcgagaccagcctggccagcatggtgaaaccccatctctactaaaaatacaaaatattagacagacggggtggtacatgcctgtaatcccagctacttgggaggctgaggcaggagaatcgcttgaacccaggaggcagaggttgcagtgagccgagatcgtgccactgcactccagcttgggcaacaagagcgaaactccatatcaaaaaaaaaaacctgagaggacattgcaccaatggagatgcatcaagagaaacatgtttggttttttgtgagctctcaccaacttttttcccctgggtcctcacgtgcagtgtggtcttctctttctgattagcatgtcattttggaaagagcactggattgagtcatgaggcataatcaatttctagtttaccagtgtgatcttaagcaaagatctaactcattggcaaaatgggcgtgattccttcccattcagggctgtttatgataagtcactgagggaatgataaatattatgacactgcttctcagactgtaatgtacatgcacatcacataaggaccttattaaaatggagacttaaaaagctggacgctaaaggcaataatgacagattttactcaataactactgcagaaggagagagtcctcagtatagaactgagcttagctccaatctgtgcagaggtgatggaattttaaagaggggagggaggaggttcaaatagaactagggaagtgcaaaattacaaaaagctggtaaggagattggtcaatgtgattcggctatctgtgtctactaactctcaaatttatttatcaaagttaggatcctagcctcccacagagaccaggagtcggccttatcattcctgataattatatgacaaagggatggctcccagaaaaagtgagaaacacattcctgtgcagcagaagatacatatatcccccaaagggacagaaaggatttacaattgtaaattttataaagtatgtcctctaagaagagggagggactgggtgccatggctcatgcctataatcccagcactttgggtggccaaggtgggtgcatcacctgaggtcaggagttcaagagcagcctggccaacatggtgaaaccctgtctctactaaaaatacaaaagttagcctgttgtggtggcgcgcacctgtaatcccagctactcgggtggctgaggcaggagaatcgcttgaacccaggaggcggagggtgcagtgagccgggatcacgccactgcacttcagcctgggtgacagagtgtgactccatctcaagaaaaacgagggagattagaaacctatgatcaggcattggctgaaacaaatggtaaattcttttggcagccttgagcttccccaggcagggacccaaaggggcctgggttatccctgagacagggccttgagctgctagaaactatgctagtgtttgttcaagtctctccgtgtccggggtgagcaaaattgtttgtgctgaaaatcaatgatttgcagctctcaagattccagtgggcagtctgggtgggcctgagtttctgctttttttttttctttatgtacagggtcttgctctgtcacctaggctagagtgtaattagtggccccagtcatggctcactgcagctgcaaactggctgcaagctgttctggctcagcctaccangttactgggcttacaggtggatgccaccgtacccaacagattttatttttgtagggatgggggtctccctgtattgcccaggctggtctcaaactcctggcctcccaangtgtttagattncaggtgtaagccaccacacgtggccagcctctgcatttctaacaggttccaggtgatcttgatgttctgctggtccatgggtcacactttgagaagcatggttctaaaggactatacagattaaagtcattaatctctgtgggctttggacttgaagtttcagcagcctttgacaagcatttgcaggtttcctttttatttatttgataaactgagaatccacatgcaaagaaatgcaagaaaattcaaagaacgtaagaaaatgtccttgctgtaaagctggtggttctcaatctcggatacacagtagaatcacctggtgcgggggttgggggcggggtgcagtgtaaaaattattaaatcagaatctctggggtaggccccaagcaacttttttttttttttttttagatagaatcttgcttgtcacctaggctaggagtgcagtggtgcaatcatggctcactgccgccttaacttctgggctcaagtgatatcctcccgacctcagcctccctagtagctgggactacaggcgtggactaccacacccaacaaatttttaaattttttgtagaggcaagctcttatactatcttgcacaggctggtctcgaactcctgggctcaagcagtcatcctgcctcagccttccaaagctcagggattacagacatgagccacagcaccaggccaacaatatttcttaaagctcctggagtgattccaatatgcagccaaggttgaaaaccaccctttaaaaggctcggcatccagtgtggaagaccagcacactcacgtcaggagaccttacctggagccaggatgcccctgatcatctctgataactttaaaaggaaggcctcagaagcagccccagaagcaaaagtttctctctgaccttctcctgccctcttgtttctggcttttcattctcccccaaggctacccatagaaactagaatccctcttccccaaggcaggtcatcagaaaccagaaccggttttacccaaagccagccataaaacctaaaaatagtcctctcactccccattcccctttctgtgtaaaaactggttggaaagaaatgatctgacctaccgtgtttgactgtcgtaagatacccattccagagagggtcccaccccgtgcccagaaggaaggaatcctgcacagagaggccaagaagaatctagacagccttgctgggtttcccctctcagtctattactattagatcatacccttcttgtccaatcatatttctacacagtccataatctgttgaacctaaacataaaaatggacaattcccctgtatcttggggtcttcattctgagggctcacatacaattatgatcaaataaatttgtttgctttttctcctgttaa

SEQ ID NO: 456016 - DNA, 1150 bp, Homo sapiens
agcggacatggcggtggcgcggtagcgcgcgatgcagcacaggctagaggctgcgcaagcgcggggcccgcccctgggaccctccgggccgggcggtttggccccttagcgcccgggcgtcggggcggtaaaaggccggcagaagggaggcacttgagaaatgtctttcctccaggacccaagtttcttcaccatggggatgtggtccattggtgcaggagccctgggggctgctgccttggcattgctgcttgccaacacagacgtgtttctgtccaagccccagaaagcggccctggagtacctggaggatatagacctgaaaacactggagaaggaaccaaggactttcaaagcaaaggagctatgggaaaaaaatggagctgtgattatggccgtgcggaggccaggctgtttcctctgtcgagaggaagctgcggatctgtcctccctgaaaagcatgttggaccagctgggcgtccccctctatgcagtggtaaaggagcacatcaggactgaagtgaaggatttccagccttatttcaaaggagaaatcttcctggatgaaaagaaaaagttctatggtccacaaaggcggaagatgatgtttatgggatttatccgtctgggagtgtggtacaacttcttccgagcctggaacggaggcttctctggaaacctggaaggagaaggcttcatccttgggggagttttcgtggtgggatcaggaaagcagggcattcttcttgagcaccgagaaaaagaatttggagacaaagtaaacctactttctgttctggaagctgctaagatgatcaaaccacagactttggcctcagagaaaaaatgattgtgtgaaactgcccagctcagggataaccagggacattcacctgtgttcatgggatgtattgtttccactcgtgtccctaaggagtgagaaacccatttatactctactctcagtatggattattaatgtattttaatattctgtttaggcccactaaggcaaaatagccccaaaacaagactgacaaaaatctgaaaaactaatgaggattattaagctaaaacctgggattacaggcgtgacgaccttgcccagcccacatcatacagtttgaaatgaaactttgccacaaccagc

SEQ ID NO: 456017 - DNA, 1133 bp, Homo sapiens
agcggacatggcggtggcgcggtagcgcgcgatgcagcacaggctagaggctgcgcaagcgcggggcccgcccctgggaccctccgggccgggcggtttggccccttagcgcccgggcgtcggggcggtaaaaggccggcagaagggaggcacttgagaaatgtctttcctccaggacccaagtttcttcaccatggggatgtggtccattggtgcaggagccctgggggctgctgccttggcattgctgcttgccaacacagacgtgtttctgtccaagccccagaaagcggccctggagtacctggaggatatagacctgaaaacactggagaaggaaccaaggactttcaaagcaaaggagctatgggaaaaaaatggagctgtgattatggccgtgcggaggccaggctgtttcctctgtcgagaggaagctgcggatctgtcctccctgaaaagcatgttggaccagctgggcgtccccctctatgcagtggtaaaggagcacatcaggactgaagtgaaggatttccagccttatttcaaaggagaaatcttcctggatgaaaagaaaaagttctatggtccacaaaggcggaagatgatgtttatgggatttatccgtctgggagtgtggtacaacttcttccgagcctggaacggaggcttctctggaaacctggaaggagaaggcttcatccttgggggagttttcgtggtgggatcaggaaagcagggcattcttcttgagcaccgagaaaaagaatttggagacaaagtaaacctactttctgttctggaagctgctaagatgatcaaaccacagactttggcctcagagaaaaaatgattgtgtgaaactgcccagctcagggataaccagggacattcacctgtgttcatgggatgtattgtttccactcgtgtccctaaggagtgagaaacccatttatactctactctcagtatggattattaatgtattttaatattctgtttaggcccactaaggcaaaatagccccaaaacaagactgacaaaaatctgaaaaactaatgaggatatagacctgaaaacactggagaaggaaccaaggactttcaaagcaaaggagctatgggaaaaaaatggag

SEQ ID NO: 456018 - DNA, 5663 bp, Homo sapiens
  misc_feature (4149)..(4149): n is a, c, g, or t
  misc_feature (4258)..(4258): n is a, c, g, or t
  misc_feature (4270)..(4270): n is a, c, g, or t
agataactttggggtatcttgtgtcttagtgcattttttttcactgtatgagaagaaagtggcttccagtttcttagaagactaaagaaaaatgagggtctctcttttagatggtcattcagtgccttccaaagtctaacctctgagctccacttccacacctttgggcctttctgtgttagcttcatttttttctcttcacctggtatgttcttttacctgcatctctacttgtagacatcctggttaccctccgtgcctctgtgaggccttccctgattgcccttgtcatgctttatcacttctgacttcctgcttctagagctgctggtacaggccagatggatgtggccttctccggtctatcttccctcaaagactgaactccttgagggcaggagccaggccatatttggatctgtgtcctttgctattcaagcaaaaggcttgacagacagctggtcctcgatgcctgtctcatgaacgaacgatttaggatgaggactgacattatctcttgtttccttttagggcattcttcttgagcaccgagaaaaagaatttggagacaaagtaaacctactttctgttctggaagctgctaagatgatcaaaccacagactttggcctcagagaaaaaatgattgtgtgaaactgcccagctcagggataaccagggacattcacctgtgttcatgggatgtattgtttccactcgtgtccctaaggagtgagaaacccatttatactctactctcagtatggattattaatgtattttaatattctgtttaggcccactaaggcaaaatagccccaaaacaagactgacaaaaatctgaaaaactaatgaggattattaagctaaaacctgggaaataggaggcttaaaattgactgccaggctgggtgcagtggctcacacctgtaatcccagcactttgggaggccaaggtgagcaagtcacttgaggtcgggagttcgagaccagcctgagcaacatggcgaaaccccgtctctactaaaaatacaaaaatcacccgggtgtggtggcaggcacctgtagtcccagctacccgggaggctgaggcaggagaatcacttgaacctgggaggtggaggttgcggtgagctgagatcacaccactgtattccagcctgggtgactgagactctaactaaaaaaaaaaaaaaaaaaaaattgattgctgtgcctcattacaaatgcatatgatgtttgagtgctgttgtttgaaattatttttcttttcgggtcttcaaaaattcaagaaaagttgatgattgacttgaagattacaaaatttaaggttttttggcatgtgtgttttctattaataattggttatatgatgtcaaagtaatactttcataatagaattgacatgctctgggatagtttgacaaaggtaaattataaagtgaaatctcttgtttcattatcttccattctaacctcagagatctgtttctctagaaaaaatgtccatctctggctttaataaaattatgcatcagaaatcacctgtatgtataagattttctgataaaactaataattatatttaccatataattggctgaaagtaaaaaaagtcagcattctccatggctgaggggtaaagtgcctcgggggattcctctggttctagctatctaagtggtttgaaaatgaccaggaaaaattcatcctgtcattcacgttagtaattttgctgtctttcctagaggaatgactttggtgtttaaaattggtagctgtttttctattggtcttttagcctaatttggcaaatcagaagaaaggacatagagatgatgaaatataactttatcttttttgtttgaattttgtcgtgtaagtttgagtgacatcatcaagacctaccagggagctcggccacagggagtctactcaaggcatcaaactggcccaggagtagaaaggtgggggtggaaataggaaatagtgtttacccaggggactggcccagccaggaggagaaaggaatcagtgtttacccaggaaagcaagaatggatactgatgttggaggtaaagctgggaaagtaggagagcatcgggattgagtatgcagagtgagttagggttgagtggttcgggactaagacccactaagaccatgcctgcacctgacttcatgtagcagtggttgcatggggtatgcatgggcccttaaagggctgggcttctgcagcatttgaggccatagcctttggtacttgcacagggttggtacctgtcatccttgggactccagctactgataggataactcagtacctaaacttagaactttaatacctaagacacttgatggtgaaacagttctcttgcaactaaagaagaacctgaggtcaggtgtggtggctcacgcctgtaatcctagcactttgggaagtcgaggtagaaggatcacttgaggtcaggagttcgagaccagcctggccagcatggtgaaaccccatctctactaaaaatacaaaatattagacagacggggtggtacatgcctgtaatcccagctacttgggaggctgaggcaggagaatcgcttgaacccaggaggcagaggttgcagtgagccgagatcgtgccactgcactccagcttgggcaacaagagcgaaactccatatcaaaaaaaaaaacctgagaggacattgcaccaatggagatgcatcaagagaaacatgtttggttttttgtgagctctcaccaacttttttcccctgggtcctcacgtgcagtgtggtcttctctttctgattagcatgtcattttggaaagagcactggattgagtcatgaggcataatcaatttctagtttaccagtgtgatcttaagcaaagatctaactcattggcaaaatgggcgtgattccttcccattcagggctgtttatgataagtcactgagggaatgataaatattatgacactgcttctcagactgtaatgtacatgcacatcacataaggaccttattaaaatggagacttaaaaagctggacgctaaaggcaataatgacagattttactcaataactactgcagaaggagagagtcctcagtatagaactgagcttagctccaatctgtgcagaggtgatggaattttaaagaggggagggaggaggttcaaatagaactagggaagtgcaaaattacaaaaagctggtaaggagattggtcaatgtgattcggctatctgtgtctactaactctcaaatttatttatcaaagttaggatcctagcctcccacagagaccaggagtcggccttatcattcctgataattatatgacaaagggatggctcccagaaaaagtgagaaacacattcctgtgcagcagaagatacatatatcccccaaagggacagaaaggatttacaattgtaaattttataaagtatgtcctctaagaagagggagggactgggtgccatggctcatgcctataatcccagcactttgggtggccaaggtgggtgcatcacctgaggtcaggagttcaagagcagcctggccaacatggtgaaaccctgtctctactaaaaatacaaaagttagcctgttgtggtggcgcgcacctgtaatcccagctactcgggtggctgaggcaggagaatcgcttgaacccaggaggcggagggtgcagtgagccgggatcacgccactgcacttcagcctgggtgacagagtgtgactccatctcaagaaaaacgagggagattagaaacctatgatcaggcattggctgaaacaaatggtaaattcttttggcagccttgagcttccccaggcagggacccaaaggggcctgggttatccctgagacagggccttgagctgctagaaactatgctagtgtttgttcaagtctctccgtgtccggggtgagcaaaattgtttgtgctgaaaatcaatgatttgcagctctcaagattccagtgggcagtctgggtgggcctgagtttctgctttttttttttctttatgtacagggtcttgctctgtcacctaggctagagtgtaattagtggccccagtcatggctcactgcagctgcaaactggctgcaagctgttctggctcagcctaccangttactgggcttacaggtggatgccaccgtacccaacagattttatttttgtagggatgggggtctccctgtattgcccaggctggtctcaaactcctggcctcccaangtgtttagattncaggtgtaagccaccacacgtggccagcctctgcatttctaacaggttccaggtgatcttgatgttctgctggtccatgggtcacactttgagaagcatggttctaaaggactatacagattaaagtcattaatctctgtgggctttggacttgaagtttcagcagcctttgacaagcatttgcaggtttcctttttatttatttgataaactgagaatccacatgcaaagaaatgcaagaaaattcaaagaacgtaagaaaatgtccttgctgtaaagctggtggttctcaatctcggatacacagtagaatcacctggtgcgggggttgggggcggggtgcagtgtaaaaattattaaatcagaatctctggggtaggccccaagcaacttttttttttttttttttagatagaatcttgcttgtcacctaggctaggagtgcagtggtgcaatcatggctcactgccgccttaacttctgggctcaagtgatatcctcccgacctcagcctccctagtagctgggactacaggcgtggactaccacacccaacaaatttttaaattttttgtagaggcaagctcttatactatcttgcacaggctggtctcgaactcctgggctcaagcagtcatcctgcctcagccttccaaagctcagggattacagacatgagccacagcaccaggccaacaatatttcttaaagctcctggagtgattccaatatgcagccaaggttgaaaaccaccctttaaaaggctcggcatccagtgtggaagaccagcacactcacgtcaggagaccttacctggagccaggatgcccctgatcatctctgataactttaaaaggaaggcctcagaagcagccccagaagcaaaagtttctctctgaccttctcctgccctcttgtttctggcttttcattctcccccaaggctacccatagaaactagaatccctcttccccaaggcaggtcatcagaaaccagaaccggttttacccaaagccagccataaaacctaaaaatagtcctctcactccccattcccctttctgtgtaaaaactggttggaaagaaatgatctgacctaccgtgtttgactgtcgtaagatacccattccagagagggtcccaccccgtgcccagaaggaaggaatcctgcacagagaggccaagaagaatctagacagccttgctgggtttcccctctcagtctattactattagatcatacccttcttgtccaatcatatttctacacagtccataatctgttgaacctaaacataaaaatggacaattcccctgtatcttggggtcttcattctgagggctcacatacaattatgatcaaataaatttgtttgctttttctcctgttaa

SEQ ID NO: 456019 - DNA, 4875 bp, Homo sapiens
  misc_feature (3361)..(3361): n is a, c, g, or t
  misc_feature (3470)..(3470): n is a, c, g, or t
  misc_feature (3482)..(3482): n is a, c, g, or t
actactactactaaattcacggccgcgtcgacaaacaagactgacaaaaatctgaaaaactaatgaggattattaagctaaaacctgggaaataggaggcttaaaattgactgccaggctgggtgcagtggctcacacctgtaatcccagcactttgggaggccaaggtgagcaagtcacttgaggtcgggagttcgagaccagcctgagcaacatggcgaaaccccgtctctactaaaaatacaaaaatcacccgggtgtggtggcaggcacctgtagtcccagctacccgggaggctgaggcaggagaatcacttgaacctgggaggtggaggttgcggtgagctgagatcacaccactgtattccagcctgggtgactgagactctaactaaaaaaaaaaaaaaaaaaaaattgattgctgtgcctcattacaaatgcatatgatgtttgagtgctgttgtttgaaattatttttcttttcgggtcttcaaaaattcaagaaaagttgatgattgacttgaagattacaaaatttaaggttttttggcatgtgtgttttctattaataattggttatatgatgtcaaagtaatactttcataatagaattgacatgctctgggatagtttgacaaaggtaaattataaagtgaaatctcttgtttcattatcttccattctaacctcagagatctgtttctctagaaaaaatgtccatctctggctttaataaaattatgcatcagaaatcacctgtatgtataagattttctgataaaactaataattatatttaccatataattggctgaaagtaaaaaaagtcagcattctccatggctgaggggtaaagtgcctcgggggattcctctggttctagctatctaagtggtttgaaaatgaccaggaaaaattcatcctgtcattcacgttagtaattttgctgtctttcctagaggaatgactttggtgtttaaaattggtagctgtttttctattggtcttttagcctaatttggcaaatcagaagaaaggacatagagatgatgaaatataactttatcttttttgtttgaattttgtcgtgtaagtttgagtgacatcatcaagacctaccagggagctcggccacagggagtctactcaaggcatcaaactggcccaggagtagaaaggtgggggtggaaataggaaatagtgtttacccaggggactggcccagccaggaggagaaaggaatcagtgtttacccaggaaagcaagaatggatactgatgttggaggtaaagctgggaaagtaggagagcatcgggattgagtatgcagagtgagttagggttgagtggttcgggactaagacccactaagaccatgcctgcacctgacttcatgtagcagtggttgcatggggtatgcatgggcccttaaagggctgggcttctgcagcatttgaggccatagcctttggtacttgcacagggttggtacctgtcatccttgggactccagctactgataggataactcagtacctaaacttagaactttaatacctaagacacttgatggtgaaacagttctcttgcaactaaagaagaacctgaggtcaggtgtggtggctcacgcctgtaatcctagcactttgggaagtcgaggtagaaggatcacttgaggtcaggagttcgagaccagcctggccagcatggtgaaaccccatctctactaaaaatacaaaatattagacagacggggtggtacatgcctgtaatcccagctacttgggaggctgaggcaggagaatcgcttgaacccaggaggcagaggttgcagtgagccgagatcgtgccactgcactccagcttgggcaacaagagcgaaactccatatcaaaaaaaaaaacctgagaggacattgcaccaatggagatgcatcaagagaaacatgtttggttttttgtgagctctcaccaacttttttcccctgggtcctcacgtgcagtgtggtcttctctttctgattagcatgtcattttggaaagagcactggattgagtcatgaggcataatcaatttctagtttaccagtgtgatcttaagcaaagatctaactcattggcaaaatgggcgtgattccttcccattcagggctgtttatgataagtcactgagggaatgataaatattatgacactgcttctcagactgtaatgtacatgcacatcacataaggaccttattaaaatggagacttaaaaagctggacgctaaaggcaataatgacagattttactcaataactactgcagaaggagagagtcctcagtatagaactgagcttagctccaatctgtgcagaggtgatggaattttaaagaggggagggaggaggttcaaatagaactagggaagtgcaaaattacaaaaagctggtaaggagattggtcaatgtgattcggctatctgtgtctactaactctcaaatttatttatcaaagttaggatcctagcctcccacagagaccaggagtcggccttatcattcctgataattatatgacaaagggatggctcccagaaaaagtgagaaacacattcctgtgcagcagaagatacatatatcccccaaagggacagaaaggatttacaattgtaaattttataaagtatgtcctctaagaagagggagggactgggtgccatggctcatgcctataatcccagcactttgggtggccaaggtgggtgcatcacctgaggtcaggagttcaagagcagcctggccaacatggtgaaaccctgtctctactaaaaatacaaaagttagcctgttgtggtggcgcgcacctgtaatcccagctactcgggtggctgaggcaggagaatcgcttgaacccaggaggcggagggtgcagtgagccgggatcacgccactgcacttcagcctgggtgacagagtgtgactccatctcaagaaaaacgagggagattagaaacctatgatcaggcattggctgaaacaaatggtaaattcttttggcagccttgagcttccccaggcagggacccaaaggggcctgggttatccctgagacagggccttgagctgctagaaactatgctagtgtttgttcaagtctctccgtgtccggggtgagcaaaattgtttgtgctgaaaatcaatgatttgcagctctcaagattccagtgggcagtctgggtgggcctgagtttctgctttttttttttctttatgtacagggtcttgctctgtcacctaggctagagtgtaattagtggccccagtcatggctcactgcagctgcaaactggctgcaagctgttctggctcagcctaccangttactgggcttacaggtggatgccaccgtacccaacagattttatttttgtagggatgggggtctccctgtattgcccaggctggtctcaaactcctggcctcccaangtgtttagattncaggtgtaagccaccacacgtggccagcctctgcatttctaacaggttccaggtgatcttgatgttctgctggtccatgggtcacactttgagaagcatggttctaaaggactatacagattaaagtcattaatctctgtgggctttggacttgaagtttcagcagcctttgacaagcatttgcaggtttcctttttatttatttgataaactgagaatccacatgcaaagaaatgcaagaaaattcaaagaacgtaagaaaatgtccttgctgtaaagctggtggttctcaatctcggatacacagtagaatcacctggtgcgggggttgggggcggggtgcagtgtaaaaattattaaatcagaatctctggggtaggccccaagcaacttttttttttttttttttagatagaatcttgcttgtcacctaggctaggagtgcagtggtgcaatcatggctcactgccgccttaacttctgggctcaagtgatatcctcccgacctcagcctccctagtagctgggactacaggcgtggactaccacacccaacaaatttttaaattttttgtagaggcaagctcttatactatcttgcacaggctggtctcgaactcctgggctcaagcagtcatcctgcctcagccttccaaagctcagggattacagacatgagccacagcaccaggccaacaatatttcttaaagctcctggagtgattccaatatgcagccaaggttgaaaaccaccctttaaaaggctcggcatccagtgtggaagaccagcacactcacgtcaggagaccttacctggagccaggatgcccctgatcatctctgataactttaaaaggaaggcctcagaagcagccccagaagcaaaagtttctctctgaccttctcctgccctcttgtttctggcttttcattctcccccaaggctacccatagaaactagaatccctcttccccaaggcaggtcatcagaaaccagaaccggttttacccaaagccagccataaaacctaaaaatagtcctctcactccccattcccctttctgtgtaaaaactggttggaaagaaatgatctgacctaccgtgtttgactgtcgtaagatacccattccagagagggtcccaccccgtgcccagaaggaaggaatcctgcacagagaggccaagaagaatctagacagccttgctgggtttcccctctcagtctattactattagatcatacccttcttgtccaatcatatttctacacagtccataatctgttgaacctaaacataaaaatggacaattcccctgtatcttggggtcttcattctgagggctcacatacaattatgatcaaataaatttgtttgctttttctcctgttaa

SEQ ID NO: 456020 - DNA, 4682 bp, Homo sapiens
  misc_feature (3168)..(3168): n is a, c, g, or t
  misc_feature (3277)..(3277): n is a, c, g, or t
  misc_feature (3289)..(3289): n is a, c, g, or t
agacagcatcacgctctgtcgtccaggctagagtacagtggtgtgatctcaggtcattgcaacctccgtctcttgggctcaagcaatcctcccacctcaggaggctgaggcaggagaatcacttgaacctgggaggtggaggttgcggtgagctgagatcacaccactgtattccagcctgggtgactgagactctaactaaaaaaaaaaaaaaaaaaaaattgattgctgtgcctcattacaaatgcatatgatgtttgagtgctgttgtttgaaattatttttcttttcgggtcttcaaaaattcaagaaaagttgatgattgacttgaagattacaaaatttaaggttttttggcatgtgtgttttctattaataattggttatatgatgtcaaagtaatactttcataatagaattgacatgctctgggatagtttgacaaaggtaaattataaagtgaaatctcttgtttcattatcttccattctaacctcagagatctgtttctctagaaaaaatgtccatctctggctttaataaaattatgcatcagaaatcacctgtatgtataagattttctgataaaactaataattatatttaccatataattggctgaaagtaaaaaaagtcagcattctccatggctgaggggtaaagtgcctcgggggattcctctggttctagctatctaagtggtttgaaaatgaccaggaaaaattcatcctgtcattcacgttagtaattttgctgtctttcctagaggaatgactttggtgtttaaaattggtagctgtttttctattggtcttttagcctaatttggcaaatcagaagaaaggacatagagatgatgaaatataactttatcttttttgtttgaattttgtcgtgtaagtttgagtgacatcatcaagacctaccagggagctcggccacagggagtctactcaaggcatcaaactggcccaggagtagaaaggtgggggtggaaataggaaatagtgtttacccaggggactggcccagccaggaggagaaaggaatcagtgtttacccaggaaagcaagaatggatactgatgttggaggtaaagctgggaaagtaggagagcatcgggattgagtatgcagagtgagttagggttgagtggttcgggactaagacccactaagaccatgcctgcacctgacttcatgtagcagtggttgcatggggtatgcatgggcccttaaagggctgggcttctgcagcatttgaggccatagcctttggtacttgcacagggttggtacctgtcatccttgggactccagctactgataggataactcagtacctaaacttagaactttaatacctaagacacttgatggtgaaacagttctcttgcaactaaagaagaacctgaggtcaggtgtggtggctcacgcctgtaatcctagcactttgggaagtcgaggtagaaggatcacttgaggtcaggagttcgagaccagcctggccagcatggtgaaaccccatctctactaaaaatacaaaatattagacagacggggtggtacatgcctgtaatcccagctacttgggaggctgaggcaggagaatcgcttgaacccaggaggcagaggttgcagtgagccgagatcgtgccactgcactccagcttgggcaacaagagcgaaactccatatcaaaaaaaaaaacctgagaggacattgcaccaatggagatgcatcaagagaaacatgtttggttttttgtgagctctcaccaacttttttcccctgggtcctcacgtgcagtgtggtcttctctttctgattagcatgtcattttggaaagagcactggattgagtcatgaggcataatcaatttctagtttaccagtgtgatcttaagcaaagatctaactcattggcaaaatgggcgtgattccttcccattcagggctgtttatgataagtcactgagggaatgataaatattatgacactgcttctcagactgtaatgtacatgcacatcacataaggaccttattaaaatggagacttaaaaagctggacgctaaaggcaataatgacagattttactcaataactactgcagaaggagagagtcctcagtatagaactgagcttagctccaatctgtgcagaggtgatggaattttaaagaggggagggaggaggttcaaatagaactagggaagtgcaaaattacaaaaagctggtaaggagattggtcaatgtgattcggctatctgtgtctactaactctcaaatttatttatcaaagttaggatcctagcctcccacagagaccaggagtcggccttatcattcctgataattatatgacaaagggatggctcccagaaaaagtgagaaacacattcctgtgcagcagaagatacatatatcccccaaagggacagaaaggatttacaattgtaaattttataaagtatgtcctctaagaagagggagggactgggtgccatggctcatgcctataatcccagcactttgggtggccaaggtgggtgcatcacctgaggtcaggagttcaagagcagcctggccaacatggtgaaaccctgtctctactaaaaatacaaaagttagcctgttgtggtggcgcgcacctgtaatcccagctactcgggtggctgaggcaggagaatcgcttgaacccaggaggcggagggtgcagtgagccgggatcacgccactgcacttcagcctgggtgacagagtgtgactccatctcaagaaaaacgagggagattagaaacctatgatcaggcattggctgaaacaaatggtaaattcttttggcagccttgagcttccccaggcagggacccaaaggggcctgggttatccctgagacagggccttgagctgctagaaactatgctagtgtttgttcaagtctctccgtgtccggggtgagcaaaattgtttgtgctgaaaatcaatgatttgcagctctcaagattccagtgggcagtctgggtgggcctgagtttctgctttttttttttctttatgtacagggtcttgctctgtcacctaggctagagtgtaattagtggccccagtcatggctcactgcagctgcaaactggctgcaagctgttctggctcagcctaccangttactgggcttacaggtggatgccaccgtacccaacagattttatttttgtagggatgggggtctccctgtattgcccaggctggtctcaaactcctggcctcccaangtgtttagattncaggtgtaagccaccacacgtggccagcctctgcatttctaacaggttccaggtgatcttgatgttctgctggtccatgggtcacactttgagaagcatggttctaaaggactatacagattaaagtcattaatctctgtgggctttggacttgaagtttcagcagcctttgacaagcatttgcaggtttcctttttatttatttgataaactgagaatccacatgcaaagaaatgcaagaaaattcaaagaacgtaagaaaatgtccttgctgtaaagctggtggttctcaatctcggatacacagtagaatcacctggtgcgggggttgggggcggggtgcagtgtaaaaattattaaatcagaatctctggggtaggccccaagcaacttttttttttttttttttagatagaatcttgcttgtcacctaggctaggagtgcagtggtgcaatcatggctcactgccgccttaacttctgggctcaagtgatatcctcccgacctcagcctccctagtagctgggactacaggcgtggactaccacacccaacaaatttttaaattttttgtagaggcaagctcttatactatcttgcacaggctggtctcgaactcctgggctcaagcagtcatcctgcctcagccttccaaagctcagggattacagacatgagccacagcaccaggccaacaatatttcttaaagctcctggagtgattccaatatgcagccaaggttgaaaaccaccctttaaaaggctcggcatccagtgtggaagaccagcacactcacgtcaggagaccttacctggagccaggatgcccctgatcatctctgataactttaaaaggaaggcctcagaagcagccccagaagcaaaagtttctctctgaccttctcctgccctcttgtttctggcttttcattctcccccaaggctacccatagaaactagaatccctcttccccaaggcaggtcatcagaaaccagaaccggttttacccaaagccagccataaaacctaaaaatagtcctctcactccccattcccctttctgtgtaaaaactggttggaaagaaatgatctgacctaccgtgtttgactgtcgtaagatacccattccagagagggtcccaccccgtgcccagaaggaaggaatcctgcacagagaggccaagaagaatctagacagccttgctgggtttcccctctcagtctattactattagatcatacccttcttgtccaatcatatttctacacagtccataatctgttgaacctaaacataaaaatggacaattcccctgtatcttggggtcttcattctgagggctcacatacaattatgatcaaataaatttgtttgctttttctcctgttaa

SEQ ID NO: 456021 - DNA, 4577 bp, Homo sapiens
  misc_feature (3063)..(3063): n is a, c, g, or t
  misc_feature (3172)..(3172): n is a, c, g, or t
  misc_feature (3184)..(3184): n is a, c, g, or t
gaggtgctggctgcgtgctactttctttttatttttttgagacagagtctcgctcacaccactgtattccagcctgggtgactgagactctaactaaaaaaaaaaaaaaaaaaaaattgattgctgtgcctcattacaaatgcatatgatgtttgagtgctgttgtttgaaattatttttcttttcgggtcttcaaaaattcaagaaaagttgatgattgacttgaagattacaaaatttaaggttttttggcatgtgtgttttctattaataattggttatatgatgtcaaagtaatactttcataatagaattgacatgctctgggatagtttgacaaaggtaaattataaagtgaaatctcttgtttcattatcttccattctaacctcagagatctgtttctctagaaaaaatgtccatctctggctttaataaaattatgcatcagaaatcacctgtatgtataagattttctgataaaactaataattatatttaccatataattggctgaaagtaaaaaaagtcagcattctccatggctgaggggtaaagtgcctcgggggattcctctggttctagctatctaagtggtttgaaaatgaccaggaaaaattcatcctgtcattcacgttagtaattttgctgtctttcctagaggaatgactttggtgtttaaaattggtagctgtttttctattggtcttttagcctaatttggcaaatcagaagaaaggacatagagatgatgaaatataactttatcttttttgtttgaattttgtcgtgtaagtttgagtgacatcatcaagacctaccagggagctcggccacagggagtctactcaaggcatcaaactggcccaggagtagaaaggtgggggtggaaataggaaatagtgtttacccaggggactggcccagccaggaggagaaaggaatcagtgtttacccaggaaagcaagaatggatactgatgttggaggtaaagctgggaaagtaggagagcatcgggattgagtatgcagagtgagttagggttgagtggttcgggactaagacccactaagaccatgcctgcacctgacttcatgtagcagtggttgcatggggtatgcatgggcccttaaagggctgggcttctgcagcatttgaggccatagcctttggtacttgcacagggttggtacctgtcatccttgggactccagctactgataggataactcagtacctaaacttagaactttaatacctaagacacttgatggtgaaacagttctcttgcaactaaagaagaacctgaggtcaggtgtggtggctcacgcctgtaatcctagcactttgggaagtcgaggtagaaggatcacttgaggtcaggagttcgagaccagcctggccagcatggtgaaaccccatctctactaaaaatacaaaatattagacagacggggtggtacatgcctgtaatcccagctacttgggaggctgaggcaggagaatcgcttgaacccaggaggcagaggttgcagtgagccgagatcgtgccactgcactccagcttgggcaacaagagcgaaactccatatcaaaaaaaaaaacctgagaggacattgcaccaatggagatgcatcaagagaaacatgtttggttttttgtgagctctcaccaacttttttcccctgggtcctcacgtgcagtgtggtcttctctttctgattagcatgtcattttggaaagagcactggattgagtcatgaggcataatcaatttctagtttaccagtgtgatcttaagcaaagatctaactcattggcaaaatgggcgtgattccttcccattcagggctgtttatgataagtcactgagggaatgataaatattatgacactgcttctcagactgtaatgtacatgcacatcacataaggaccttattaaaatggagacttaaaaagctggacgctaaaggcaataatgacagattttactcaataactactgcagaaggagagagtcctcagtatagaactgagcttagctccaatctgtgcagaggtgatggaattttaaagaggggagggaggaggttcaaatagaactagggaagtgcaaaattacaaaaagctggtaaggagattggtcaatgtgattcggctatctgtgtctactaactctcaaatttatttatcaaagttaggatcctagcctcccacagagaccaggagtcggccttatcattcctgataattatatgacaaagggatggctcccagaaaaagtgagaaacacattcctgtgcagcagaagatacatatatcccccaaagggacagaaaggatttacaattgtaaattttataaagtatgtcctctaagaagagggagggactgggtgccatggctcatgcctataatcccagcactttgggtggccaaggtgggtgcatcacctgaggtcaggagttcaagagcagcctggccaacatggtgaaaccctgtctctactaaaaatacaaaagttagcctgttgtggtggcgcgcacctgtaatcccagctactcgggtggctgaggcaggagaatcgcttgaacccaggaggcggagggtgcagtgagccgggatcacgccactgcacttcagcctgggtgacagagtgtgactccatctcaagaaaaacgagggagattagaaacctatgatcaggcattggctgaaacaaatggtaaattcttttggcagccttgagcttccccaggcagggacccaaaggggcctgggttatccctgagacagggccttgagctgctagaaactatgctagtgtttgttcaagtctctccgtgtccggggtgagcaaaattgtttgtgctgaaaatcaatgatttgcagctctcaagattccagtgggcagtctgggtgggcctgagtttctgctttttttttttctttatgtacagggtcttgctctgtcacctaggctagagtgtaattagtggccccagtcatggctcactgcagctgcaaactggctgcaagctgttctggctcagcctaccangttactgggcttacaggtggatgccaccgtacccaacagattttatttttgtagggatgggggtctccctgtattgcccaggctggtctcaaactcctggcctcccaangtgtttagattncaggtgtaagccaccacacgtggccagcctctgcatttctaacaggttccaggtgatcttgatgttctgctggtccatgggtcacactttgagaagcatggttctaaaggactatacagattaaagtcattaatctctgtgggctttggacttgaagtttcagcagcctttgacaagcatttgcaggtttcctttttatttatttgataaactgagaatccacatgcaaagaaatgcaagaaaattcaaagaacgtaagaaaatgtccttgctgtaaagctggtggttctcaatctcggatacacagtagaatcacctggtgcgggggttgggggcggggtgcagtgtaaaaattattaaatcagaatctctggggtaggccccaagcaacttttttttttttttttttagatagaatcttgcttgtcacctaggctaggagtgcagtggtgcaatcatggctcactgccgccttaacttctgggctcaagtgatatcctcccgacctcagcctccctagtagctgggactacaggcgtggactaccacacccaacaaatttttaaattttttgtagaggcaagctcttatactatcttgcacaggctggtctcgaactcctgggctcaagcagtcatcctgcctcagccttccaaagctcagggattacagacatgagccacagcaccaggccaacaatatttcttaaagctcctggagtgattccaatatgcagccaaggttgaaaaccaccctttaaaaggctcggcatccagtgtggaagaccagcacactcacgtcaggagaccttacctggagccaggatgcccctgatcatctctgataactttaaaaggaaggcctcagaagcagccccagaagcaaaagtttctctctgaccttctcctgccctcttgtttctggcttttcattctcccccaaggctacccatagaaactagaatccctcttccccaaggcaggtcatcagaaaccagaaccggttttacccaaagccagccataaaacctaaaaatagtcctctcactccccattcccctttctgtgtaaaaactggttggaaagaaatgatctgacctaccgtgtttgactgtcgtaagatacccattccagagagggtcccaccccgtgcccagaaggaaggaatcctgcacagagaggccaagaagaatctagacagccttgctgggtttcccctctcagtctattactattagatcatacccttcttgtccaatcatatttctacacagtccataatctgttgaacctaaacataaaaatggacaattcccctgtatcttggggtcttcattctgagggctcacatacaattatgatcaaataaatttgtttgctttttctcctgttaa

SEQ ID NO: 456022 - DNA, 5868 bp, Homo sapiens
  misc_feature (4354)..(4354): n is a, c, g, or t
  misc_feature (4463)..(4463): n is a, c, g, or t
  misc_feature (4475)..(4475): n is a, c, g, or t
agcggacatggcggtggcgcggtagcgcgcgatgcagcacaggctagaggctgcgcaagcgcggggcccgcccctgggaccctccgggccgggcggtttggccccttagcgcccgggcgtcggggcggtaaaaggccggcagaagggaggcacttgagaaatgtctttcctccaggacccaagtttcttcaccatggggatgtggtccattggtgcaggagccctgggggctgctgccttggcattgctgcttgccaacacagacgtgtttctgtccaagccccagaaagcggccctggagtacctggaggatatagacctgaaaacactggagaaggaaccaaggactttcaaagcaaaggagctatgggaaaaaaatggagctgtgattatggccgtgcggaggccaggctgtttcctctgtcgagaggaagctgcggatctgtcctccctgaaaagcatgttggaccagctgggcgtccccctctatgcagtggtaaaggagcacatcaggactgaagtgaaggatttccagccttatttcaaaggagaaatcttcctggatgaaaagaaaaagttctatggtccacaaaggcggaagatgatgtttatgggatttatccgtctgggagtgtggtacaacttcttccgagcctggaacggaggcttctctggaaacctggaaggagaaggcttcatccttgggggagttttcgtggtgggatcaggaaagcagggcattcttcttgagcaccgagaaaaagaatttggagacaaagtaaacctactttctgttctggaagctgctaagatgatcaaaccacagactttggcctcagagaaaaaatgattgtgtgaaactgcccagctcagggataaccagggacattcacctgtgttcatgggatgtattgtttccactcgtgtccctaaggagtgagaaacccatttatactctactctcagtatggattattaatgtattttaatattctgtttaggcccactaaggcaaaatagccccaaaacaagactgacaaaaatctgaaaaactaatgaggattattaagctaaaacctgggaaataggaggcttaaaattgactgccaggctgggtgcagtggctcacacctgtaatcccagcactttgggaggccaaggtgagcaagtcacttgaggtcgggagttcgagaccagcctgagcaacatggcgaaaccccgtctctactaaaaatacaaaaatcacccgggtgtggtggcaggcacctgtagtcccagctacccgggaggctgaggcaggagaatcacttgaacctgggaggtggaggttgcggtgagctgagatcacaccactgtattccagcctgggtgactgagactctaactaaaaaaaaaaaaaaaaaaaaattgattgctgtgcctcattacaaatgcatatgatgtttgagtgctgttgtttgaaattatttttcttttcgggtcttcaaaaattcaagaaaagttgatgattgacttgaagattacaaaatttaaggttttttggcatgtgtgttttctattaataattggttatatgatgtcaaagtaatactttcataatagaattgacatgctctgggatagtttgacaaaggtaaattataaagtgaaatctcttgtttcattatcttccattctaacctcagagatctgtttctctagaaaaaatgtccatctctggctttaataaaattatgcatcagaaatcacctgtatgtataagattttctgataaaactaataattatatttaccatataattggctgaaagtaaaaaaagtcagcattctccatggctgaggggtaaagtgcctcgggggattcctctggttctagctatctaagtggtttgaaaatgaccaggaaaaattcatcctgtcattcacgttagtaattttgctgtctttcctagaggaatgactttggtgtttaaaattggtagctgtttttctattggtcttttagcctaatttggcaaatcagaagaaaggacatagagatgatgaaatataactttatcttttttgtttgaattttgtcgtgtaagtttgagtgacatcatcaagacctaccagggagctcggccacagggagtctactcaaggcatcaaactggcccaggagtagaaaggtgggggtggaaataggaaatagtgtttacccaggggactggcccagccaggaggagaaaggaatcagtgtttacccaggaaagcaagaatggatactgatgttggaggtaaagctgggaaagtaggagagcatcgggattgagtatgcagagtgagttagggttgagtggttcgggactaagacccactaagaccatgcctgcacctgacttcatgtagcagtggttgcatggggtatgcatgggcccttaaagggctgggcttctgcagcatttgaggccatagcctttggtacttgcacagggttggtacctgtcatccttgggactccagctactgataggataactcagtacctaaacttagaactttaatacctaagacacttgatggtgaaacagttctcttgcaactaaagaagaacctgaggtcaggtgtggtggctcacgcctgtaatcctagcactttgggaagtcgaggtagaaggatcacttgaggtcaggagttcgagaccagcctggccagcatggtgaaaccccatctctactaaaaatacaaaatattagacagacggggtggtacatgcctgtaatcccagctacttgggaggctgaggcaggagaatcgcttgaacccaggaggcagaggttgcagtgagccgagatcgtgccactgcactccagcttgggcaacaagagcgaaactccatatcaaaaaaaaaaacctgagaggacattgcaccaatggagatgcatcaagagaaacatgtttggttttttgtgagctctcaccaacttttttcccctgggtcctcacgtgcagtgtggtcttctctttctgattagcatgtcattttggaaagagcactggattgagtcatgaggcataatcaatttctagtttaccagtgtgatcttaagcaaagatctaactcattggcaaaatgggcgtgattccttcccattcagggctgtttatgataagtcactgagggaatgataaatattatgacactgcttctcagactgtaatgtacatgcacatcacataaggaccttattaaaatggagacttaaaaagctggacgctaaaggcaataatgacagattttactcaataactactgcagaaggagagagtcctcagtatagaactgagcttagctccaatctgtgcagaggtgatggaattttaaagaggggagggaggaggttcaaatagaactagggaagtgcaaaattacaaaaagctggtaaggagattggtcaatgtgattcggctatctgtgtctactaactctcaaatttatttatcaaagttaggatcctagcctcccacagagaccaggagtcggccttatcattcctgataattatatgacaaagggatggctcccagaaaaagtgagaaacacattcctgtgcagcagaagatacatatatcccccaaagggacagaaaggatttacaattgtaaattttataaagtatgtcctctaagaagagggagggactgggtgccatggctcatgcctataatcccagcactttgggtggccaaggtgggtgcatcacctgaggtcaggagttcaagagcagcctggccaacatggtgaaaccctgtctctactaaaaatacaaaagttagcctgttgtggtggcgcgcacctgtaatcccagctactcgggtggctgaggcaggagaatcgcttgaacccaggaggcggagggtgcagtgagccgggatcacgccactgcacttcagcctgggtgacagagtgtgactccatctcaagaaaaacgagggagattagaaacctatgatcaggcattggctgaaacaaatggtaaattcttttggcagccttgagcttccccaggcagggacccaaaggggcctgggttatccctgagacagggccttgagctgctagaaactatgctagtgtttgttcaagtctctccgtgtccggggtgagcaaaattgtttgtgctgaaaatcaatgatttgcagctctcaagattccagtgggcagtctgggtgggcctgagtttctgctttttttttttctttatgtacagggtcttgctctgtcacctaggctagagtgtaattagtggccccagtcatggctcactgcagctgcaaactggctgcaagctgttctggctcagcctaccangttactgggcttacaggtggatgccaccgtacccaacagattttatttttgtagggatgggggtctccctgtattgcccaggctggtctcaaactcctggcctcccaangtgtttagattncaggtgtaagccaccacacgtggccagcctctgcatttctaacaggttccaggtgatcttgatgttctgctggtccatgggtcacactttgagaagcatggttctaaaggactatacagattaaagtcattaatctctgtgggctttggacttgaagtttcagcagcctttgacaagcatttgcaggtttcctttttatttatttgataaactgagaatccacatgcaaagaaatgcaagaaaattcaaagaacgtaagaaaatgtccttgctgtaaagctggtggttctcaatctcggatacacagtagaatcacctggtgcgggggttgggggcggggtgcagtgtaaaaattattaaatcagaatctctggggtaggccccaagcaacttttttttttttttttttagatagaatcttgcttgtcacctaggctaggagtgcagtggtgcaatcatggctcactgccgccttaacttctgggctcaagtgatatcctcccgacctcagcctccctagtagctgggactacaggcgtggactaccacacccaacaaatttttaaattttttgtagaggcaagctcttatactatcttgcacaggctggtctcgaactcctgggctcaagcagtcatcctgcctcagccttccaaagctcagggattacagacatgagccacagcaccaggccaacaatatttcttaaagctcctggagtgattccaatatgcagccaaggttgaaaaccaccctttaaaaggctcggcatccagtgtggaagaccagcacactcacgtcaggagaccttacctggagccaggatgcccctgatcatctctgataactttaaaaggaaggcctcagaagcagccccagaagcaaaagtttctctctgaccttctcctgccctcttgtttctggcttttcattctcccccaaggctacccatagaaactagaatccctcttccccaaggcaggtcatcagaaaccagaaccggttttacccaaagccagccataaaacctaaaaatagtcctctcactccccattcccctttctgtgtaaaaactggttggaaagaaatgatctgacctaccgtgtttgactgtcgtaagatacccattccagagagggtcccaccccgtgcccagaaggaaggaatcctgcacagagaggccaagaagaatctagacagccttgctgggtttcccctctcagtctattactattagatcatacccttcttgtccaatcatatttctacacagtccataatctgttgaacctaaacataaaaatggacaattcccctgtatcttggggtcttcattctgagggctcacatacaattatgatcaaataaatttgtttgctttttctcctgttaa

SEQ ID NO: 456023 - DNA, 1748 bp, Homo sapiens
agcggacatggcggtggcgcggtagcgcgcgatgcagcacaggctagaggctgcgcaagcgcggggcccgcccctgggaccctccgggccgggcggtttggccccttagcgcccgggcgtcggggcggtaaaaggccggcagaagggaggcacttgagaaatgtctttcctccaggacccaagtttcttcaccatggggatgtggtccattggtgcaggagccctgggggctgctgccttggcattgctgcttgccaacacagacgtgtttctgtccaagccccagaaagcggccctggagtacctggaggatatagacctgaaaacactggagaaggaaccaaggactttcaaagcaaaggagctatgggaaaaaaatggagctgtgattatggccgtgcggaggccaggctgtttcctctgtcgagaggaagctgcggatctgtcctccctgaaaagcatgttggaccagctgggcgtccccctctatgcagtggtaaaggagcacatcaggactgaagtgaaggatttccagccttatttcaaaggagaaatcttcctggatgaaaagaaaaagttctatggtccacaaaggcggaagatgatgtttatgggatttatccgtctgggagtgtggtacaacttcttccgagcctggaacggaggcttctctggaaacctggaaggagaaggcttcatccttgggggagttttcgtggtgggatcaggaaagcagggcattcttcttgagcaccgagaaaaagaatttggagacaaagtaaacctactttctgttctggaagctgctaagatgatcaaaccacagactttggcctcagagaaaaaatgattgtgtgaaactgcccagctcagggataaccagggacattcacctgtgttcatgggatgtattgtttccactcgtgtccctaaggagtgagaaacccatttatactctactctcagtatggattattaatgtattttaatattctgtttaggcccactaaggcaaaatagccccaaaacaagactgacaaaaatctgaaaaactaatgaggattattaagctaaaacctgggaaataggaggcttaaaattgactgccaggctgggtgcagtggctcacacctgtaatcccagcactttgggaggccaaggtgagcaagtcacttgaggtcgggagttcgagaccagcctgagcaacatggcgaaaccccgtctctactaaaaatacaaaaatcacccgggtgtggtggcaggcacctgtagtcccagctacccgggaggctgaggcaggagaatcacttgaacctgggaggtggaggttgcggtgagctgagatcacaccactgtattccagcctgggtgactgagactctaactaaaaaaaaaaaaaaaaaaaaattgattgctgtgcctcattacaaatgcatatgatgtttgagtgctgttgtttgaaattatttttcttttcgggtcttcaaaaattcaagaaaagttgatgattgacttgaagattacaaaatttaaggttttttggcatgtgtgttttctattaataattggttatatgatgtcaaagtaatactttcataatagaattgacatgctctgggatagtttgacaaaggtaaattataaagtgaaatctcttgtttcattatcttccattctaacctcagagatctgtttctctagaaaaaatgtccatctctggctttaataaaattatgcatcagaaatca

SEQ ID NO: 456024 - DNA, 5992 bp, Homo sapiens
  misc_feature (4478)..(4478): n is a, c, g, or t
  misc_feature (4587)..(4587): n is a, c, g, or t
  misc_feature (4599)..(4599): n is a, c, g, or t
gtagctgggactacgggtgcgcgccaccacacccggctaatttttgtatttttagtagagacgaggttttgccatgttggtcaggctggtctcgaactcctgccctcaagtgatctgcccgccttggcttcccaaagtgttgggattacaggcatgagacaactggtcttgaactcctgggctcaagcgatcctcccaaagccctgagattacaggcgtgagccagcgcgccggacacaacctcctactttcatgaaagagtgggcacttccaacaggaggaaaatgtctttcctccaggacccaagtttcttcaccatggggatgtggtccattggtgcaggagccctgggggctgctgccttggcattgctgcttgccaacacagacgtgtttctgtccaagccccagaaagcggccctggagtacctggaggatatagacctgaaaacactggagaaggaaccaaggactttcaaagcaaaggagctatgggaaaaaaatggagctgtgattatggccgtgcggaggccaggctgtttcctctgtcgagaggaagctgcggatctgtcctccctgaaaagcatgttggaccagctgggcgtccccctctatgcagtggtaaaggagcacatcaggactgaagtgaaggatttccagccttatttcaaaggagaaatcttcctggatgaaaagaaaaagttctatggtccacaaaggcggaagatgatgtttatgggatttatccgtctgggagtgtggtacaacttcttccgagcctggaacggaggcttctctggaaacctggaaggagaaggcttcatccttgggggagttttcgtggtgggatcaggaaagcagggcattcttcttgagcaccgagaaaaagaatttggagacaaagtaaacctactttctgttctggaagctgctaagatgatcaaaccacagactttggcctcagagaaaaaatgattgtgtgaaactgcccagctcagggataaccagggacattcacctgtgttcatgggatgtattgtttccactcgtgtccctaaggagtgagaaacccatttatactctactctcagtatggattattaatgtattttaatattctgtttaggcccactaaggcaaaatagccccaaaacaagactgacaaaaatctgaaaaactaatgaggattattaagctaaaacctgggaaataggaggcttaaaattgactgccaggctgggtgcagtggctcacacctgtaatcccagcactttgggaggccaaggtgagcaagtcacttgaggtcgggagttcgagaccagcctgagcaacatggcgaaaccccgtctctactaaaaatacaaaaatcacccgggtgtggtggcaggcacctgtagtcccagctacccgggaggctgaggcaggagaatcacttgaacctgggaggtggaggttgcggtgagctgagatcacaccactgtattccagcctgggtgactgagactctaactaaaaaaaaaaaaaaaaaaaaattgattgctgtgcctcattacaaatgcatatgatgtttgagtgctgttgtttgaaattatttttcttttcgggtcttcaaaaattcaagaaaagttgatgattgacttgaagattacaaaatttaaggttttttggcatgtgtgttttctattaataattggttatatgatgtcaaagtaatactttcataatagaattgacatgctctgggatagtttgacaaaggtaaattataaagtgaaatctcttgtttcattatcttccattctaacctcagagatctgtttctctagaaaaaatgtccatctctggctttaataaaattatgcatcagaaatcacctgtatgtataagattttctgataaaactaataattatatttaccatataattggctgaaagtaaaaaaagtcagcattctccatggctgaggggtaaagtgcctcgggggattcctctggttctagctatctaagtggtttgaaaatgaccaggaaaaattcatcctgtcattcacgttagtaattttgctgtctttcctagaggaatgactttggtgtttaaaattggtagctgtttttctattggtcttttagcctaatttggcaaatcagaagaaaggacatagagatgatgaaatataactttatcttttttgtttgaattttgtcgtgtaagtttgagtgacatcatcaagacctaccagggagctcggccacagggagtctactcaaggcatcaaactggcccaggagtagaaaggtgggggtggaaataggaaatagtgtttacccaggggactggcccagccaggaggagaaaggaatcagtgtttacccaggaaagcaagaatggatactgatgttggaggtaaagctgggaaagtaggagagcatcgggattgagtatgcagagtgagttagggttgagtggttcgggactaagacccactaagaccatgcctgcacctgacttcatgtagcagtggttgcatggggtatgcatgggcccttaaagggctgggcttctgcagcatttgaggccatagcctttggtacttgcacagggttggtacctgtcatccttgggactccagctactgataggataactcagtacctaaacttagaactttaatacctaagacacttgatggtgaaacagttctcttgcaactaaagaagaacctgaggtcaggtgtggtggctcacgcctgtaatcctagcactttgggaagtcgaggtagaaggatcacttgaggtcaggagttcgagaccagcctggccagcatggtgaaaccccatctctactaaaaatacaaaatattagacagacggggtggtacatgcctgtaatcccagctacttgggaggctgaggcaggagaatcgcttgaacccaggaggcagaggttgcagtgagccgagatcgtgccactgcactccagcttgggcaacaagagcgaaactccatatcaaaaaaaaaaacctgagaggacattgcaccaatggagatgcatcaagagaaacatgtttggttttttgtgagctctcaccaacttttttcccctgggtcctcacgtgcagtgtggtcttctctttctgattagcatgtcattttggaaagagcactggattgagtcatgaggcataatcaatttctagtttaccagtgtgatcttaagcaaagatctaactcattggcaaaatgggcgtgattccttcccattcagggctgtttatgataagtcactgagggaatgataaatattatgacactgcttctcagactgtaatgtacatgcacatcacataaggaccttattaaaatggagacttaaaaagctggacgctaaaggcaataatgacagattttactcaataactactgcagaaggagagagtcctcagtatagaactgagcttagctccaatctgtgcagaggtgatggaattttaaagaggggagggaggaggttcaaatagaactagggaagtgcaaaattacaaaaagctggtaaggagattggtcaatgtgattcggctatctgtgtctactaactctcaaatttatttatcaaagttaggatcctagcctcccacagagaccaggagtcggccttatcattcctgataattatatgacaaagggatggctcccagaaaaagtgagaaacacattcctgtgcagcagaagatacatatatcccccaaagggacagaaaggatttacaattgtaaattttataaagtatgtcctctaagaagagggagggactgggtgccatggctcatgcctataatcccagcactttgggtggccaaggtgggtgcatcacctgaggtcaggagttcaagagcagcctggccaacatggtgaaaccctgtctctactaaaaatacaaaagttagcctgttgtggtggcgcgcacctgtaatcccagctactcgggtggctgaggcaggagaatcgcttgaacccaggaggcggagggtgcagtgagccgggatcacgccactgcacttcagcctgggtgacagagtgtgactccatctcaagaaaaacgagggagattagaaacctatgatcaggcattggctgaaacaaatggtaaattcttttggcagccttgagcttccccaggcagggacccaaaggggcctgggttatccctgagacagggccttgagctgctagaaactatgctagtgtttgttcaagtctctccgtgtccggggtgagcaaaattgtttgtgctgaaaatcaatgatttgcagctctcaagattccagtgggcagtctgggtgggcctgagtttctgctttttttttttctttatgtacagggtcttgctctgtcacctaggctagagtgtaattagtggccccagtcatggctcactgcagctgcaaactggctgcaagctgttctggctcagcctaccangttactgggcttacaggtggatgccaccgtacccaacagattttatttttgtagggatgggggtctccctgtattgcccaggctggtctcaaactcctggcctcccaangtgtttagattncaggtgtaagccaccacacgtggccagcctctgcatttctaacaggttccaggtgatcttgatgttctgctggtccatgggtcacactttgagaagcatggttctaaaggactatacagattaaagtcattaatctctgtgggctttggacttgaagtttcagcagcctttgacaagcatttgcaggtttcctttttatttatttgataaactgagaatccacatgcaaagaaatgcaagaaaattcaaagaacgtaagaaaatgtccttgctgtaaagctggtggttctcaatctcggatacacagtagaatcacctggtgcgggggttgggggcggggtgcagtgtaaaaattattaaatcagaatctctggggtaggccccaagcaacttttttttttttttttttagatagaatcttgcttgtcacctaggctaggagtgcagtggtgcaatcatggctcactgccgccttaacttctgggctcaagtgatatcctcccgacctcagcctccctagtagctgggactacaggcgtggactaccacacccaacaaatttttaaattttttgtagaggcaagctcttatactatcttgcacaggctggtctcgaactcctgggctcaagcagtcatcctgcctcagccttccaaagctcagggattacagacatgagccacagcaccaggccaacaatatttcttaaagctcctggagtgattccaatatgcagccaaggttgaaaaccaccctttaaaaggctcggcatccagtgtggaagaccagcacactcacgtcaggagaccttacctggagccaggatgcccctgatcatctctgataactttaaaaggaaggcctcagaagcagccccagaagcaaaagtttctctctgaccttctcctgccctcttgtttctggcttttcattctcccccaaggctacccatagaaactagaatccctcttccccaaggcaggtcatcagaaaccagaaccggttttacccaaagccagccataaaacctaaaaatagtcctctcactccccattcccctttctgtgtaaaaactggttggaaagaaatgatctgacctaccgtgtttgactgtcgtaagatacccattccagagagggtcccaccccgtgcccagaaggaaggaatcctgcacagagaggccaagaagaatctagacagccttgctgggtttcccctctcagtctattactattagatcatacccttcttgtccaatcatatttctacacagtccataatctgttgaacctaaacataaaaatggacaattcccctgtatcttggggtcttcattctgagggctcacatacaattatgatcaaataaatttgtttgctttttctcctgttaa

SEQ ID NO: 456025 - DNA, 1401 bp, Homo sapiens
  misc_feature (1348)..(1348): n is a, c, g, or t
  misc_feature (1356)..(1356): n is a, c, g, or t
agcggacatggcggtggcgcggtagcgcgcgatgcagcacaggctagaggctgcgcaagcgcggggcccgcccctgggaccctccgggccgggcggtttggccccttagcgcccgggcgtcggggcggtaaaaggccggcagaagggaggcacttgagaaatgtctttcctccaggacccaagtttcttcaccatggggatgtggtccattggtgcaggagccctgggggctgctgccttggcattgctgcttgccaacacagacgtgtttctgtccaagccccagaaagcggccctggagtacctggaggatatagacctgaaaacactggagaaggaaccaaggactttcaaagcaaaggagctatgggaaaaaaatggagctgtgattatggccgtgcggaggccaggctgtttcctctgtcgagaggaagctgcggatctgtcctccctgaaaagcatgttggaccagctgggcgtccccctctatgcagtggtaaaggagcacatcaggactgaagtgaaggatttccagccttatttcaaaggagaaatcttcctggatgaaaagaaaaagttctatggtccacaaaggcggaagatgatgtttatgggatttatccgtctgggagtgtggtacaacttcttccgagcctggaacggaggcttctctggaaacctggaaggagaaggcttcatccttgggggagttttcgtggtgggatcaggaaagcagggcattcttcttgagcaccgagaaaaagaatttggagacaaagtaaacctactttctgttctggaagctgctaagatgatcaaaccacagactttggcctcagagaaaaaatgattgtgtgaaactgcccagctcagggataaccagggacattcacctgtgttcatgggatgtattgtttccactcgtgtccctaaggagtgagaaacccatttatactctactctcagtatggattattaatgtattttaatattctgtttaggcccactaaggcaaaatagccccaaaacaagactgacaaaaatctgaaaaactaatgaggattattaagctaaaacctgggaaataggaggcttaaaattgactgccaggctgggtgcagtggctcacacctgtaatcccagcactttgggaggccaaggtgagcaagtcacttgaggtcgggagttcgagaccagcctgagcaacatggcgaaaccccgtctctactaaaaatacaaaaatcacccgggtgtggtggcaggcacctgtagtcccagctacccgggaggctgaggcaggagaatcacttgaacctgggaggtggaggttgcggtgagctgagatctngaggagantcaacttaacaaacgtggagggccaagcctgcgttctgagtttcc

SEQ ID NO: 456026 - DNA, 5670 bp, Homo sapiens
  misc_feature (4156)..(4156): n is a, c, g, or t
  misc_feature (4265)..(4265): n is a, c, g, or t
  misc_feature (4277)..(4277): n is a, c, g, or t
attccctgctctgaggaacagtgtgaaaaaaagtcttttaggagatttacaatatctgttcttttgctcatcttagaccacagactgactttgaaattatgttaagtgaaatatcaatgaaaataaagtttactataaataaccaaggactttcaaagcaaaggagctatgggaaaaaaatggagctgtgattatggccgtgcggaggccaggctgtttcctctgtcgagaggaagctgcggatctgtcctccctgaaaagcatgttggaccagctgggcgtccccctctatgcagtggtaaaggagcacatcaggactgaagtgaaggatttccagccttatttcaaaggagaaatcttcctggatgaaaagaaaaagttctatggtccacaaaggcggaagatgatgtttatgggatttatccgtctgggagtgtggtacaacttcttccgagcctggaacggaggcttctctggaaacctggaaggagaaggcttcatccttgggggagttttcgtggtgggatcaggaaagcagggcattcttcttgagcaccgagaaaaagaatttggagacaaagtaaacctactttctgttctggaagctgctaagatgatcaaaccacagactttggcctcagagaaaaaatgattgtgtgaaactgcccagctcagggataaccagggacattcacctgtgttcatgggatgtattgtttccactcgtgtccctaaggagtgagaaacccatttatactctactctcagtatggattattaatgtattttaatattctgtttaggcccactaaggcaaaatagccccaaaacaagactgacaaaaatctgaaaaactaatgaggattattaagctaaaacctgggaaataggaggcttaaaattgactgccaggctgggtgcagtggctcacacctgtaatcccagcactttgggaggccaaggtgagcaagtcacttgaggtcgggagttcgagaccagcctgagcaacatggcgaaaccccgtctctactaaaaatacaaaaatcacccgggtgtggtggcaggcacctgtagtcccagctacccgggaggctgaggcaggagaatcacttgaacctgggaggtggaggttgcggtgagctgagatcacaccactgtattccagcctgggtgactgagactctaactaaaaaaaaaaaaaaaaaaaaattgattgctgtgcctcattacaaatgcatatgatgtttgagtgctgttgtttgaaattatttttcttttcgggtcttcaaaaattcaagaaaagttgatgattgacttgaagattacaaaatttaaggttttttggcatgtgtgttttctattaataattggttatatgatgtcaaagtaatactttcataatagaattgacatgctctgggatagtttgacaaaggtaaattataaagtgaaatctcttgtttcattatcttccattctaacctcagagatctgtttctctagaaaaaatgtccatctctggctttaataaaattatgcatcagaaatcacctgtatgtataagattttctgataaaactaataattatatttaccatataattggctgaaagtaaaaaaagtcagcattctccatggctgaggggtaaagtgcctcgggggattcctctggttctagctatctaagtggtttgaaaatgaccaggaaaaattcatcctgtcattcacgttagtaattttgctgtctttcctagaggaatgactttggtgtttaaaattggtagctgtttttctattggtcttttagcctaatttggcaaatcagaagaaaggacatagagatgatgaaatataactttatcttttttgtttgaattttgtcgtgtaagtttgagtgacatcatcaagacctaccagggagctcggccacagggagtctactcaaggcatcaaactggcccaggagtagaaaggtgggggtggaaataggaaatagtgtttacccaggggactggcccagccaggaggagaaaggaatcagtgtttacccaggaaagcaagaatggatactgatgttggaggtaaagctgggaaagtaggagagcatcgggattgagtatgcagagtgagttagggttgagtggttcgggactaagacccactaagaccatgcctgcacctgacttcatgtagcagtggttgcatggggtatgcatgggcccttaaagggctgggcttctgcagcatttgaggccatagcctttggtacttgcacagggttggtacctgtcatccttgggactccagctactgataggataactcagtacctaaacttagaactttaatacctaagacacttgatggtgaaacagttctcttgcaactaaagaagaacctgaggtcaggtgtggtggctcacgcctgtaatcctagcactttgggaagtcgaggtagaaggatcacttgaggtcaggagttcgagaccagcctggccagcatggtgaaaccccatctctactaaaaatacaaaatattagacagacggggtggtacatgcctgtaatcccagctacttgggaggctgaggcaggagaatcgcttgaacccaggaggcagaggttgcagtgagccgagatcgtgccactgcactccagcttgggcaacaagagcgaaactccatatcaaaaaaaaaaacctgagaggacattgcaccaatggagatgcatcaagagaaacatgtttggttttttgtgagctctcaccaacttttttcccctgggtcctcacgtgcagtgtggtcttctctttctgattagcatgtcattttggaaagagcactggattgagtcatgaggcataatcaatttctagtttaccagtgtgatcttaagcaaagatctaactcattggcaaaatgggcgtgattccttcccattcagggctgtttatgataagtcactgagggaatgataaatattatgacactgcttctcagactgtaatgtacatgcacatcacataaggaccttattaaaatggagacttaaaaagctggacgctaaaggcaataatgacagattttactcaataactactgcagaaggagagagtcctcagtatagaactgagcttagctccaatctgtgcagaggtgatggaattttaaagaggggagggaggaggttcaaatagaactagggaagtgcaaaattacaaaaagctggtaaggagattggtcaatgtgattcggctatctgtgtctactaactctcaaatttatttatcaaagttaggatcctagcctcccacagagaccaggagtcggccttatcattcctgataattatatgacaaagggatggctcccagaaaaagtgagaaacacattcctgtgcagcagaagatacatatatcccccaaagggacagaaaggatttacaattgtaaattttataaagtatgtcctctaagaagagggagggactgggtgccatggctcatgcctataatcccagcactttgggtggccaaggtgggtgcatcacctgaggtcaggagttcaagagcagcctggccaacatggtgaaaccctgtctctactaaaaatacaaaagttagcctgttgtggtggcgcgcacctgtaatcccagctactcgggtggctgaggcaggagaatcgcttgaacccaggaggcggagggtgcagtgagccgggatcacgccactgcacttcagcctgggtgacagagtgtgactccatctcaagaaaaacgagggagattagaaacctatgatcaggcattggctgaaacaaatggtaaattcttttggcagccttgagcttccccaggcagggacccaaaggggcctgggttatccctgagacagggccttgagctgctagaaactatgctagtgtttgttcaagtctctccgtgtccggggtgagcaaaattgtttgtgctgaaaatcaatgatttgcagctctcaagattccagtgggcagtctgggtgggcctgagtttctgctttttttttttctttatgtacagggtcttgctctgtcacctaggctagagtgtaattagtggccccagtcatggctcactgcagctgcaaactggctgcaagctgttctggctcagcctaccangttactgggcttacaggtggatgccaccgtacccaacagattttatttttgtagggatgggggtctccctgtattgcccaggctggtctcaaactcctggcctcccaangtgtttagattncaggtgtaagccaccacacgtggccagcctctgcatttctaacaggttccaggtgatcttgatgttctgctggtccatgggtcacactttgagaagcatggttctaaaggactatacagattaaagtcattaatctctgtgggctttggacttgaagtttcagcagcctttgacaagcatttgcaggtttcctttttatttatttgataaactgagaatccacatgcaaagaaatgcaagaaaattcaaagaacgtaagaaaatgtccttgctgtaaagctggtggttctcaatctcggatacacagtagaatcacctggtgcgggggttgggggcggggtgcagtgtaaaaattattaaatcagaatctctggggtaggccccaagcaacttttttttttttttttttagatagaatcttgcttgtcacctaggctaggagtgcagtggtgcaatcatggctcactgccgccttaacttctgggctcaagtgatatcctcccgacctcagcctccctagtagctgggactacaggcgtggactaccacacccaacaaatttttaaattttttgtagaggcaagctcttatactatcttgcacaggctggtctcgaactcctgggctcaagcagtcatcctgcctcagccttccaaagctcagggattacagacatgagccacagcaccaggccaacaatatttcttaaagctcctggagtgattccaatatgcagccaaggttgaaaaccaccctttaaaaggctcggcatccagtgtggaagaccagcacactcacgtcaggagaccttacctggagccaggatgcccctgatcatctctgataactttaaaaggaaggcctcagaagcagccccagaagcaaaagtttctctctgaccttctcctgccctcttgtttctggcttttcattctcccccaaggctacccatagaaactagaatccctcttccccaaggcaggtcatcagaaaccagaaccggttttacccaaagccagccataaaacctaaaaatagtcctctcactccccattcccctttctgtgtaaaaactggttggaaagaaatgatctgacctaccgtgtttgactgtcgtaagatacccattccagagagggtcccaccccgtgcccagaaggaaggaatcctgcacagagaggccaagaagaatctagacagccttgctgggtttcccctctcagtctattactattagatcatacccttcttgtccaatcatatttctacacagtccataatctgttgaacctaaacataaaaatggacaattcccctgtatcttggggtcttcattctgagggctcacatacaattatgatcaaataaatttgtttgctttttctcctgttaa

SEQ ID NO: 456027 - DNA, 5556 bp, Homo sapiens
  misc_feature (4042)..(4042): n is a, c, g, or t
  misc_feature (4151)..(4151): n is a, c, g, or t
  misc_feature (4163)..(4163): n is a, c, g, or t
gcctctgctttccactggagaagacaaggagcctgggctgcagagggaacctgacaccctatgtggaggcccacagccagctgggacagatgtccctgaacccttgtgtcttctacaggaagctgcggatctgtcctccctgaaaagcatgttggaccagctgggcgtccccctctatgcagtggtaaaggagcacatcaggactgaagtgaaggatttccagccttatttcaaaggagaaatcttcctggatgaaaagaaaaagttctatggtccacaaaggcggaagatgatgtttatgggatttatccgtctgggagtgtggtacaacttcttccgagcctggaacggaggcttctctggaaacctggaaggagaaggcttcatccttgggggagttttcgtggtgggatcaggaaagcagggcattcttcttgagcaccgagaaaaagaatttggagacaaagtaaacctactttctgttctggaagctgctaagatgatcaaaccacagactttggcctcagagaaaaaatgattgtgtgaaactgcccagctcagggataaccagggacattcacctgtgttcatgggatgtattgtttccactcgtgtccctaaggagtgagaaacccatttatactctactctcagtatggattattaatgtattttaatattctgtttaggcccactaaggcaaaatagccccaaaacaagactgacaaaaatctgaaaaactaatgaggattattaagctaaaacctgggaaataggaggcttaaaattgactgccaggctgggtgcagtggctcacacctgtaatcccagcactttgggaggccaaggtgagcaagtcacttgaggtcgggagttcgagaccagcctgagcaacatggcgaaaccccgtctctactaaaaatacaaaaatcacccgggtgtggtggcaggcacctgtagtcccagctacccgggaggctgaggcaggagaatcacttgaacctgggaggtggaggttgcggtgagctgagatcacaccactgtattccagcctgggtgactgagactctaactaaaaaaaaaaaaaaaaaaaaattgattgctgtgcctcattacaaatgcatatgatgtttgagtgctgttgtttgaaattatttttcttttcgggtcttcaaaaattcaagaaaagttgatgattgacttgaagattacaaaatttaaggttttttggcatgtgtgttttctattaataattggttatatgatgtcaaagtaatactttcataatagaattgacatgctctgggatagtttgacaaaggtaaattataaagtgaaatctcttgtttcattatcttccattctaacctcagagatctgtttctctagaaaaaatgtccatctctggctttaataaaattatgcatcagaaatcacctgtatgtataagattttctgataaaactaataattatatttaccatataattggctgaaagtaaaaaaagtcagcattctccatggctgaggggtaaagtgcctcgggggattcctctggttctagctatctaagtggtttgaaaatgaccaggaaaaattcatcctgtcattcacgttagtaattttgctgtctttcctagaggaatgactttggtgtttaaaattggtagctgtttttctattggtcttttagcctaatttggcaaatcagaagaaaggacatagagatgatgaaatataactttatcttttttgtttgaattttgtcgtgtaagtttgagtgacatcatcaagacctaccagggagctcggccacagggagtctactcaaggcatcaaactggcccaggagtagaaaggtgggggtggaaataggaaatagtgtttacccaggggactggcccagccaggaggagaaaggaatcagtgtttacccaggaaagcaagaatggatactgatgttggaggtaaagctgggaaagtaggagagcatcgggattgagtatgcagagtgagttagggttgagtggttcgggactaagacccactaagaccatgcctgcacctgacttcatgtagcagtggttgcatggggtatgcatgggcccttaaagggctgggcttctgcagcatttgaggccatagcctttggtacttgcacagggttggtacctgtcatccttgggactccagctactgataggataactcagtacctaaacttagaactttaatacctaagacacttgatggtgaaacagttctcttgcaactaaagaagaacctgaggtcaggtgtggtggctcacgcctgtaatcctagcactttgggaagtcgaggtagaaggatcacttgaggtcaggagttcgagaccagcctggccagcatggtgaaaccccatctctactaaaaatacaaaatattagacagacggggtggtacatgcctgtaatcccagctacttgggaggctgaggcaggagaatcgcttgaacccaggaggcagaggttgcagtgagccgagatcgtgccactgcactccagcttgggcaacaagagcgaaactccatatcaaaaaaaaaaacctgagaggacattgcaccaatggagatgcatcaagagaaacatgtttggttttttgtgagctctcaccaacttttttcccctgggtcctcacgtgcagtgtggtcttctctttctgattagcatgtcattttggaaagagcactggattgagtcatgaggcataatcaatttctagtttaccagtgtgatcttaagcaaagatctaactcattggcaaaatgggcgtgattccttcccattcagggctgtttatgataagtcactgagggaatgataaatattatgacactgcttctcagactgtaatgtacatgcacatcacataaggaccttattaaaatggagacttaaaaagctggacgctaaaggcaataatgacagattttactcaataactactgcagaaggagagagtcctcagtatagaactgagcttagctccaatctgtgcagaggtgatggaattttaaagaggggagggaggaggttcaaatagaactagggaagtgcaaaattacaaaaagctggtaaggagattggtcaatgtgattcggctatctgtgtctactaactctcaaatttatttatcaaagttaggatcctagcctcccacagagaccaggagtcggccttatcattcctgataattatatgacaaagggatggctcccagaaaaagtgagaaacacattcctgtgcagcagaagatacatatatcccccaaagggacagaaaggatttacaattgtaaattttataaagtatgtcctctaagaagagggagggactgggtgccatggctcatgcctataatcccagcactttgggtggccaaggtgggtgcatcacctgaggtcaggagttcaagagcagcctggccaacatggtgaaaccctgtctctactaaaaatacaaaagttagcctgttgtggtggcgcgcacctgtaatcccagctactcgggtggctgaggcaggagaatcgcttgaacccaggaggcggagggtgcagtgagccgggatcacgccactgcacttcagcctgggtgacagagtgtgactccatctcaagaaaaacgagggagattagaaacctatgatcaggcattggctgaaacaaatggtaaattcttttggcagccttgagcttccccaggcagggacccaaaggggcctgggttatccctgagacagggccttgagctgctagaaactatgctagtgtttgttcaagtctctccgtgtccggggtgagcaaaattgtttgtgctgaaaatcaatgatttgcagctctcaagattccagtgggcagtctgggtgggcctgagtttctgctttttttttttctttatgtacagggtcttgctctgtcacctaggctagagtgtaattagtggccccagtcatggctcactgcagctgcaaactggctgcaagctgttctggctcagcctaccangttactgggcttacaggtggatgccaccgtacccaacagattttatttttgtagggatgggggtctccctgtattgcccaggctggtctcaaactcctggcctcccaangtgtttagattncaggtgtaagccaccacacgtggccagcctctgcatttctaacaggttccaggtgatcttgatgttctgctggtccatgggtcacactttgagaagcatggttctaaaggactatacagattaaagtcattaatctctgtgggctttggacttgaagtttcagcagcctttgacaagcatttgcaggtttcctttttatttatttgataaactgagaatccacatgcaaagaaatgcaagaaaattcaaagaacgtaagaaaatgtccttgctgtaaagctggtggttctcaatctcggatacacagtagaatcacctggtgcgggggttgggggcggggtgcagtgtaaaaattattaaatcagaatctctggggtaggccccaagcaacttttttttttttttttttagatagaatcttgcttgtcacctaggctaggagtgcagtggtgcaatcatggctcactgccgccttaacttctgggctcaagtgatatcctcccgacctcagcctccctagtagctgggactacaggcgtggactaccacacccaacaaatttttaaattttttgtagaggcaagctcttatactatcttgcacaggctggtctcgaactcctgggctcaagcagtcatcctgcctcagccttccaaagctcagggattacagacatgagccacagcaccaggccaacaatatttcttaaagctcctggagtgattccaatatgcagccaaggttgaaaaccaccctttaaaaggctcggcatccagtgtggaagaccagcacactcacgtcaggagaccttacctggagccaggatgcccctgatcatctctgataactttaaaaggaaggcctcagaagcagccccagaagcaaaagtttctctctgaccttctcctgccctcttgtttctggcttttcattctcccccaaggctacccatagaaactagaatccctcttccccaaggcaggtcatcagaaaccagaaccggttttacccaaagccagccataaaacctaaaaatagtcctctcactccccattcccctttctgtgtaaaaactggttggaaagaaatgatctgacctaccgtgtttgactgtcgtaagatacccattccagagagggtcccaccccgtgcccagaaggaaggaatcctgcacagagaggccaagaagaatctagacagccttgctgggtttcccctctcagtctattactattagatcatacccttcttgtccaatcatatttctacacagtccataatctgttgaacctaaacataaaaatggacaattcccctgtatcttggggtcttcattctgagggctcacatacaattatgatcaaataaatttgtttgctttttctcctgttaa

SEQ ID NO: 456028 - DNA, 1784 bp, Homo sapiens
ggagtgtgcaaagccaaagggcagactcggacataagaggaggcagcttccctgcctcagtttaccccctgcgtgcatccaggcacctccctccccggctgccctggggcccgggtccccagaggcccggggtccctacagtggctgggggagcggaaggcgaagccctgaggggtggcggaccgagtcctgccagcgccggctgggggcggggccgggaggccccgcgctgctaggtccccgcccgctggtttcctccggggtcagccaggctccttatcaggcgcggccaggcagcctggcccttatctgcactgggccagcatcctccggccgctgcgccgccaggggtgagagggaggaaaccgggccgccgggggcggggagaaggcgggccggcccgggagccgctcactttccctgggggggacctacgcggagacctcggctatcctggccttccgaggcccacgaggaggcgcggcccaacgccggggcctggagcattgaggccggaccctcgcgagacagcagagcctggcctgacgctggaaaccacaccctggcccagactgccagccctgacgggacagagccagggcactcaccaggctgcaagaacagtgctggggtgagtacccccacgtcggggtccatgtgcccgcctcaggcacaggcagaggtgggccccaccatgactgagaaggcagagatggtgtgtgccccgagcccgtcgcctgccgcacgccctaaggctgcctcgcctgggcccccgcaggtggaggaggtgggccaccgaggaggctcctcgccccccaggctgccacctggtgtaccagtgatcagcctgggccacagcaggcccccaggggtagccatgcccaccacagagctgggcactctgcggcccccgctgctgcaactctccaccctgggaactgccccgcccactttggccctgcactaccaccctcaccccttcctcaacagtgtctacattgggccagcaggaccttttagcatcttccctagcagccggttgaagcggagaccaagccactgtgagctggacctggctgaggggcaccagccccagaaggtggcccggcgcgtgttcaccaacagccgggagcgctggcggcagcagaacgttaacggcgccttcgccgagctgaggaagctgctgccgacgcacccgcccgaccggaagctgagcaagaacgaggtgctccgcctagccatgaagtacatcggcttcctggtgcggctgctgcgcgaccaagccgcagctctggccgcaggccccacccctcccgggcctcgcaaacggccggtgcaccgggtcccagacgacggcgcccgccggggatccggacgcagggccgaggcggcagcgcgctcgcagcccgcgcccccggccgaccccgacggcagccccggtggagcggcccggcccatcaagatggagcaaaccgctttgagcccagaggtgcggtgaccgcacgcggcagcacctctgagccggagggcaccagggactcggcccagggccgtcaaggaaagggcagtggacgtgctgcgcatgttcgggagcgaactcccccgaagaaggaccagtgaagacgtcaggggcaaggtctcgggggtccggaagggtgatcatcgacccccaagggacccgcagacccttaaaaaaatcacccacaaccctctggaagtggccttgcccggtccccttcccaggggcgaggtcggcaaagcaacatggcagagcagtcatagga

SEQ ID NO: 456029 - DNA, 498 bp, Homo sapiens
ttcaataaccgggtatttggattgttctcttgataatatttgagcgtgattctggcccggccagaatcacactcaaatctgcagaattatttgtaattagtaatacaaaatctggccaaaaggagacttgtaaatagcgtaaagtggtgtcttatgctaaacggtggaatgtataggcagagaagctctttgaagttgtcagatgagctgggctcacaagcctgattcaaacaggctgtcggtctcctctcaccccttaatactgtgcagcccaaactcctaggactcttgaacatctgagcagttttgtgctttgagccactttttgacaaaaatggctccatttttccacagcgtggttttcttaaaatagtttaatgttttatagtctcatagtagtagtgttgctttctaagctataacagtcgactttattcttctactctgaaaaatcttgacttgtttgagtgtgattctgccgggatcctcggaacaccc

SEQ ID NO: 456030 - DNA, 1418 bp, Homo sapiens
agcgagagccgccctgcgccggactggcttgcgggccgggccgccgcccccggagccgccctcgcgccgcctcgggccgccgccgagcagtcgggccgctgggcgccgccgcgggcgccgggagcgagctgggagggagccgcgcgcctttgtgcgcgcgccgagtggcgctgccgaagacagtccccacctggagagacatttgacccattaaggactcatattctacatttaccaaaggaaagcattcaatggggccgagcccagaacttacattagaaagattggaccaaattcaatggaaaccttcaattaagagccctcaggaaaacttgattcacatcgctgtaaaaaaaccctccccgtgaaaccattcaaagatccttcaacagaggaaacttcgttattgaaatcaaaaaaaaagggggggtctttgcgtccttcaagaagcgaagaccacgaaatttgcaccgagagggttggaatgggcaaacacaaacgaaaaaccgaagacccaaggtaaataaaaagcaaggacaggaagcaaagaagcacacggaaggaacgaaggtctgaccttgggacaatagagcttattaaagacgggcgaagcagaagtttgggcagcagcttgaacttggagagaagcaaggacactagccaaaggaaggagcaaagaaaatagcccccgagatagtagaaaggtgaacacaggacaactctcaggagagaacacaggccaagaaacttcagaccaagcacccagaggaggtcctagggcatgaaggtattgaagcaaaggaaccttcgtagttggtcaccccaacagaggctggtctgtgggtagcctttcttcaatcgtcaagggcaaaaagcacccctgggagaatatttcccaaacccagggaagagagattatagaacttcgcaagaaaggacattaagggcgaaaggagcaaacacaaaacaaacacaaagaaaaggaaaagaccgaatgccacgtggtgaacacgagtggcagggaaccagaaaaaacgccgagacattgaaagagagcaagagcgccccgacaaggcaacagtatggaaaataaaaggaacaccgaagaagacagaaacaatagcaacaggacaccacagcacgagaaagaaaaagagaagagcaacagaaacaagacacaacagagagcaaagacaaacaaagaacagaagaaatagtgcgaaaacagacaaaaacagacccaagaacatggaacccaagacaaaagaatacaacaggaaaaacaagagatcaaccgcaagggaacgagaaaaaaaaaaaacagcaaagaagaaaagaaacagagaaagaaagagacagaaaaagaaagtagaaaaagaacacgaagaaacaaagaaaagataccaacagccacagag

SEQ ID NO: 456031 - DNA, 3781 bp, Homo sapiens
  misc_feature (11)..(11): n is a, c, g, or t
  misc_feature (17)..(18): n is a, c, g, or t
tcgagctcggncctctnntcatgctcagggcagacagccgtcttctcattgtgtcctcacatggcattgaggctggagagtacagggagagagattgagaaagaaggagctctggtctcttttcctcttcttataaggacactgatcccatcatgtgggctgcagcctcatgacctcatctaaacctaattacctttcaaaggtcccacctccaaatactgtcactttgggggttagggcttcaacataggaattttggggggactcagcattcagtcggtgtgtgtgcgtgtgtgtgtgcgtgtgtgtgcgtgtgcatgtgtacttgtagaggagggttgattgtccacctgacagccgttgccatcccctcttccctgctggatgccaatttgcatttttctggcacgttttgcggctagagtggtcatgtgacactgttctggccaatgaggcgatggaggaaggcccccgggggcttctgggagtgcctgccttcgcagctggagagagccctcctcaggggctgtctctgccttcccttcttcccatgtgtatctggggcagctgaggcagggctaggagaagagcccgggttcctcctgccacctccaagcgatgaagcagccctgggccaactccagcattctcgtgtgaactgcagaggagccctgcgcttccagctacttgcagccagacagcccacctgaggatattgaccataaggactcatatctcattacaagaagcatcatggccgagccagactacatagaagatgacaatcctgaactcattaggcctcagaaactgatcaatcctgtaaaaacctcccggaaccatcaagatcttcacagagaacttcttatgaatcaaaaaaggggtcttgctcctcagaacaaaccagaattgcagaaggtgatggaaaaaagaaaacgagaccaagtaataaagcagaaggaagaagaagcacagaagaagaaatctgacttggaaatagagctattaaaacggcagcagaagttggagcagcttgaacttgagaagcagaaattgcaagaagagcaagaaaatgcccccgagtttgtgaaggtgaaaggcaatctcaggagaacaggccaagaagtcgcccaagcccaggagtcctaggctgaggctgcaccaagacctcgtgtgtcaccccacagagctgtctgtgggtgccttctcaatctcagggcaaaagcccctggagaatattccagccagcagagaattttgacttgcagtaggatttggtttgattttcctacgatctgggtggatgccttgcctgtgacagttgcagttcctattcgccaaatgaagggcagtgccccgcacgtaagttggaatgatggacctgtgttcagagacttaacagaaccaacaagcaaaacaagtgagaacaggaaaaaggaagaggacactggaatcaattcttgagagttgcactacttggtttttcttccattccaagtttcgtgggacccagagccttttttcttttaaaagctaaaaaacaagtgtttaattcctctttttgttatctgttagataattgagatcacctagaaatgcgtttaatctgttcactcactgtaaattttgaggacccagaattgtcttgtttaatttatactttcacccctgttgcagttaacaccagagaaggaacgtgaatgtcgagcacagccactacccttgttggcacttaatttagaaatagggtgagaagtttaaaagcccatcttgattttattttcattccttttggttctctgtgtaataatagcaggctacatagtgacattccagttccaagaaggtacatcctgtccattcattaattgctttgattactaggagggtttctgttcagttttgtttttaaatgtcttgctgatctagttctttcagatggaataaccttccagtcccttagagagtggaactagtccatataacccagcttcagtagcaaaagtagaagccgccacatcttttcatttctccaagaggagagtggggaaggttcccatgaccagctgggcagtcaggatttctctaggcattctaatgtgaaataagtgtagactgctgtcaaggaggcttcatcagaagatgtatagcatttgaatgtctaatgataatgcatatcattagaatccaagctttgaaaatttctgattaatgctcatgtatttctttatctttgtttttccttgtgaagaaagactttcaccactgtctgagtgatgatgctgttgataaggatgatgtcgatgactactatattgcatctctcaggaacagctgatgggaagggaggggctgctgagttcccttgttctagctagcagcacgctcctcagagagggggccgagttacagacagcagccgcattctcatgcaaaattagttttaaactgctagtgtgggcatcggtaccttttgcctgggtgataccgaagaattgttgaggatttagtatgctccgtagagacagttcagccagtcatttctgcattggagagacttctcatactttctttgaagactcatagaaagctggatctagagcttttgaatccttaattagcacagtagaaattagctttctatgggaatgctttagtgttagcagttgacaattaggcccatattcaatctgaatgggaacaaaagtaaatgcaatgataatatactgctagttagagaaacatgttagttgattatacctgaaatggattatttatctcatcagcaagtattatttgaataaaatgagaaatgcttaagaaaaattgttgctctatagtaatttggtttcgaagaatggaatggtaactattttttcccatcgttcttttgagagaaggaagtgtgatgactgatgatcttgaaaagcccatttctgattgcacgttgactggaattctttctttgtgtctgtggactagcgatgctgtttgtaaaatgaagattcgggactggctcatatctttttatctaactagatgtcagatcttgaaatctgtattctcgaagcaattctgccacttgatcgtattcacaggggccctggtaggctcctttagaaggaccatttctgttcctagagcttaactagaattcattcttcactgaaaaaaaaaaaagttacttaagaaagcatttctttcctaatctcactcaaatctgcagaattatttgtaattagtaatacaaaatctggccaaaaggagacttgtaaatagcgtaaagtggtgtcttatgctaaacggtggaatgtataggcagagaagctctttgaagttgtcagatgagctgggctcacaagcctgattcaaacaggctgtcggtctcctctcaccccttaatactgtgcagcccaaactcctaggactcttgaacatctgagcagttttgtgctttgagccactttttgacaaaaatggctccatttttccacagcgtggttttcttaaaatagtttaatgttttatagtctcatagtagtagtgttgctttctaagctataacagtcgactttattcttctactctgaaaaatcttgacttgtttgagtgtatataatatatataaagggagccttaatggattggttttcataatttaatattttttgtatttgctcttgtataattgtttttaacggaaagtattaaagaattgagggtggaattcttagaaccaaagttattcttaataaaaatcaccacatgcttggaccatgca

SEQ ID NO: 456032 - DNA, 3249 bp, Homo sapiens
agcgagagccgccctgcgccggactggcttgcgggccgggccgccgcccccggagccgccctcgcgccgcctcgggccgccgccgagcagtcgggccgctgggcgccgccgcgggcgccgggagcgagctgggagggagccgcgcgcctttgtgcgcgcgccgagacagcccacctgaggatattgaccataaggactcatatctcattacaagaagcatcatggccgagccagactacatagaagatgacaatcctgaactcattaggcctcagaaactgatcaatcctgtaaaaacctcccggaaccatcaagatcttcacagagaacttcttatgaatcaaaaaaggggtcttgctcctcagaacaaaccagaattgcagaaggtgatggaaaaaagaaaacgagaccaagtaataaagcagaaggaagaagaagcacagaagaagaaatctgacttggaaatagagctattaaaacggcagcagaagttggagcagcttgaacttgagaagcagaaattgcaagaagagcaagaaaatgcccccgagtttgtgaaggtgaaaggcaatctcaggagaacaggccaagaagtcgcccaagcccaggagtcctaggctgaggctgcaccaagacctcgtgtgtcaccccacagagctgtctgtgggtgccttctcaatctcagggcaaaagcccctggagaatattccagccagcagagaattttgacttgcagtaggatttggtttgattttcctacgatctgggtggatgccttgcctgtgacagttgcagttcctattcgccaaatgaagggcagtgccccgcacgtaagttggaatgatggacctgtgttcagagacttaacagaaccaacaagcaaaacaagtgagaacaggaaaaaggaagaggacactggaatcaattcttgagagttgcactacttggtttttcttccattccaagtttcgtgggacccagagccttttttcttttaaaagctaaaaaacaagtgtttaattcctctttttgttatctgttagataattgagatcacctagaaatgcgtttaatctgttcactcactgtaaattttgaggacccagaattgtcttgtttaatttatactttcacccctgttgcagttaacaccagagaaggaacgtgaatgtcgagcacagccactacccttgttggcacttaatttagaaatagggtgagaagtttaaaagcccatcttgattttattttcattccttttggttctctgtgtaataatagcaggctacatagtgacattccagttccaagaaggtacatcctgtccattcattaattgctttgattactaggagggtttctgttcagttttgtttttaaatgtcttgctgatctagttctttcagatggaataaccttccagtcccttagagagtggaactagtccatataacccagcttcagtagcaaaagtagaagccgccacatcttttcatttctccaagaggagagtggggaaggttcccatgaccagctgggcagtcaggatttctctaggcattctaatgtgaaataagtgtagactgctgtcaaggaggcttcatcagaagatgtatagcatttgaatgtctaatgataatgcatatcattagaatccaagctttgaaaatttctgattaatgctcatgtatttctttatctttgtttttccttgtgaagaaagactttcaccactgtctgagtgatgatgctgttgataaggatgatgtcgatgactactatattgcatctctcaggaacagctgatgggaagggaggggctgctgagttcccttgttctagctagcagcacgctcctcagagagggggccgagttacagacagcagccgcattctcatgcaaaattagttttaaactgctagtgtgggcatcggtaccttttgcctgggtgataccgaagaattgttgaggatttagtatgctccgtagagacagttcagccagtcatttctgcattggagagacttctcatactttctttgaagactcatagaaagctggatctagagcttttgaatccttaattagcacagtagaaattagctttctatgggaatgctttagtgttagcagttgacaattaggcccatattcaatctgaatgggaacaaaagtaaatgcaatgataatatactgctagttagagaaacatgttagttgattatacctgaaatggattatttatctcatcagcaagtattatttgaataaaatgagaaatgcttaagaaaaattgttgctctatagtaatttggtttcgaagaatggaatggtaactattttttcccatcgttcttttgagagaaggaagtgtgatgactgatgatcttgaaaagcccatttctgattgcacgttgactggaattctttctttgtgtctgtggactagcgatgctgtttgtaaaatgaagattcgggactggctcatatctttttatctaactagatgtcagatcttgaaatctgtattctcgaagcaattctgccacttgatcgtattcacaggggccctggtaggctcctttagaaggaccatttctgttcctagagcttaactagaattcattcttcactgaaaaaaaaaaaagttacttaagaaagcatttctttcctaatctcactcaaatctgcagaattatttgtaattagtaatacaaaatctggccaaaaggagacttgtaaatagcgtaaagtggtgtcttatgctaaacggtggaatgtataggcagagaagctctttgaagttgtcagatgagctgggctcacaagcctgattcaaacaggctgtcggtctcctctcaccccttaatactgtgcagcccaaactcctaggactcttgaacatctgagcagttttgtgctttgagccactttttgacaaaaatggctccatttttccacagcgtggttttcttaaaatagtttaatgttttatagtctcatagtagtagtgttgctttctaagctataacagtcgactttattcttctactctgaaaaatcttgacttgtttgagtgtatataatatatataaagggagccttaatggattggttttcataatttaatattttttgtatttgctcttgtataattgtttttaacggaaagtattaaagaattgagggtggaattcttagaaccaaagttattcttaataaaaatcaccacatgcttggaccatgca

SEQ ID NO: 456033 - DNA, 3368 bp, Homo sapiens
actgcgatctttttatttgctaccttgggcttaaggagcctgcctatatctactgaggtgaggttaggtcagtctctgtaaccgttcgtcacttaggccttgatgggtgacatggatggggatgacttcctgggctaactcttctcttgctaaaggatgatttttcaccaccttgaatgcccatgattaaaacataaacaagaaaatagatatctgaggagaatgcagttgaaactaattttgtggatagagaaactgttggaactgctttacaaagtattttaacagcccacctgaggatattgaccataaggactcatatctcattacaagaagcatcatggccgagccagactacatagaagatgacaatcctgaactcattaggcctcagaaactgatcaatcctgtaaaaacctcccggaaccatcaagatcttcacagagaacttcttatgaatcaaaaaaggggtcttgctcctcagaacaaaccagaattgcagaaggtgatggaaaaaagaaaacgagaccaagtaataaagcagaaggaagaagaagcacagaagaagaaatctgacttggaaatagagctattaaaacggcagcagaagttggagcagcttgaacttgagaagcagaaattgcaagaagagcaagaaaatgcccccgagtttgtgaaggtgaaaggcaatctcaggagaacaggccaagaagtcgcccaagcccaggagtcctaggctgaggctgcaccaagacctcgtgtgtcaccccacagagctgtctgtgggtgccttctcaatctcagggcaaaagcccctggagaatattccagccagcagagaattttgacttgcagtaggatttggtttgattttcctacgatctgggtggatgccttgcctgtgacagttgcagttcctattcgccaaatgaagggcagtgccccgcacgtaagttggaatgatggacctgtgttcagagacttaacagaaccaacaagcaaaacaagtgagaacaggaaaaaggaagaggacactggaatcaattcttgagagttgcactacttggtttttcttccattccaagtttcgtgggacccagagccttttttcttttaaaagctaaaaaacaagtgtttaattcctctttttgttatctgttagataattgagatcacctagaaatgcgtttaatctgttcactcactgtaaattttgaggacccagaattgtcttgtttaatttatactttcacccctgttgcagttaacaccagagaaggaacgtgaatgtcgagcacagccactacccttgttggcacttaatttagaaatagggtgagaagtttaaaagcccatcttgattttattttcattccttttggttctctgtgtaataatagcaggctacatagtgacattccagttccaagaaggtacatcctgtccattcattaattgctttgattactaggagggtttctgttcagttttgtttttaaatgtcttgctgatctagttctttcagatggaataaccttccagtcccttagagagtggaactagtccatataacccagcttcagtagcaaaagtagaagccgccacatcttttcatttctccaagaggagagtggggaaggttcccatgaccagctgggcagtcaggatttctctaggcattctaatgtgaaataagtgtagactgctgtcaaggaggcttcatcagaagatgtatagcatttgaatgtctaatgataatgcatatcattagaatccaagctttgaaaatttctgattaatgctcatgtatttctttatctttgtttttccttgtgaagaaagactttcaccactgtctgagtgatgatgctgttgataaggatgatgtcgatgactactatattgcatctctcaggaacagctgatgggaagggaggggctgctgagttcccttgttctagctagcagcacgctcctcagagagggggccgagttacagacagcagccgcattctcatgcaaaattagttttaaactgctagtgtgggcatcggtaccttttgcctgggtgataccgaagaattgttgaggatttagtatgctccgtagagacagttcagccagtcatttctgcattggagagacttctcatactttctttgaagactcatagaaagctggatctagagcttttgaatccttaattagcacagtagaaattagctttctatgggaatgctttagtgttagcagttgacaattaggcccatattcaatctgaatgggaacaaaagtaaatgcaatgataatatactgctagttagagaaacatgttagttgattatacctgaaatggattatttatctcatcagcaagtattatttgaataaaatgagaaatgcttaagaaaaattgttgctctatagtaatttggtttcgaagaatggaatggtaactattttttcccatcgttcttttgagagaaggaagtgtgatgactgatgatcttgaaaagcccatttctgattgcacgttgactggaattctttctttgtgtctgtggactagcgatgctgtttgtaaaatgaagattcgggactggctcatatctttttatctaactagatgtcagatcttgaaatctgtattctcgaagcaattctgccacttgatcgtattcacaggggccctggtaggctcctttagaaggaccatttctgttcctagagcttaactagaattcattcttcactgaaaaaaaaaaaagttacttaagaaagcatttctttcctaatctcactcaaatctgcagaattatttgtaattagtaatacaaaatctggccaaaaggagacttgtaaatagcgtaaagtggtgtcttatgctaaacggtggaatgtataggcagagaagctctttgaagttgtcagatgagctgggctcacaagcctgattcaaacaggctgtcggtctcctctcaccccttaatactgtgcagcccaaactcctaggactcttgaacatctgagcagttttgtgctttgagccactttttgacaaaaatggctccatttttccacagcgtggttttcttaaaatagtttaatgttttatagtctcatagtagtagtgttgctttctaagctataacagtcgactttattcttctactctgaaaaatcttgacttgtttgagtgtatataatatatataaagggagccttaatggattggttttcataatttaatattttttgtatttgctcttgtataattgtttttaacggaaagtattaaagaattgagggtggaattcttagaaccaaagttattcttaataaaaatcaccacatgcttggaccatgca

SEQ ID NO: 456034 - DNA, 2957 bp, Homo sapiens
ccggtcccctcaggattactcgagatcttcacagaggaacttcttgaatcaaaaaaggggtcttgctcctcagaacaaaccagaattgcagaaggtgatggaaaaaagaaaacgagaccaagtaataaagcagaaggaagaagaagcacagaagaagaaatctgacttggaaatagagctattaaaacggcagcagaagttggagcagcttgaacttgagaagcagaaattgcaagaagagcaagaaaatgcccccgagtttgtgaaggtgaaaggcaatctcaggagaacaggccaagaagtcgcccaagcccaggagtcctaggctgaggctgcaccaagacctcgtgtgtcaccccacagagctgtctgtgggtgccttctcaatctcagggcaaaagcccctggagaatattccagccagcagagaattttgacttgcagtaggatttggtttgattttcctacgatctgggtggatgccttgcctgtgacagttgcagttcctattcgccaaatgaagggcagtgccccgcacgtaagttggaatgatggacctgtgttcagagacttaacagaaccaacaagcaaaacaagtgagaacaggaaaaaggaagaggacactggaatcaattcttgagagttgcactacttggtttttcttccattccaagtttcgtgggacccagagccttttttcttttaaaagctaaaaaacaagtgtttaattcctctttttgttatctgttagataattgagatcacctagaaatgcgtttaatctgttcactcactgtaaattttgaggacccagaattgtcttgtttaatttatactttcacccctgttgcagttaacaccagagaaggaacgtgaatgtcgagcacagccactacccttgttggcacttaatttagaaatagggtgagaagtttaaaagcccatcttgattttattttcattccttttggttctctgtgtaataatagcaggctacatagtgacattccagttccaagaaggtacatcctgtccattcattaattgctttgattactaggagggtttctgttcagttttgtttttaaatgtcttgctgatctagttctttcagatggaataaccttccagtcccttagagagtggaactagtccatataacccagcttcagtagcaaaagtagaagccgccacatcttttcatttctccaagaggagagtggggaaggttcccatgaccagctgggcagtcaggatttctctaggcattctaatgtgaaataagtgtagactgctgtcaaggaggcttcatcagaagatgtatagcatttgaatgtctaatgataatgcatatcattagaatccaagctttgaaaatttctgattaatgctcatgtatttctttatctttgtttttccttgtgaagaaagactttcaccactgtctgagtgatgatgctgttgataaggatgatgtcgatgactactatattgcatctctcaggaacagctgatgggaagggaggggctgctgagttcccttgttctagctagcagcacgctcctcagagagggggccgagttacagacagcagccgcattctcatgcaaaattagttttaaactgctagtgtgggcatcggtaccttttgcctgggtgataccgaagaattgttgaggatttagtatgctccgtagagacagttcagccagtcatttctgcattggagagacttctcatactttctttgaagactcatagaaagctggatctagagcttttgaatccttaattagcacagtagaaattagctttctatgggaatgctttagtgttagcagttgacaattaggcccatattcaatctgaatgggaacaaaagtaaatgcaatgataatatactgctagttagagaaacatgttagttgattatacctgaaatggattatttatctcatcagcaagtattatttgaataaaatgagaaatgcttaagaaaaattgttgctctatagtaatttggtttcgaagaatggaatggtaactattttttcccatcgttcttttgagagaaggaagtgtgatgactgatgatcttgaaaagcccatttctgattgcacgttgactggaattctttctttgtgtctgtggactagcgatgctgtttgtaaaatgaagattcgggactggctcatatctttttatctaactagatgtcagatcttgaaatctgtattctcgaagcaattctgccacttgatcgtattcacaggggccctggtaggctcctttagaaggaccatttctgttcctagagcttaactagaattcattcttcactgaaaaaaaaaaaagttacttaagaaagcatttctttcctaatctcactcaaatctgcagaattatttgtaattagtaatacaaaatctggccaaaaggagacttgtaaatagcgtaaagtggtgtcttatgctaaacggtggaatgtataggcagagaagctctttgaagttgtcagatgagctgggctcacaagcctgattcaaacaggctgtcggtctcctctcaccccttaatactgtgcagcccaaactcctaggactcttgaacatctgagcagttttgtgctttgagccactttttgacaaaaatggctccatttttccacagcgtggttttcttaaaatagtttaatgttttatagtctcatagtagtagtgttgctttctaagctataacagtcgactttattcttctactctgaaaaatcttgacttgtttgagtgtatataatatatataaagggagccttaatggattggttttcataatttaatattttttgtatttgctcttgtataattgtttttaacggaaagtattaaagaattgagggtggaattcttagaaccaaagttattcttaataaaaatcaccacatgcttggaccatgca

SEQ ID NO: 456035 - DNA, 997 bp, Homo sapiens
  misc_feature (19)..(19): n is a, c, g, or t
atatcagctcgcaccacantatgtaatactatgcaagaaaaattgttgctctatagtaatttggtttcgaagaatggaatggtaactattttttcccatcgttcttttgagagaaggaagtgtgatgactgatgatcttgaaaagcccatttctgattgcacgttgactggaattctttctttgtgtctgtggactagcgatgctgtttgtaaaatgaagattcgggactggctcatatctttttatctaactagatgtcagatcttgaaatctgtattctcgaagcaattctgccacttgatcgtattcacaggggccctggtaggctcctttagaaggaccatttctgttcctagagcttaactagaattcattcttcactgaaaaaaaaaaaagttacttaagaaagcatttctttcctaatctcactcaaatctgcagaattatttgtaattagtaatacaaaatctggccaaaaggagacttgtaaatagcgtaaagtggtgtcttatgctaaacggtggaatgtataggcagagaagctctttgaagttgtcagatgagctgggctcacaagcctgattcaaacaggctgtcggtctcctctcaccccttaatactgtgcagcccaaactcctaggactcttgaacatctgagcagttttgtgctttgagccactttttgacaaaaatggctccatttttccacagcgtggttttcttaaaatagtttaatgttttatagtctcatagtagtagtgttgctttctaagctataacagtcgactttattcttctactctgaaaaatcttgacttgtttgagtgtatataatatatataaagggagccttaatggattggttttcataatttaatattttttgtatttgctcttgtataattgtttttaacggaaagtattaaagaattgagggtggaattcttagaaccaaagttattcttaataaaaatcaccacatgcttggaccatgca

SEQ ID NO: 456036 - DNA, 2289 bp, Homo sapiens
agcgagagccgccctgcgccggactggcttgcgggccgggccgccgcccccggagccgccctcgcgccgcctcgggccgccgccgagcagtcgggccgctgggcgccgccgcgggcgccgggagcgagctgggagggagccgcgcgcctttgtgcgcgcgccgagacagcccacctgaggatattgaccataaggactcatatctcattacaagaagcatcatggccgagccagactacatagaagatgacaatcctgaactcattaggcctcagaaactgatcaatcctgtaaaaacctcccggaaccatcaagatcttcacagagaacttcttatgaatcaaaaaaggggtcttgctcctcagaacaaaccagaattgcagaaggtgatggaaaaaagaaaacgagaccaagtaataaagcagaaggaagaagaagcacagaagaagaaatctgacttggaaatagagctattaaaacggcagcagaagttggagcagcttgaacttgagaagcagaaattgcaagaagagcaagaaaatgcccccgagtttgtgaaggtgaaaggcaatctcaggagaacaggccaagaagtcgcccaagcccaggagtcctaggctgaggctgcaccaagacctcgtgtgtcaccccacagagctgtctgtgggtgccttctcaatctcagggcaaaagcccctggagaatattccagccagcagagaattttgacttgcagtaggatttggtttgattttcctacgatctgggtggatgccttgcctgtgacagttgcagttcctattcgccaaatgaagggcagtgccccgcacgtaagttggaatgatggacctgtgttcagagacttaacagaaccaacaagcaaaacaagtgagaacaggaaaaaggaagaggacactggaatcaattcttgagagttgcactacttggtttttcttccattccaagtttcgtgggacccagagccttttttcttttaaaagctaaaaaacaagtgtttaattcctctttttgttatctgttagataattgagatcacctagaaatgcgtttaatctgttcactcactgtaaattttgaggacccagaattgtcttgtttaatttatactttcacccctgttgcagttaacaccagagaaggaacgtgaatgtcgagcacagccactacccttgttggcacttaatttagaaatagggtgagaagtttaaaagcccatcttgattttattttcattccttttggttctctgtgtaataatagcaggctacatagtgacattccagttccaagaaggtacatcctgtccattcattaattgctttgattactaggagggtttctgttcagttttgtttttaaatgtcttgctgatctagttctttcagatggaataaccttccagtcccttagagagtggaactagtccatataacccagcttcagtagcaaaagtagaagccgccacatcttttcatttctccaagaggagagtggggaaggttcccatgaccagctgggcagtcaggatttctctaggcattctaatgtgaaataagtgtagactgctgtcaaggaggcttcatcagaagatgtatagcatttgaatgtctaatgataatgcatatcattagaatccaagctttgaaaatttctgattaatgctcatgtatttctttatctttgtttttccttgtgaagaaagactttcaccactgtctgagtgatgatgctgttgataaggatgatgtcgatgactactatattgcatctctcaggaacagctgatgggaagggaggggctgctgagttcccttgttctagctagcagcacgctcctcagagagggggccgagttacagacagcagccgcattctcatgcaaaattagttttaaactgctagtgtgggcatcggtaccttttgcctgggtgataccgaagaattgttgaggatttagtatgctccgtagagacagttcagccagtcatttctgcattggagagacttctcatactttctttgaagactcatagaaagctggatctagagcttttgaatccttaattagcacagtagaaattagctttctatgggaatgctttagtgttagcagttgacaattaggcccatattcaatctgaatgggaacaaaagtaaatgcaatgataatatactgctagttagagaaacatgttagttgattatacctgaaatggattatttatctcatcagcaagtattatttgaataaaatgagaaatgcttaag

SEQ ID NO: 456037 - DNA, 350 bp, Homo sapiens
cctagttttagaagtgtccatagcacgaaaaggagaatcctatagataatcagtccgtacatgagccaccggttcaaattcagatctgtctgattcctaagctaaatttattctgctattgaaacttctataacagtcgactttattcttctactctgaaaaatcttgacttgtttgagtgtatataatatatataaagggagccttaatggattggttttcataatttaatattttttgtatttgctcttgtataattgtttttaacggaaagtattaaagaattgagggtggaattcttagaaccaaagttattcttaataaaaatcaccacatgcttggaccatgca

SEQ ID NO: 456038 - DNA, 942 bp, Homo sapiens
agcgagagccgccctgcgccggactggcttgcgggccgggccgccgcccccggagccgccctcgcgccgcctcgggccgccgccgagcagtcgggccgctgggcgccgccgcgggcgccgggagcgagctgggagggagccgcgcgcctttgtgcgcgcgccgagacagcccacctgaggatattgaccataaggactcatatctcattacaagaagcatcatggccgagccagactacatagaagatgacaatcctgaactcattaggcctcagaaactgatcaatcctgtaaaaacctcccggaaccatcaagatcttcacagagaacttcttatgaatcaaaaaagaaccgggttacccctccgtgaggcagatcccctgcaggtggccatcactgtggtggccagcagtgcttccagactcctgcagtcacgggttcccttctgaaatggatgtgtatttccaaattcggatggaagaggctggattaaagatagaagagaatgtcctaagtagaagagaaatatgttcttaaatttaaaatctctgaattttctccttacactggggaaggtgtaggaatcatgtaattgccgcctactccggcatttgtcagtagtggggagaagtctctagaaccatattagacttaatagataggacactcatgtttagtagtttgggggtagcattttaaaagattattatcatagtctttattattaattatttcggaggacaggaaagcatttaccttctatctactttgcaaactccatctgtgccataaatcattatggatgttgggttgctatactctgctttttaaataatttggggcaggacaggagactaggagaactgaggatgaaaggctatttttttcaatttaagaactaggaagcttcatttaggattattttcagatctcgtaggacta

SEQ ID NO: 456039 - DNA, 3315 bp, Homo sapiens
agcgagagccgccctgcgccggactggcttgcgggccgggccgccgcccccggagccgccctcgcgccgcctcgggccgccgccgagcagtcgggccgctgggcgccgccgcgggcgccgggagcgagctgggagggagccgcgcgcctttgtgcgcgcgccgaggagaatgcagttgaaactaattttgtggatagagaaactgttggaactgctttacaaagtattttaacagcccacctgaggatattgaccataaggactcatatctcattacaagaagcatcatggccgagccagactacatagaagatgacaatcctgaactcattaggcctcagaaactgatcaatcctgtaaaaacctcccggaaccatcaagatcttcacagagaacttcttatgaatcaaaaaaggggtcttgctcctcagaacaaaccagaattgcagaaggtgatggaaaaaagaaaacgagaccaagtaataaagcagaaggaagaagaagcacagaagaagaaatctgacttggaaatagagctattaaaacggcagcagaagttggagcagcttgaacttgagaagcagaaattgcaagaagagcaagaaaatgcccccgagtttgtgaaggtgaaaggcaatctcaggagaacaggccaagaagtcgcccaagcccaggagtcctaggctgaggctgcaccaagacctcgtgtgtcaccccacagagctgtctgtgggtgccttctcaatctcagggcaaaagcccctggagaatattccagccagcagagaattttgacttgcagtaggatttggtttgattttcctacgatctgggtggatgccttgcctgtgacagttgcagttcctattcgccaaatgaagggcagtgccccgcacgtaagttggaatgatggacctgtgttcagagacttaacagaaccaacaagcaaaacaagtgagaacaggaaaaaggaagaggacactggaatcaattcttgagagttgcactacttggtttttcttccattccaagtttcgtgggacccagagccttttttcttttaaaagctaaaaaacaagtgtttaattcctctttttgttatctgttagataattgagatcacctagaaatgcgtttaatctgttcactcactgtaaattttgaggacccagaattgtcttgtttaatttatactttcacccctgttgcagttaacaccagagaaggaacgtgaatgtcgagcacagccactacccttgttggcacttaatttagaaatagggtgagaagtttaaaagcccatcttgattttattttcattccttttggttctctgtgtaataatagcaggctacatagtgacattccagttccaagaaggtacatcctgtccattcattaattgctttgattactaggagggtttctgttcagttttgtttttaaatgtcttgctgatctagttctttcagatggaataaccttccagtcccttagagagtggaactagtccatataacccagcttcagtagcaaaagtagaagccgccacatcttttcatttctccaagaggagagtggggaaggttcccatgaccagctgggcagtcaggatttctctaggcattctaatgtgaaataagtgtagactgctgtcaaggaggcttcatcagaagatgtatagcatttgaatgtctaatgataatgcatatcattagaatccaagctttgaaaatttctgattaatgctcatgtatttctttatctttgtttttccttgtgaagaaagactttcaccactgtctgagtgatgatgctgttgataaggatgatgtcgatgactactatattgcatctctcaggaacagctgatgggaagggaggggctgctgagttcccttgttctagctagcagcacgctcctcagagagggggccgagttacagacagcagccgcattctcatgcaaaattagttttaaactgctagtgtgggcatcggtaccttttgcctgggtgataccgaagaattgttgaggatttagtatgctccgtagagacagttcagccagtcatttctgcattggagagacttctcatactttctttgaagactcatagaaagctggatctagagcttttgaatccttaattagcacagtagaaattagctttctatgggaatgctttagtgttagcagttgacaattaggcccatattcaatctgaatgggaacaaaagtaaatgcaatgataatatactgctagttagagaaacatgttagttgattatacctgaaatggattatttatctcatcagcaagtattatttgaataaaatgagaaatgcttaagaaaaattgttgctctatagtaatttggtttcgaagaatggaatggtaactattttttcccatcgttcttttgagagaaggaagtgtgatgactgatgatcttgaaaagcccatttctgattgcacgttgactggaattctttctttgtgtctgtggactagcgatgctgtttgtaaaatgaagattcgggactggctcatatctttttatctaactagatgtcagatcttgaaatctgtattctcgaagcaattctgccacttgatcgtattcacaggggccctggtaggctcctttagaaggaccatttctgttcctagagcttaactagaattcattcttcactgaaaaaaaaaaaagttacttaagaaagcatttctttcctaatctcactcaaatctgcagaattatttgtaattagtaatacaaaatctggccaaaaggagacttgtaaatagcgtaaagtggtgtcttatgctaaacggtggaatgtataggcagagaagctctttgaagttgtcagatgagctgggctcacaagcctgattcaaacaggctgtcggtctcctctcaccccttaatactgtgcagcccaaactcctaggactcttgaacatctgagcagttttgtgctttgagccactttttgacaaaaatggctccatttttccacagcgtggttttcttaaaatagtttaatgttttatagtctcatagtagtagtgttgctttctaagctataacagtcgactttattcttctactctgaaaaatcttgacttgtttgagtgtatataatatatataaagggagccttaatggattggttttcataatttaatattttttgtatttgctcttgtataattgtttttaacggaaagtattaaagaattgagggtggaattcttagaaccaaagttattcttaataaaaatcaccacatgcttggaccatgca

SEQ ID NO: 456040 - DNA, 3213 bp, Homo sapiens
tagagtgtttctctttgaacttgaactgtggctcttttgatatccagaaagagagttctttgtggggatggttaattcttgttttgggtgcttttcttcaccgctctaaggaactaccacagtcagaagacagcccacctgaggatattgaccataaggactcatatctcattacaagaagcatcatggccgagccagactacatagaagatgacaatcctgaactcattaggcctcagaaactgatcaatcctgtaaaaacctcccggaaccatcaagatcttcacagagaacttcttatgaatcaaaaaaggggtcttgctcctcagaacaaaccagaattgcagaaggtgatggaaaaaagaaaacgagaccaagtaataaagcagaaggaagaagaagcacagaagaagaaatctgacttggaaatagagctattaaaacggcagcagaagttggagcagcttgaacttgagaagcagaaattgcaagaagagcaagaaaatgcccccgagtttgtgaaggtgaaaggcaatctcaggagaacaggccaagaagtcgcccaagcccaggagtcctaggctgaggctgcaccaagacctcgtgtgtcaccccacagagctgtctgtgggtgccttctcaatctcagggcaaaagcccctggagaatattccagccagcagagaattttgacttgcagtaggatttggtttgattttcctacgatctgggtggatgccttgcctgtgacagttgcagttcctattcgccaaatgaagggcagtgccccgcacgtaagttggaatgatggacctgtgttcagagacttaacagaaccaacaagcaaaacaagtgagaacaggaaaaaggaagaggacactggaatcaattcttgagagttgcactacttggtttttcttccattccaagtttcgtgggacccagagccttttttcttttaaaagctaaaaaacaagtgtttaattcctctttttgttatctgttagataattgagatcacctagaaatgcgtttaatctgttcactcactgtaaattttgaggacccagaattgtcttgtttaatttatactttcacccctgttgcagttaacaccagagaaggaacgtgaatgtcgagcacagccactacccttgttggcacttaatttagaaatagggtgagaagtttaaaagcccatcttgattttattttcattccttttggttctctgtgtaataatagcaggctacatagtgacattccagttccaagaaggtacatcctgtccattcattaattgctttgattactaggagggtttctgttcagttttgtttttaaatgtcttgctgatctagttctttcagatggaataaccttccagtcccttagagagtggaactagtccatataacccagcttcagtagcaaaagtagaagccgccacatcttttcatttctccaagaggagagtggggaaggttcccatgaccagctgggcagtcaggatttctctaggcattctaatgtgaaataagtgtagactgctgtcaaggaggcttcatcagaagatgtatagcatttgaatgtctaatgataatgcatatcattagaatccaagctttgaaaatttctgattaatgctcatgtatttctttatctttgtttttccttgtgaagaaagactttcaccactgtctgagtgatgatgctgttgataaggatgatgtcgatgactactatattgcatctctcaggaacagctgatgggaagggaggggctgctgagttcccttgttctagctagcagcacgctcctcagagagggggccgagttacagacagcagccgcattctcatgcaaaattagttttaaactgctagtgtgggcatcggtaccttttgcctgggtgataccgaagaattgttgaggatttagtatgctccgtagagacagttcagccagtcatttctgcattggagagacttctcatactttctttgaagactcatagaaagctggatctagagcttttgaatccttaattagcacagtagaaattagctttctatgggaatgctttagtgttagcagttgacaattaggcccatattcaatctgaatgggaacaaaagtaaatgcaatgataatatactgctagttagagaaacatgttagttgattatacctgaaatggattatttatctcatcagcaagtattatttgaataaaatgagaaatgcttaagaaaaattgttgctctatagtaatttggtttcgaagaatggaatggtaactattttttcccatcgttcttttgagagaaggaagtgtgatgactgatgatcttgaaaagcccatttctgattgcacgttgactggaattctttctttgtgtctgtggactagcgatgctgtttgtaaaatgaagattcgggactggctcatatctttttatctaactagatgtcagatcttgaaatctgtattctcgaagcaattctgccacttgatcgtattcacaggggccctggtaggctcctttagaaggaccatttctgttcctagagcttaactagaattcattcttcactgaaaaaaaaaaaagttacttaagaaagcatttctttcctaatctcactcaaatctgcagaattatttgtaattagtaatacaaaatctggccaaaaggagacttgtaaatagcgtaaagtggtgtcttatgctaaacggtggaatgtataggcagagaagctctttgaagttgtcagatgagctgggctcacaagcctgattcaaacaggctgtcggtctcctctcaccccttaatactgtgcagcccaaactcctaggactcttgaacatctgagcagttttgtgctttgagccactttttgacaaaaatggctccatttttccacagcgtggttttcttaaaatagtttaatgttttatagtctcatagtagtagtgttgctttctaagctataacagtcgactttattcttctactctgaaaaatcttgacttgtttgagtgtatataatatatataaagggagccttaatggattggttttcataatttaatattttttgtatttgctcttgtataattgtttttaacggaaagtattaaagaattgagggtggaattcttagaaccaaagttattcttaataaaaatcaccacatgcttggaccatgca

SEQ ID NO: 456041 - DNA, 3108 bp, Homo sapiens
agcgagagccgccctgcgccggactggcttgcgggccgggccgccgcccccggagccgccctcgcgccgcctcgggccgccgccgagcagtcgggccgctgggcgccgccgcgggcgccgggagcgagctgggagggagccgcgcgcctttgtgcgcgcgccgagacagcccacctgaggatattgaccataaggactcatatctcattacaagaagcatcatggccgagccagactacatagaagatgacaatcctgaactcattaggcctcagaaactgatcaatcctgtaaaaacctcccggaaccatcaagatcttcacagagaacttcttatgaatcaaaaaaggggtcttgctcctcagaacaaaccagaattgcagaaggtgatggaaaaaagaaaacgagaccaagtaataaagcagaaggaagaagaagcacagaagaagaaatctgacttggaaatagagctattaaaacggcagcagaagttggagcagcttgaacttgagaagcagaaattgcaagaagagcaagaaaatgcccccgagtttgtgaaggtgaaaggcaatctcaggagaacaggccaagaagtcgcccaagcccaggagtcctaggctgaggctgcaccaagacctcgtgtgtcaccccacagagctgtctgtgggtgccttctcaatctcagggcaaaagcccctggagaatattccagccagcagagaattttgacttgcagtaggatttggtttgattttcctacgatctgggtggatgccttgcctgtgacagttgcagttcctattcgccaaatgaagggcagtgccccgcacgtaagttggaatgatggacctgtgttcagagacttaacagaaccaacaagcaaaacaagtgagaacaggaaaaaggaagaggacactggaatcaattcttgagagttgcactacttggtttttcttccattccaagtttcgtgggacccagagccttttttcttttaaaagctaaaaaacaagtgtttaattcctctttttgttatctgttagataattgagatcacctagaaatgcgtttaatctgttcactcactgtaaattttgaggacccagaattgtcttgtttaatttatactttcacccctgttgcagttaacaccagagaaggaacgtgaatgtcgagcacagccactacccttgttggcacttaatttagaaatagggtgagaagtttaaaagcccatcttgattttattttcattccttttggttctctgtgtaataatagcaggctacatagtgacattccagttccaagaaggtacatcctgtccattcattaattgctttgattactaggagggtttctgttcagttttgtttttaaatgtcttgctgatctagttctttcagatggaataaccttccagtcccttagagagtggaactagtccatataacccagcttcagtagcaaaagtagaagccgccacatcttttcatttctccaagaggagagtggggaaggttcccatgaccagctgggcagtcaggatttctctaggcattctaatgtgaaataagtgtagactgctgtcaaggaggcttcatcagaagatgtatagcatttgaatgtctaatgataatgcatatcattagaatccaagctttgaaaatttctgattaatgctcatgtatttctttatctttgtttttccttgtgaagaaagactttcaccactgtctgagtgatgatgctgttgataaggatgatgtcgatgactactatattgcatctctcaggaacagctgatgggaagggaggggctgctgagttcccttgttctagctagcagcacgctcctcagagagggggccgagttacagacagcagccgcattctcatgcaaaattagttttaaactgctagtgtgggcatcggtaccttttgcctgggtgataccgaagaattgttgaggatttagtatgctccgtagagacagttcagccagtcatttctgcattggagagacttctcatactttctttgaagactcatagaaagctggatctagagcttttgaatccttaattagcacagtagaaattagctttctatgggaatgctttagtgttagcagttgacaattaggcccatattcaatctgaatgggaacaaaagtaaatgcaatgataatatactgctagttagagaaacatgttagttgattatacctgaaatggattatttatctcatcagcaagtattatttgaataaaatgagaaatgcttaagaaaaattgttgctctatagtaatttggtttcgaagaatggaatggtaactattttttcccatcgttcttttgagagaaggaagtgtgatgactgatgatcttgaaaagcccatttctgattgcacgttgactggaattctttctttgtgtctgtggactagcgatgctgtttgtaaaatgaagattcgggactggctcatatctttttatctaactagatgtcagatcttgaaatctgtattctcgaagcaattctgccacttgatcgtattcacaggggccctggtaggctcctttagaaggaccatttctgttcctagagcttaactagaattcattcttcactgaaaaaaaaaaaagttacttaagaaagcatttctttcctaatctcactcaaatctgcagaattatttgtaattagtaatacaaaatctggccaaaaggagacttgtaaatagcgtaaagtggtgtcttatgctaaacggtggaatgtataggcagagaagctctttgaagttgtcagatgagctgggctcacaagcctgattcaaacaggctgtcggtctcctctcaccccttaatactgtgcagcccaaactcctaggactcttgaacatctgagcagttttgtgctttgagccactttttgacaaaaatggctccatttttccacagcgtggttttcttaaaatagtttaatgttttatagtctcatagtagtagtgttgctttctaagctataacagtcgactttattcttctactctgaaaaatcttgacttgtttgagtgtgattctgccgggatcctcggaacaccc

SEQ ID NO: 456042 - DNA, 488 bp, Homo sapiens
  misc_feature (21)..(22): n is a, c, g, or t
ggtagttttaattcttctttnntatcctcaccatgaagttgctgatggtcctcatgctggcggccctctcccagcactgctacgcaggctctggctgccccttattggagaatgtgatttccaagacaatcaatccacaagtgtctaagactgaatacaaagaacttcttcaagagttcatagacgacaatgccactacaaatgccatagatgaattgaaggaatgttttcttaaccaaacggatgaaactctgagcaatgttgaggtgtttatgcaattaatatatgacagcagtctttgtgatttattttaactttctgcaagacctttggctcacagaactgcagggtatggtgagaaaccaactacggattgctgcaaaccacaccttctctttcttatgtctttttactacaaactacaagacaattgttgaaacctgctatacatgtttattttaataaattgatggcaaacgttggcctca

SEQ ID NO: 456043 - DNA, 263 bp, Homo sapiens
tagtgttcaattataatgaaatatttacgaaagaagaacgggagagctcacaattaatatatgacagcagtctttgtgatttattttaactttctgcaagacctttggctcacagaactgcagggtatggtgagaaaccaactacggattgctgcaaaccacaccttctctttcttatgtctttttactacaaactacaagacaattgttgaaacctgctatacatgtttattttaataaattgatggcaaacgttggcctca

SEQ ID NO: 456044 - DNA, 1129 bp, Homo sapiens
gtaaaaaaaaaaaaaaaaaaaaagttagaaatataccaaacccctccattaggatgaaagtgaacatcacctcaggaaaccctgacgctttctacaacatggatgaaccttgaggatattatagcgagtgaagagtgaagcaaagagtcacaaaaacacaaatgctgcatgacccatgcatatgggaatctggggagccagactcagagacagtgaaaaaaaaaaaaacagtggttgtcagggcttgggtgcagagaagaagggggagtcatatttaatgggtctggagtttcagttgtgcaaaacagtaatattctggagttaggttgcacaaccacacgaatatacagaacactccgaactgtccccttaaaatggcaaattttatgagatgtacattttaccactattaataatttgttaaaaactaattatcaactgcagggaagggtgatggatttgtttctttaaaagcttcctcagacagatcatagtctgcagctccaataattagtagagcacaatggtggtggcagagggcgtcggactgctgggatgctgggaatatttccacaatggagggttagacgagagctcaaagtttcacttttttttttttttttttttttgcatttgagctaagattttaacaatcctgtgaaaataggtaatatagtcacgtatttgttgaatacattatttcaaagaaccacaaacacacagaaaaaatatttaaaaagtccatggtgggggaaatgatccagaaacaacagctcttctacttccagccctaaccgtctgggatgctagatggttgtgggcaaaccgtggaaaaagataagcttctgtttttcaagattttattttgttagagagtgcagaaaatctaagtgatgtctctgtttttgctttctagcaattaatatatgacagcagtctttgtgatttattttaactttctgcaagacctttggctcacagaactgcagggtatggtgagaaaccaactacggattgctgcaaaccacaccttctctttcttatgtctttttactacaaactacaagacaattgttgaaacctgctatacatgtttattttaataaattgatggcaaacgttggcctca

SEQ ID NO: 456045 - DNA, 618 bp, Homo sapiens
cttgtgctgagtgtgtttgtgtgtgtctctgtgtttctgtgtttgtgtgtttctgtctgtgtgtttgtgtttgtgtctggatgattgtgtgctggtgtgattgtgtctggtgtctgtgtctgtgtctttgcctgtctgtcctatgtttgtgtatgttctgaatgtgtgtgtatttgttgaatacattatttcaaagaaccacaaacacacagaaaaaatatttaaaaagtccatggtgggggaaatgatccagaaacaacagctcttctacttccagccctaaccgtctgggatgctagatggttgtgggcaaaccgtggaaaaagataagcttctgtttttcaagattttattttgttagagagtgcagaaaatctaagtgatgtctctgtttttgctttctagcaattaatatatgacagcagtctttgtgatttattttaactttctgcaagacctttggctcacagaactgcagggtatggtgagaaaccaactacggattgctgcaaaccacaccttctctttcttatgtctttttactacaaactacaagacaattgttgaaacctgctatacatgtttattttaataaattgatggcaaacgttggcctca

SEQ ID NO: 456046 - DNA, 248 bp, Homo sapiens
gagcgggggaacaggatcttggagaggtgtttatgcaattaatatatgacagcagtctttgtgatttattttaactttctgcaagacctttggctcacagaactgcagggtatggtgagaaaccaactacggattgctgcaaaccacaccttctctttcttatgtctttttactacaaactacaagacaattgttgaaacctgctatacatgtttattttaataaattgatggcaaacgttggcctca

SEQ ID NO: 456047 - DNA, 518 bp, Homo sapiens
tccacagcggcttccttgatccttgccacccgcgactgaacaccgacagcagcagcctcaccatgaagttgctgatggtcctcatgctggcggccctctcccagcactgctacgcaggctctggctgccccttattggagaatgtgatttccaagacaatcaatccacaagtgtctaagactgaatacaaagaacttcttcaagagttcatagacgacaatgccactacaaatgccatagatgaattgaaggaatgttttcttaaccaaacggatgaaactctgagcaatgttgaggtgtttatgcaattaatatatgacagcagtctttgtgatttattttaactttctgcaagacctttggctcacagaactgcagggtatggtgagaaaccaactacggattgctgcaaaccacaccttctctttcttatgtctttttactacaaactacaagacaattgttgaaacctgctatacatgtttattttaataaattgatggcaaacgttggcctca

SEQ ID NO: 456048 - DNA, 3456 bp, Homo sapiens
  misc_feature (2)..(3): n is a, c, g, or t
  misc_feature (5)..(5): n is a, c, g, or t
  misc_feature (64)..(64): n is a, c, g, or t
tnncnaggtttagaatctgacctatctaccttaatagtgtggctcagtaaaaacagatcaatanaacacctggcgttaggcaaaaattttaataatatgaatcaaaatctgacacctgtatggacacttagtacagatgatcaagatgaagaatcacctctgcagtccttgtccctggctgactcgaaactcaagactgaggtcaccatcatcatcaatgccctgggaagcaacacctccctgaccaaagtggacattagcggcaacggaatgggggacatgggagcgaagatgctggccaaagcactgcagatcaacactaagctcaggactgtaatatgggacaagaacaacatcactgcacaaggctttcaggatatagctgttgctatggaaaagaactacacattaagatttatgccaattcctatgtatgatgcttctcaagccctaaaaacaaaccctgaaaaaacagaagacgctctgcaaaagatagaaaactacctgctacgaaatcacgagactagaaaataccttcaagagcaggcctaccgcctgcagcagggtattgtcaccagcaccacccagcagatgattgacagaatatgtgtgaaagtacaagatcatctcaactccttacgaaattgtgggggagacgctatccaggaagatttaaaatcagcagagcggctcatgcgtgatgctaagaactctaaaacgttgttaccaaatttataccatgttggtggtgcatcttgggcgggagcagtggcttactatccagtccaattcaggagaccctggaatcaatggctggagaagttacaagagtagtagatgaacaactaaaggcgttgcttgagtccatggttgatgctgctgagaatctttgtcccaatgtgatgaaaaaagcccacattcgacaagacttgattcatgccagcaccgaaaagatttctattccacgtacctttgttaaaaatgtcctgttggagcagtctggaattgatatccttaacaaaattagtgaagtaaaattgacagtggcctcgttcctgtctgatagaattgtggatgaaatcctggatgcactctcacattgccatcataaactggctgaccatttcagcagacgtggcaagacccttcctcaacaagaatccttagagatcgagctggctgaggagaagccagttaaacgttccatcatcacagtggaggagctaacagagatagagcgtttggaagatctggatacctgtatgatgacccctaaatccaaaaggaagagtatccatagccgaatgctgcggcctgtttctagggcttttgaaatggagtttgatctagataaagcgctggaagaggtaccaattcacatcgaagacccgcccttcccatccctcagacaggagaagcggagctcgggatttatctctgagttgccctctgaagaggggaagaagctggaacactttaccaagttaaggccaaaaaggaataagaagcagcaacccacccaagcagcggtctgtgctgccaacatagtctcacaagatggtgaacagaatggtctcatggggagagtggatgaaggtgtagatgaattttttaccaagaaggtgaccaaaatggattccaagaaatggtcaacaagaggctcagagtcccatgagcttaatgaaggaggagatgaaaagaaaaagcgagattctcggaaaagtagtggctttctcaatttaatcaaatcccggtccaaatccgagcgaccaccaacgatcttgatgacagaagaaccctcctcaccaaaaggggcagtcagaagtccacctgtggactgtcccaggaaggacacaaaggccgccgagcacaatggcaattctgaacggatagaggagataaaaacacctgactcctttgaagagagtcaaggggaagaaatagggaaggtggaacggagtgacagcaagagcagcccacaggcagggcggaggtatggggtccaggtgatgggcagtggtctgctggcagagatgaaagccaagcaagtccagagaaccgctttggtttgggaacaccagaaaagaataccaaagcagaacccaaagcggaagcaggctccaggtctcggagctcatccagcacacctacgagcccgaagcccctcctgcagtcccccaaacccagtctggcagcacggcccgtcatcccgcagaaaccaagaaccgcctcacggcctgatgacattccagactctccatctagcccgaaagttgcccttcttccacctgtcctgaaaaaagttccttcagacaaagagagagatggccagagtagcccccagcccagccccaggacattttcacaggaagtttcaaggagaagctggggccagcaggcccaggagtatcaagaacaaaagcaacggtcctccagtaaagatggccatcaaggcagcaaatctaatgactccggggaagaagcagaaaaagagtttatttttgtgtaaaggtcacccacgcagaagtcttcctgtgcagggtgctttggtagccatcagagaggaaccaagggcaacatcttttcttcccaggcgttcttctctgggtgctttattctcttctttttctttatttcgcccccacccccatcccctgccttttttttttttttttttttgtatagaaacagatccatttcttggtaatcaaagcacatttgtttggtcttcctccaaccctttgcatttgatttctaaacattccttcatatgcctttaatgaaagccagcaattatcccatgggccctacttgaatttatctgaggcagctacagattgccctgcaagatgagtttttggagataaatgaaataactggacacacactcacacaagtaacaccacagcagacctcggagtactgctaagtgtacctgtgtcaaatccgcacaggactcaatatagcaatttattcttgatgtatgcaattgcacattgtaattatattaacagagcacactaataatttgtatagattatatatattagatcttgggtatggtttttaccttctcccatggggaacttcttccttcctgatgtggaattgtacatttaaagcttggtcggtgacctttgcataccatcaacgagcacagctaagaacagagtgagagaggcccatggctgattttaccatgtgcccagattaatgtatatagttgattggaatgaggttttatgaatattcatgtttttgaaggcctttaatttctgtctgcatattagcttttaatgtgtgattttaagagagaatactttgacacctgtaaaaatcaaaatactactctttataagacatttcacaaatattcacttacattacaggctggaagtattttattcatatgtatatttataccaataaaatgattttacaagtggaaaaaaaaac

SEQ ID NO: 456049 - DNA, 3430 bp, Homo sapiens
  misc_feature (2)..(3): n is a, c, g, or t
  misc_feature (5)..(5): n is a, c, g, or t
  misc_feature (64)..(64): n is a, c, g, or t
tnncnaggtttagaatctgacctatctaccttaatagtgtggctcagtaaaaacagatcaatanaacacctggcgttaggcaaaaattttaataatatgaatcaaaatctgacacctgtatggacacttagtacagatgatcaagatgaagaatcacctctgcagtccttgtccctggctgactcgaaactcaagactgaggtcaccatcatcatcaatgccctgggaagcaacacctccctgaccaaagtggacattagcggcaacggaatgggggacatgggagcgaagatgctggccaaagcactgcagatcaacactaagctcaggactgtaatatgggacaagaacaacatcactgcacaaggctttcaggatatagctgttgctatggaaaagaactacacattaagatttatgccaattcctatgtatgatgcttctcaagccctaaaaacaaaccctgaaaaaacagaagacgctctgcaaaagatagaaaactacctgctacgaaatcacgagactagaaaataccttcaagagcaggcctaccgcctgcagcagggtattgtcaccagcaccacccagcagatgattgacagaatatgtgtgaaagtacaagatcatctcaactccttacgaaattgtgggggagacgctatccaggaagatttaaaatcagcagagcggctcatgcgtgatgctaagaactctaaaacgttgttaccaaatttataccatgttggtggtgcatcttgggcgggagcagtggcttactatccagtccaattcaggagaccctggaatcaatggctggagaagttacaagagtagtagatgaacaactaaaggcgttgcttgagtccatggttgatgctgctgagaatctttgtcccaatgtgatgaaaaaagcccacattcgacaagacttgattcatgccagcaccgaaaagatttctattccacgtacctttgttaaaaatgtcctgttggagcagtctggaattgatatccttaacaaaattagtgaagtaaaattgacagtggcctcgttcctgtctgatagaattgtggatgaaatcctggatgcactctcacattgccatcataaactggctgaccatttcagcagacgtggcaagacccttcctcaacaaggagaagccagttaaacgttccatcatcacagtggaggagctaacagagatagagcgtttggaagatctggatacctgtatgatgacccctaaatccaaaaggaagagtatccatagccgaatgctgcggcctgtttctagggcttttgaaatggagtttgatctagataaagcgctggaagaggtaccaattcacatcgaagacccgcccttcccatccctcagacaggagaagcggagctcgggatttatctctgagttgccctctgaagaggggaagaagctggaacactttaccaagttaaggccaaaaaggaataagaagcagcaacccacccaagcagcggtctgtgctgccaacatagtctcacaagatggtgaacagaatggtctcatggggagagtggatgaaggtgtagatgaattttttaccaagaaggtgaccaaaatggattccaagaaatggtcaacaagaggctcagagtcccatgagcttaatgaaggaggagatgaaaagaaaaagcgagattctcggaaaagtagtggctttctcaatttaatcaaatcccggtccaaatccgagcgaccaccaacgatcttgatgacagaagaaccctcctcaccaaaaggggcagtcagaagtccacctgtggactgtcccaggaaggacacaaaggccgccgagcacaatggcaattctgaacggatagaggagataaaaacacctgactcctttgaagagagtcaaggggaagaaatagggaaggtggaacggagtgacagcaagagcagcccacaggcagggcggaggtatggggtccaggtgatgggcagtggtctgctggcagagatgaaagccaagcaagtccagagaaccgctttggtttgggaacaccagaaaagaataccaaagcagaacccaaagcggaagcaggctccaggtctcggagctcatccagcacacctacgagcccgaagcccctcctgcagtcccccaaacccagtctggcagcacggcccgtcatcccgcagaaaccaagaaccgcctcacggcctgatgacattccagactctccatctagcccgaaagttgcccttcttccacctgtcctgaaaaaagttccttcagacaaagagagagatggccagagtagcccccagcccagccccaggacattttcacaggaagtttcaaggagaagctggggccagcaggcccaggagtatcaagaacaaaagcaacggtcctccagtaaagatggccatcaaggcagcaaatctaatgactccggggaagaagcagaaaaagagtttatttttgtgtaaaggtcacccacgcagaagtcttcctgtgcagggtgctttggtagccatcagagaggaaccaagggcaacatcttttcttcccaggcgttcttctctgggtgctttattctcttctttttctttatttcgcccccacccccatcccctgccttttttttttttttttttttgtatagaaacagatccatttcttggtaatcaaagcacatttgtttggtcttcctccaaccctttgcatttgatttctaaacattccttcatatgcctttaatgaaagccagcaattatcccatgggccctacttgaatttatctgaggcagctacagattgccctgcaagatgagtttttggagataaatgaaataactggacacacactcacacaagtaacaccacagcagacctcggagtactgctaagtgtacctgtgtcaaatccgcacaggactcaatatagcaatttattcttgatgtatgcaattgcacattgtaattatattaacagagcacactaataatttgtatagattatatatattagatcttgggtatggtttttaccttctcccatggggaacttcttccttcctgatgtggaattgtacatttaaagcttggtcggtgacctttgcataccatcaacgagcacagctaagaacagagtgagagaggcccatggctgattttaccatgtgcccagattaatgtatatagttgattggaatgaggttttatgaatattcatgtttttgaaggcctttaatttctgtctgcatattagcttttaatgtgtgattttaagagagaatactttgacacctgtaaaaatcaaaatactactctttataagacatttcacaaatattcacttacattacaggctggaagtattttattcatatgtatatttataccaataaaatgattttacaagtggaaaaaaaaac

SEQ ID NO: 456050 - DNA, 2743 bp, Homo sapiens
ttgccgatttcatgactaaccagtgtaagtggcagtttagcgcatgggataatgtacccgtcctcattttttcaggttgccttgcccattctggacattttggctgtaagaatattggaaacaaagggggaaagctggtttattccatgtaggttgcgttgagaatttcctaggaaaagtaagttgtgcttaggaagtaggaaagcagccaggcccccgcttcccacatacagtcaaaaagcaagcatgagagtctgctatagtgagatggaaatggctagcttgcctttttcttgtctatttcatagccaaggaggaaggaaaaactggacctcattatggatttacttttgggatacactcattattccagaggagggtaaaaggctgagaagcttaaggtatttcagtctgttttatgttactcatttgcgaaaagcaggctcatcgaatacaggtgagtttcaacgtgtcttgaatatggcagcatttaaaagtcttcagaccaggcatggtggctcatgcctgtcatcccagcactttgggaggccgaggcaggcagatcatgaggtcaggagatcgagaccatcccggctaacagtggaaccctgtctctactgaaaatacaaaaaaaatcagcctcctgagtagctgggacttcagatgcatgccatcatgcctgactaatttttctattttttgcagagatggggggtctcactatgttgcctaggctggtctcaagctcgtgacctcaaacaattctcccatctcagtttcccaaagtgctgagatagattacaggcatgagccactgcacccagccaaaactagatttttggaaaccaaacctagagcagattctgtacatttctagcatgcaagggccctcatcacataaagcatcaggggctgcagagcctgcatagatgttcaacaagaaaaacagtaaaggtcaccaagcccactgactttccctggccccatgcacctctcacctgtgaggagccttccgaggaaccaaaccggccacactttggaccccagagtcctgaccgtaaacacagaatagaatgtgtttctcacagttttgtcccagccagagagcctatggagacaggtcaggcacagtcaccataacagcagctgagttaaagagcccttctttgctgtcatttattatctgcattgttttttcacttttgcattaaataaatgtgcactttttggggggatggtgcttgaattttttagaagcttgggaatgatgccgtatcccaggattcttccagcccagctttgagcagcgtagaacggtcggatggaggtggggcagtccagagaaccgctttggtttgggaacaccagaaaagaataccaaagcagaacccaaagcggaagcaggctccaggtctcggagctcatccagcacacctacgagcccgaagcccctcctgcagtcccccaaacccagtctggcagcacggcccgtcatcccgcagaaaccaagaaccgcctcacggcctgatgacattccagactctccatctagcccgaaagttgcccttcttccacctgtcctgaaaaaagttccttcagacaaagagagagatggccagagtagcccccagcccagccccaggacattttcacaggaagtttcaaggagaagctggggccagcaggcccaggagtatcaagaacaaaagcaacggtcctccagtaaagatggccatcaaggcagcaaatctaatgactccggggaagaagcagaaaaagagtttatttttgtgtaaaggtcacccacgcagaagtcttcctgtgcagggtgctttggtagccatcagagaggaaccaagggcaacatcttttcttcccaggcgttcttctctgggtgctttattctcttctttttctttatttcgcccccacccccatcccctgccttttttttttttttttttttgtatagaaacagatccatttcttggtaatcaaagcacatttgtttggtcttcctccaaccctttgcatttgatttctaaacattccttcatatgcctttaatgaaagccagcaattatcccatgggccctacttgaatttatctgaggcagctacagattgccctgcaagatgagtttttggagataaatgaaataactggacacacactcacacaagtaacaccacagcagacctcggagtactgctaagtgtacctgtgtcaaatccgcacaggactcaatatagcaatttattcttgatgtatgcaattgcacattgtaattatattaacagagcacactaataatttgtatagattatatatattagatcttgggtatggtttttaccttctcccatggggaacttcttccttcctgatgtggaattgtacatttaaagcttggtcggtgacctttgcataccatcaacgagcacagctaagaacagagtgagagaggcccatggctgattttaccatgtgcccagattaatgtatatagttgattggaatgaggttttatgaatattcatgtttttgaaggcctttaatttctgtctgcatattagcttttaatgtgtgattttaagagagaatactttgacacctgtaaaaatcaaaatactactctttataagacatttcacaaatattcacttacattacaggctggaagtattttattcatatgtatatttataccaataaaatgattttacaagtggaaaaaaaaac

SEQ ID NO: 456051 - DNA, 286 bp, Homo sapiens
cattctcagtgactccagttagaagggtttgaggttttcatccttgtgcattctgtggtttgctgaagtttttttcatactccttcgttctgtgtttccttctatctgaatatcggctgggctgacttggatgcttgcctttttctggtttggagcagatgattgacagaatatgtgtgaaagtacaagatcatctcaactccttacgaaattgtgggggagacgctatccaggaagatttaaaatcagcagagcggctcatgcgtgatgctaagaactctaaaac

SEQ ID NO: 456052 - DNA, 385 bp, Homo sapiens
ggatgttacttcactgagcaaaaacacaaaactaatttttggccagaaaaattctatgatgctttatttttttaaatgacttatttttatatatagatttaccaggctttatgttcttggaatccagtttgtggaacagtttgattcacgtgtttgtgtctccttagatgacattccagactctccatctagcccgaaagttgcccttcttccacctgtcctgaaaaaagttccttcagacaaagagagagatggccagagtagcccccagcccagccccaggacattttcacaggaaggtaaggattgtaaggatttcttttctctgggttagctctccccaaggagggacatttcaaaataaaggaactcatcctggacttta

SEQ ID NO: 456053 - DNA, 3175 bp, Homo sapiens
cctagttttagaagtttcaatagcactgcagatcaacactaagctcaggactgtaatatgggacaagaacaacatcactgcacaaggctttcaggatatagctgttgctatggaaaagaactacacattaagatttatgccaattcctatgtatgatgcttctcaagccctaaaaacaaaccctgaaaaaacagaagacgctctgcaaaagatagaaaactacctgctacgaaatcacgagactagaaaataccttcaagagcaggcctaccgcctgcagcagggtattgtcaccagcaccacccagcagatgattgacagaatatgtgtgaaagtacaagatcatctcaactccttacgaaattgtgggggagacgctatccaggaagatttaaaatcagcagagcggctcatgcgtgatgctaagaactctaaaacgttgttaccaaatttataccatgttggtggtgcatcttgggcgggagcagtggcttactatccagtccaattcaggagaccctggaatcaatggctggagaagttacaagagtagtagatgaacaactaaaggcgttgcttgagtccatggttgatgctgctgagaatctttgtcccaatgtgatgaaaaaagcccacattcgacaagacttgattcatgccagcaccgaaaagatttctattccacgtacctttgttaaaaatgtcctgttggagcagtctggaattgatatccttaacaaaattagtgaagtaaaattgacagtggcctcgttcctgtctgatagaattgtggatgaaatcctggatgcactctcacattgccatcataaactggctgaccatttcagcagacgtggcaagacccttcctcaacaagaatccttagagatcgagctggctgaggagaagccagttaaacgttccatcatcacagtggaggagctaacagagatagagcgtttggaagatctggatacctgtatgatgacccctaaatccaaaaggaagagtatccatagccgaatgctgcggcctgtttctagggcttttgaaatggagtttgatctagataaagcgctggaagaggtaccaattcacatcgaagacccgcccttcccatccctcagacaggagaagcggagctcgggatttatctctgagttgccctctgaagaggggaagaagctggaacactttaccaagttaaggccaaaaaggaataagaagcagcaacccacccaagcagcggtctgtgctgccaacatagtctcacaagatggtgaacagaatggtctcatggggagagtggatgaaggtgtagatgaattttttaccaagaaggtgaccaaaatggattccaagaaatggtcaacaagaggctcagagtcccatgagcttaatgaaggaggagatgaaaagaaaaagcgagattctcggaaaagtagtggctttctcaatttaatcaaatcccggtccaaatccgagcgaccaccaacgatcttgatgacagaagaaccctcctcaccaaaaggggcagtcagaagtccacctgtggactgtcccaggaaggacacaaaggccgccgagcacaatggcaattctgaacggatagaggagataaaaacacctgactcctttgaagagagtcaaggggaagaaatagggaaggtggaacggagtgacagcaagagcagcccacaggcagggcggaggtatggggtccaggtgatgggcagtggtctgctggcagagatgaaagccaagcaagtccagagaaccgctttggtttgggaacaccagaaaagaataccaaagcagaacccaaagcggaagcaggctccaggtctcggagctcatccagcacacctacgagcccgaagcccctcctgcagtcccccaaacccagtctggcagcacggcccgtcatcccgcagaaaccaagaaccgcctcacggcctgatgacattccagactctccatctagcccgaaagttgcccttcttccacctgtcctgaaaaaagttccttcagacaaagagagagatggccagagtagcccccagcccagccccaggacattttcacaggaagtttcaaggagaagctggggccagcaggcccaggagtatcaagaacaaaagcaacggtcctccagtaaagatggccatcaaggcagcaaatctaatgactccggggaagaagcagaaaaagagtttatttttgtgtaaaggtcacccacgcagaagtcttcctgtgcagggtgctttggtagccatcagagaggaaccaagggcaacatcttttcttcccaggcgttcttctctgggtgctttattctcttctttttctttatttcgcccccacccccatcccctgccttttttttttttttttttttgtatagaaacagatccatttcttggtaatcaaagcacatttgtttggtcttcctccaaccctttgcatttgatttctaaacattccttcatatgcctttaatgaaagccagcaattatcccatgggccctacttgaatttatctgaggcagctacagattgccctgcaagatgagtttttggagataaatgaaataactggacacacactcacacaagtaacaccacagcagacctcggagtactgctaagtgtacctgtgtcaaatccgcacaggactcaatatagcaatttattcttgatgtatgcaattgcacattgtaattatattaacagagcacactaataatttgtatagattatatatattagatcttgggtatggtttttaccttctcccatggggaacttcttccttcctgatgtggaattgtacatttaaagcttggtcggtgacctttgcataccatcaacgagcacagctaagaacagagtgagagaggcccatggctgattttaccatgtgcccagattaatgtatatagttgattggaatgaggttttatgaatattcatgtttttgaaggcctttaatttctgtctgcatattagcttttaatgtgtgattttaagagagaatactttgacacctgtaaaaatcaaaatactactctttataagacatttcacaaatattcacttacattacaggctggaagtattttattcatatgtatatttataccaataaaatgattttacaagtggaaaaaaaaac

SEQ ID NO: 456054 - DNA, 3271 bp, Homo sapiens
  misc_feature (2)..(3): n is a, c, g, or t
  misc_feature (5)..(5): n is a, c, g, or t
  misc_feature (64)..(64): n is a, c, g, or t
tnncnaggtttagaatctgacctatctaccttaatagtgtggctcagtaaaaacagatcaatanaacacctggcgttaggcaaaaattttaataatatgaatcaaaatctgacacctgtatggacacttagtacagatgatcaagatgaagaatcacctctgcagtccttgtccctggctgactcgaaactcaagactgaggtcaccatcatcatcaatgccctgggaagcaacacctccctgaccaaagtggacattagcggcaacggaatgggggacatgggagcgaagatgctggccaaagcactgcagatcaacactaagctcaggactgtaatatgggacaagaacaacatcactgcacaaggctttcaggatatagctgttgctatggaaaagaactacacattaagatttatgccaattcctatgtatgatgcttctcaagccctaaaaacaaaccctgaaaaaacagaagacgctctgcaaaagatagaaaactacctgctacgaaatcacgagactagaaaataccttcaagagcaggcctaccgcctgcagcagggtattgtcaccagcaccacccagcagatgattgacagaatatgtgtgaaagtacaagatcatctcaactccttacgaaattgtgggggagacgctatccaggaagatttaaaatcagcagagcggctcatgcgtgatgctaagaactctaaaacgttgttaccaaatttataccatgttggtggtgcatcttgggcgggagcagtggcttactatccagtccaattcaggagaccctggaatcaatggctggagaagttacaagagtagtagatgaacaactaaaggcgttgcttgagtccatggttgatgctgctgagaatctttgtcccaatgtgatgaaaaaagcccacattcgacaagacttgattcatgccagcaccgaaaagatttctattccacgtacctttgttaaaaatgtcctgttggagcagtctggaattgatatccttaacaaaattagtgaagtaaaattgacagtggcctcgttcctgtctgatagaattgtggatgaaatcctggatgcactctcacattgccatcataaactggctgaccatttcagcagacgtggcaagacccttcctcaacaagaatccttagagatcgagctggctgaggagaagccagttaaacgttccatcatcacagtggaggagctaacagagatagagcgtttggaagatctggatacctgtatgatgacccctaaatccaaaaggaagagtatccatagccgaatgctgcggcctgtttctagggcttttgaaatggagtttgatctagataaagcgctggaagaggtaccaattcacatcgaagacccgcccttcccatccctcagacaggagaagcggagctcgggatttatctctgagttgccctctgaagaggggaagaagctggaacactttaccaagttaaggccaaaaaggaataagaagcagcaacccacccaagcagcggtctgtgctgccaacatagtctcacaagatggtgaacagaatggtctcatggggagagtggatgaaggtgtagatgaattttttaccaagaaggtgaccaaaatggattccaagaaatggtcaacaagaggctcagagtcccatgagcttaatgaaggaggagatgaaaagaaaaagcgagattctcggaaaagtagtggctttctcaatttaatcaaatcccggtccaaatccgagcgaccaccaacgatcttgatgacagaagaaccctcctcaccaaaaggggcagtcagaagtccacctgtggactgtcccaggaaggacacaaaggccgccgagcacaatggcaattctgaacggatagaggagataaaaacacctgactcctttgaagagagtcaaggggaagaaatagggaaggtggaacggagtgacagcaagagcagcccacaggcagggcggaggtatggggtccaggtgatgggcagtggtctgctggcagagatgaaagccaagcaagtccagagaaccgctttggtttgggaacaccagaaaagaataccaaagcagaacccaaagcggaagcaggctccaggtctcggagctcatccagcacacctacgagcccgaagcccctcctgcagtcccccaaacccagtctggcagcacggcccgtcatcccgcagaaaccaagaaccgcctcacggcctgatgacattccagactctccatctagcccgaaagttgcccttcttccacctgtcctgaaaaaagttccttcagacaaagagagagatggccagagtagcccccagcccagccccaggacattttcacaggaagtttcaaggagaagctggggccagcaggcccaggagtatcaagaacaaaagcaacggtcctccagtaaagatggccatcaaggcagcaaatctaatgactccggggaagaagcagaaaaagagtttatttttgtgtaaaggtcacccacgcagaagtcttcctgtgcagggtgctttggtagccatcagagaggaaccaagggcaacatcttttcttcccaggcgttcttctctgggtgctttattctcttctttttctttatttcgcccccacccccatcccctgccttttttttttttttttttttgtatagaaacagatccatttcttggtaatcaaagcacatttgtttggtcttcctccaaccctttgcatttgatttctaaacattccttcatatgcctttaatgaaagccagcaattatcccatgggccctacttgaatttatctgaggcagctacagattgccctgcaagatgagtttttggagataaatgaaataactggacacacactcacacaagtaacaccacagcagacctcggagtactgctaagtgtacctgtgtcaaatccgcacaggactcaatatagcaatttattcttgatgtatgcaattgcacattgtaattatattaacagagcacactaataatttgtatatagttgattggaatgaggttttatgaatattcatgtttttgaaggcctttaatttctgtctgcatattagcttttaatgtgtgattttaagagagaatactttgacacctgtaaaaatcaaaatactactctttataagacatttcacaaatattcacttacattacaggctggaagtattttattcatatgtatatttataccaataaaatgattttacaagtggaaaaaaaaac

SEQ ID NO: 456055 - DNA, 3587 bp, Homo sapiens
ttgccgatttcatgactaaccagtgtaagtggcagtttagcgcatgggataatgtacccgtcctcattttttcaggttgccttgcccattctggacattttggctgtaagaatattggaaacaaagggggaaagctggtttattccatgtaggttgcgttgagaatttcctaggaaaagtaagttgtgcttaggaagtaggaaagcagccaggcccccgcttcccacatacagtcaaaaagcaagcatgagagtctgctatagtgagatggaaatggctagcttgcctttttcttgtctatttcatagccaaggaggaaggaaaaactggacctcattatggatttacttttgggatacactcattattccagaggagggtaaaaggctgagaagcttaaggtatttcagtctgttttatgttactcatttgcgaaaagcaggctcatcgaatacaggtgagtttcaacgtgtcttgaatatggcagcatttaaaagtcttcagaccaggcatggtggctcatgcctgtcatcccagcactttgggaggccgaggcaggcagatcatgaggtcaggagatcgagaccatcccggctaacagtggaaccctgtctctactgaaaatacaaaaaaaatcagcctcctgagtagctgggacttcagatgcatgccatcatgcctgactaatttttctattttttgcagagatggggggtctcactatgttgcctaggctggtctcaagctcgtgacctcaaacaattctcccatctcagtttcccaaagtgctgagatagattacaggcatgagccactgcacccagccaaaactagatttttggaaaccaaacctagagcagattctgtacatttctagcatgcaagggccctcatcacataaagcatcaggggctgcagagcctgcatagatgttcaacaagaaaaacagtaaaggtcaccaagcccactgactttccctggccccatgcacctctcacctgtgaggagccttccgaggaaccaaaccggccacactttggaccccagagtcctgaccgtaaacacagaatagaatgtgtttctcacagttttgtcccagccagagagcctatggagacaggtcaggcacagtcaccataacagcagctgagttaaagagcccttctttgctgtcatttattatctgcattgttttttcacttttgcattaaataaatgtgcactttttggggggatggtgcttgaattttttagaagcttgggaatgatgccgtatcccaggattcttccagcccagctttgagcagcgtagaacggtcggatggaggtggggcaggtaagtcaggccattgccatcacccccttaggaaaagcgcttaccttctgattgcagagtcacatgattgacagaagaaaaatttaaacagggaggcaagaactgatctctttgttgtgtgttctcagctatcatctgaaagaccatatcccttcacctgccttatcttcccctggggcacatcctgcccctctgtagcattgtgcctggacagggcactttttgatttcccaaagggaggaaattctgacggttttttcattgcaaactcctcagctttgagcattttggaaaagttgggggtgggggcagcatacaggatcatggctgatgtatttaagaataagccatgcatgacatatggaagatgggtggctgtcttgtttggtatgaacaatatgcttcgcttgcagcttgaatatgcatgaaatccaatatcccttgtccctctgacttcttaggtataataaaataagaaaataccttagatgaaaactagagagtaatgcgttaactgtgtgatagaatcctcactttgctatttgagagtcttatgcatagctacagtatcttggtgcagtaagagttggatgataaatcacattttatgggcttatttttgccagttgtcttgttaaattaaggcagcagtatggatggaggtgggggatgagatgacatttctggagctgttctcactaaacatgagattgcagccgtcagcatcaccctcctcactcagaacctgtagccagagccctaactgcttattgtccagaaccaaggcacttacatttggttatacctgtaccttgtgccagatctgagaaagacccaaatatttcaagtgcatgaagaaccactgttttccttgtatgtgattacggcactgtacattattaaatataaaagcttgtcatcgctggaatagtcaggggtgatcagaaaacaaccaaaaagtttattgcttttctacaaagaacgtcactcttcctccagcatgttttgattttaaaacatgctagaacagcatattcttaaaatactcttaaaacatccatgatgagaaacgatggcaaatgattacagcagtttgtaccagacttctagcttcaagttattggcttctttgacctttgatttttaaagtggcctttttcatcttagtgcctaaactgcacccaggtcttccagagaaccgctttggtttgggaacaccagaaaagaataccaaagcagaacccaaagcggaagcaggctccaggtctcggagctcatccagcacacctacgagcccgaagcccctcctgcagtcccccaaacccagtctggcagcacggcccgtcatcccgcagaaaccaagaaccgcctcacggcctggtaagagttttgcagttagggagttgcattgtgaccaggtggcttcccagagccagctggatcagactctgcaggtggtttcaggggcagctggtgagcgaggtacagcggcttctgcaggaggggatcacaagaaacctatgcaaagctgtgaaagtgatgagagctgatggatttttttatttaatgcagaggcccaccatgtgtgagagttggggactctgagactgtccttgctttcaggggtacaggttagtttgtaggcaagacagggaaatcagtcttttgtcatgttgacccatctgtagtgctcggcttggctttctaatatctgtctccagggcgttcagacattttgaaaagcagcagtttaaggaggaaggctacaaatggggaaagcacaagctctgtggtgtttatgccatattctatgatataacaagggtttagaacaagacttggcaaacaatgggcctgtttttgtgaatagttttagtggacacagccatactatttttgcgttggtgtcacctgtggctgtggctgcgctacagtggcagagtggtatacttgcaacagggccatatggtctgcaaagtgtaaaatatttactcttgggccctttacaaaaaagtttgctattagtttagaaaatctatgatagaagaaacttaaaaatattagaaatggattggtcttcaccttattctctcctgcacaaaataaggccaggtgtggtagtgcacacctgtagtccctgctacttgggaggctgaggtgggaggataacttgagcctaggaatttaggctgtgatcacactgtgaccacaccactgcactccagcctgggcgacagtgagactgcttctc

SEQ ID NO: 456056 - DNA, 2422 bp, Homo sapiens
  misc_feature (2390)..(2390): n is a, c, g, or t
cgggtctgatagtccctacctgtcaggactggtgttaggatgagataatgtttgtgaactgtaaacatatataaacgtgtgctactgtgagaactggaacaaagaagagagggagtgagagaaatcaagggagggctggggctgggaaagaacgaaaagggagtcgcgtatagaggagagcgcgacagtcgcgagccacactttgcaatgaaactctttagactttctgccgggagagcggcccagacgcgccaggtctgtagcaggaggccgcgcgagggcgggtccccagaagcctacaggtgagtatcggttctccccttcccggctttcggtccggaggaggcgggagcagcttccctgttctgatcctatcgcgggcggcgcagggccggcttggccttccgtgggacggggaggggggcgggatgtgtcacccaaataccagtggggacggtcggtggtggaaccagccgggcaggtcgggtagagtataagagccggagggagcggccgggcggcagacgcctgcagaccatcccagacgccggagcccgagccccgacgagtccccgcgcctcatccgcccgcgtccggtccgcgttcctccgccccaccatggctcggggccccggcctcgcgccgccaccgctgcggctgccgctgctgctgctggtgctggcggcggtgaccggccacacggccgcgcaggacaactgcacgtgtcccaccaacaagatgaccgtgtgcagccccgacggccccggcggccgctgccagtgccgcgcgctgggctcgggcatggcggtcgactgctccacgctgacctccaagtgtctgctgctcaaggcgcgcatgagcgcccccaagaacgcccgcacgctggtgcggccgagtgagcacgcgctcgtggacaacgatggcctctacgaccccgactgcgaccccgagggccgcttcaaggcgcgccagtgcaaccagacgtcggtgtgctggtgcgtgaactcggtgggcgtgcgccgcacggacaagggcgacctgagcctacgctgcgatgagctggtgcgcacccaccacatcctcattgacctgcgccaccgccccaccgccggcgccttcaaccactcagacctggacgccgagctgaggcggctcttccgcgagcgctatcggctgcaccccaagttcgtggcggccgtgcactacgagcagcccaccatccagatcgagctgcggcagaacacgtctcagaaggccgccggtgacgtggatatcggcgatgccgcctactacttcgagagggacatcaagggcgagtctctattccagggccgcggcggcctggacttgcgcgtgcgcggagaacccctgcaggtggagcgcacgctcatctattacctggacgagattcccccgaagttctccatgaagcgcctcaccgccggcctcatcgccgtcatcgtggtggtcgtggtggccctcgtcgccggcatggccgtcctggtgatcaccaaccggagaaagtcggggaagtacaagaaggtggagatcaaggaactgggggagttgagaaaggaaccgagcttgtaggtacccggcggggcaggggatggggtggggtaccggatttcggtatcgtcccagacccaagtgagtcacgcttcctgattcctcggcgcaaaggagacgtttatcctttcaaattcctgccttccccctcccttttgcgcacacaccaggtttaatagatcctggcctcagggtctcctttctttctcacttctgtcttgaaggaagcatttctaaaatgtatcccctttcggtccaacaacaggaaacctgactggggcagtgaaggaagggatggcatagcgttatgtgtaaaaaacaagtatctgtatgacaacccgggatcgtttgcaagtaactgaatccattgcgacattgtgaaggcttaaatgagtttagatgggaaatagcgttgttatcgccttgggtttaaattatttgatgagttccacttgtatcatggcctacccgaggagaagaggagtttgttaactgggcctatgtagtagcctcatttaccatcgtttgtattactgaccacatatgcttgtcactgggaaagaagcctgtttcagctgcctgaacgcagtttggatgtctttgaggacagacattgcccggaaactcagtctatttattcttcagcttgcccttactgccactgatattggtaatgttcttttttgtaaaatgtttgtacatatgttgtctttgataatgttgctgtaattttttaaaataaaacacgaatttaaatgaggctactacataggcccagttaacaaactcctcttctcctcgggtaggccatgatacaagtngaactcatcaaataatttaaacccagtcgagc

SEQ ID NO: 456057 - DNA, 1886 bp, Homo sapiens
cgggtctgatagtccctacctgtcaggactggtgttaggatgagataatgtttgtgaactgtaaacatatataaacgtgtgctactgtgagaactggaacaaagaagagagggagtgagagaaatcaagggagggctggggctgggaaagaacgaaaagggagtcgcgtatagaggagagcgcgacagtcgcgagccacactttgcaatgaaactctttagactttctgccgggagagcggcccagacgcgccaggtctgtagcaggaggccgcgcgagggcgggtccccagaagcctacagatcgagctgcggcagaacacgtctcagaaggccgccggtgacgtggatatcggcgatgccgcctactacttcgagagggacatcaagggcgagtctctattccagggccgcggcggcctggacttgcgcgtgcgcggagaacccctgcaggtggagcgcacgctcatctattacctggacgagattcccccgaagttctccatgaagcgcctcaccgccggcctcatcgccgtcatcgtggtggtcgtggtggccctcgtcgccggcatggccgtcctggtgatcaccaaccggagaaagtcggggaagtacaagaaggtggagatcaaggaactgggggagttgagaaaggaaccgagcttgtaggtacccggcggggcaggggatggggtggggtaccggatttcggtatcgtcccagacccaagtgagtcacgcttcctgattcctcggcgcaaaggagacgtttatcctttcaaattcctgccttccccctcccttttgcgcacacaccaggtttaatagatcctggcctcagggtctcctttctttctcacttctgtcttgaaggaagcatttctaaaatgtatcccctttcggtccaacaacaggaaacctgactggggcagtgaaggaagggatggcatagcgttatgtgtaaaaaacaagtatctgtatgacaacccgggatcgtttgcaagtaactgaatccattgcgacattgtgaaggcttaaatgagtttagatgggaaatagcgttgttatcgccttgggtttaaattatttgatgagttccacttgtatcatggcctacccgaggagaagaggagtttgttaactgggcctatgtagtagcctcatttaccatcgtttgtattactgaccacatatgcttgtcactgggaaagaagcctgtttcagctgcctgaacgcagtttggatgtctttgaggacagacattgcccggaaactcagtctatttattcttcagcttgcccttactgccactgatattggtaatgttcttttttgtaaaatgtttgtacatatgttgtctttgataatgttgctgtaattttttaaaataaaacacgaatttaataaaatatgggaaaggcacaaaccagaagtcggcatttgtgaaaagtccctccagatttctatcactttggtctctaatttcccaagacttgtattttttttttatttcaaattataacacttttttttcccccagaagtgggtgtttcatgttgctactctggtgtgtcccaagatatcctaactggccagtgtaaatgctattctttctaaataagattatttggaaacttccttcaaactgcaggagggcgagctctgagggcacgagaagctaaaactagctgcttttgatgaaaaagagtgccagtctttggtcatctctaaacaaggcttatcaccaatggagacagaaaactctagttcaagagctgtacctcctttgaatcccagccctactcgaaataagtggtactatttccatttagcctttgagcaaatcacttaactcaaaggcgttgtggctctaagattaaacgacttt

SEQ ID NO: 456058 - DNA, 2360 bp, Homo sapiens
  misc_feature (2328)..(2328): n is a, c, g, or t
cgggtctgatagtccctacctgtcaggactggtgttaggatgagataatgtttgtgaactgtaaacatatataaacgtgtgctactgtgagaactggaacaaagaagagagggagtgagagaaatcaagggagggctggggctgggaaagaacgaaaagggagtcgcgtatagaggagagcgcgacagtcgcgagccacactttgcaatgaaactctttagactttctgccgggagagcggcccagacgcgccaggtctgtagcaggaggccgcgcgagggcgggtccccagaagcctacaggtgagtatcggttctccccttcccggctttcggtccggaggaggcgggagcagcttccctgttctgatcctatcgcgggcggcgcagggccggcttggccttccgtgggacggggaggggggcgggatgtgtcacccaaataccagtggggacggtcggtggtggaaccagccgggcaggtcgggtagagtataagagccggagggagcggccgggcggcagacgcctgcagaccatcccagacgccggagcccgagccccgacgagtccccgcgcctcatccgcccgcgtccggtccgcgttcctccgccccaccatggctcggggccccggcctcgcgccgccaccgctgcggctgccgctgctgctgctggtgctggcggcggtgaccggccacacggccgcgcaggacaactgcacgtgtcccaccaacaagatgaccgtgtgcagccccgacggccccggcggccgctgccagtgccgcgcgctgggctcgggcatggcggtcgactgctccacgctgacctccaagtgtctgctgctcaaggcgcgcatgagcgcccccaagaacgcccgcacgctggtgcggccgagtgagcacgcgctcgtggacaacgatggcctctacgaccccgactgcgaccccgagggccgcttcaaggcgcgccagtgcaaccagacgtcggtgtgctggtgcgtgaactcggtgggcgtgcgccgcacggacaagggcgacctgagcctacgctgcgatgagctggtgcgcacccaccacatcctcattgacctgcgccaccgccccaccgccggcgccttcaaccactcagacctggacgccgagctgaggcggctcttccgcgagcgctatcggctgcaccccaagttcgtggcggccgtgcactacgagcagcccaccatccagatcgagctgcggcagaacacgtctcagaaggccgccggtgacgtggatatcggcgatgccgcctactacttcgagagggacatcaagggcgagtctctattccagggccgcggcggcctggacttgcgcgtgcgcggagaacccctgcaggtggagcgcacgctcatctattacctggacgagattcccccgaagttctccatgaagcgcctcaccgccggcctcatcgccgtcatcgtggtggtcgtggtggccctcgtcgccggcatggccgtcctggtgatcaccaaccggagaaagtcggggaagtacaagaaggtggagatcaaggaactgggggagttgagaaaggaaccgagcttgtaggtacccggcggggcaggggatggggtggggtaccggatttcggtatcgtcccagacccaagtgagtcacgcttcctgattcctcggcgcaaaggagacgtttatcctttcaaattcctgccttccccctcccttttgcgcacacaccaggtttaatagatcctggcctcagggtctcctttctttctcacttctgtcttgaaggaagcatttctaaaatgtatcccctttcggtccaacaacaggaaacctgactggggcagtgaaggaagggatggcatagcgttatgtgtaaaaaacaagtatctgtatgacaacccgggatcgtttgcaagtaactgaatccattgcgacattgtgaaggcttaaatgagtttagatgggaaatagcgttgttatcgccttgggtttaaattatttgatgagttccacttgtatcatggcctacccgaggagaagaggagtttgttaactgggcctatgtagtagcctcatttaccatcgtttgtattactgaccacatatgcttgtcactgggaaagaagcctgtttcagctgcctgaacgcagtttggatgtctttgaggacagacattgcccggaaactcagtctatttattcttcagcttgcccttactgccactgatattggtcagtaatacaaacgatggtaaatgaggctactacataggcccagttaacaaactcctcttctcctcgggtaggccatgatacaagtngaactcatcaaataatttaaacccagtcgagc

SEQ ID NO: 456059 - DNA, 841 bp, Homo sapiens
tactactactaaattcgcggccgcgtcgactttaaattatttgatgagttccacttgtatcatggcctacccgaggagaagaggagtttgttaactgggcctatgtagtagcctcatttaccatcgtttgtattactgaccacatatgcttgtcactgggaaagaagcctgtttcagctgcctgaacgcagtttggatgtctttgaggacagacattgcccggaaactcagtctatttattcttcagcttgcccttactgccactgatattggtaatgttcttttttgtaaaatgtttgtacatatgttgtctttgataatgttgctgtaattttttaaaataaaacacgaatttaataaaatatgggaaaggcacaaaccagaagtcggcatttgtgaaaagtccctccagatttctatcactttggtctctaatttcccaagacttgtattttttttttatttcaaattataacacttttttttcccccagaagtgggtgtttcatgttgctactctggtgtgtcccaagatatcctaactggccagtgtaaatgctattctttctaaataagattatttggaaacttccttcaaactgcaggagggcgagctctgagggcacgagaagctaaaactagctgcttttgatgaaaaagagtgccagtctttggtcatctctaaacaaggcttatcaccaatggagacagaaaactctagttcaagagctgtacctcctttgaatcccagccctactcgaaataagtggtactatttccatttagcctttgagcaaatcacttaactcaaaggcgttgtggctctaagattaaacgacttt

SEQ ID NO: 456060 - DNA, 2808 bp, Homo sapiens
cgggtctgatagtccctacctgtcaggactggtgttaggatgagataatgtttgtgaactgtaaacatatataaacgtgtgctactgtgagaactggaacaaagaagagagggagtgagagaaatcaagggagggctggggctgggaaagaacgaaaagggagtcgcgtatagaggagagcgcgacagtcgcgagccacactttgcaatgaaactctttagactttctgccgggagagcggcccagacgcgccaggtctgtagcaggaggccgcgcgagggcgggtccccagaagcctacaggtgagtatcggttctccccttcccggctttcggtccggaggaggcgggagcagcttccctgttctgatcctatcgcgggcggcgcagggccggcttggccttccgtgggacggggaggggggcgggatgtgtcacccaaataccagtggggacggtcggtggtggaaccagccgggcaggtcgggtagagtataagagccggagggagcggccgggcggcagacgcctgcagaccatcccagacgccggagcccgagccccgacgagtccccgcgcctcatccgcccgcgtccggtccgcgttcctccgccccaccatggctcggggccccggcctcgcgccgccaccgctgcggctgccgctgctgctgctggtgctggcggcggtgaccggccacacggccgcgcaggacaactgcacgtgtcccaccaacaagatgaccgtgtgcagccccgacggccccggcggccgctgccagtgccgcgcgctgggctcgggcatggcggtcgactgctccacgctgacctccaagtgtctgctgctcaaggcgcgcatgagcgcccccaagaacgcccgcacgctggtgcggccgagtgagcacgcgctcgtggacaacgatggcctctacgaccccgactgcgaccccgagggccgcttcaaggcgcgccagtgcaaccagacgtcggtgtgctggtgcgtgaactcggtgggcgtgcgccgcacggacaagggcgacctgagcctacgctgcgatgagctggtgcgcacccaccacatcctcattgacctgcgccaccgccccaccgccggcgccttcaaccactcagacctggacgccgagctgaggcggctcttccgcgagcgctatcggctgcaccccaagttcgtggcggccgtgcactacgagcagcccaccatccagatcgagctgcggcagaacacgtctcagaaggccgccggtgacgtggatatcggcgatgccgcctactacttcgagagggacatcaagggcgagtctctattccagggccgcggcggcctggacttgcgcgtgcgcggagaacccctgcaggtggagcgcacgctcatctattacctggacgagattcccccgaagttctccatgaagcgcctcaccgccggcctcatcgccgtcatcgtggtggtcgtggtggccctcgtcgccggcatggccgtcctggtgatcaccaaccggagaaagtcggggaagtacaagaaggtggagatcaaggaactgggggagttgagaaaggaaccgagcttgtaggtacccggcggggcaggggatggggtggggtaccggatttcggtatcgtcccagacccaagtgagtcacgcttcctgattcctcggcgcaaaggagacgtttatcctttcaaattcctgccttccccctcccttttgcgcacacaccaggtttaatagatcctggcctcagggtctcctttctttctcacttctgtcttgaaggaagcatttctaaaatgtatcccctttcggtccaacaacaggaaacctgactggggcagtgaaggaagggatggcatagcgttatgtgtaaaaaacaagtatctgtatgacaacccgggatcgtttgcaagtaactgaatccattgcgacattgtgaaggcttaaatgagtttagatgggaaatagcgttgttatcgccttgggtttaaattatttgatgagttccacttgtatcatggcctacccgaggagaagaggagtttgttaactgggcctatgtagtagcctcatttaccatcgtttgtattactgaccacatatgcttgtcactgggaaagaagcctgtttcagctgcctgaacgcagtttggatgtctttgaggacagacattgcccggaaactcagtctatttattcttcagcttgcccttactgccactgatattggtaatgttcttttttgtaaaatgtttgtacatatgttgtctttgataatgttgctgtaattttttaaaataaaacacgaatttaataaaatatgggaaaggcacaaaccagaagtcggcatttgtgaaaagtccctccagatttctatcactttggtctctaatttcccaagacttgtattttttttttatttcaaattataacacttttttttcccccagaagtgggtgtttcatgttgctactctggtgtgtcccaagatatcctaactggccagtgtaaatgctattctttctaaataagattatttggaaacttccttcaaactgcaggagggcgagctctgagggcacgagaagctaaaactagctgcttttgatgaaaaagagtgccagtctttggtcatctctaaacaaggcttatcaccaatggagacagaaaactctagttcaagagctgtacctcctttgaatcccagccctactcgaaataagtggtactatttccatttagcctttgagcaaatcacttaactcaaaggcgttgtggctctaagattaaacgacttt

SEQ ID NO: 456061 - DNA, 2467 bp, Homo sapiens
cgggtctgatagtccctacctgtcaggactggtgttaggatgagataatgtttgtgaactgtaaacatatataaacgtgtgctactgtgagaactggaacaaagaagagagggagtgagagaaatcaagggagggctggggctgggaaagaacgaaaagggagtcgcgtatagaggagagcgcgacagtcgcgagccacactttgcaatgaaactctttagactttctgccgggagagcggcccagacgcgccaggtctgtagcaggaggccgcgcgagggcgggtccccagaagcctacaggtgagtatcggttctccccttcccggctttcggtccggaggaggcgggagcagcttccctgttctgatcctatcgcgggcggcgcagggccggcttggccttccgtgggacggggaggggggcgggatgtgtcacccaaataccagtggggacggtcggtggtggaaccagccgggcaggtcgggtagagtataagagccggagggagcggccgggcggcagacgcctgcagaccatcccagacgccggagcccgagccccgacgagtccccgcgcctcatccgcccgcgtccggtccgcgttcctccgccccaccatggctcggggccccggcctcgcgccgccaccgctgcggctgccgctgctgctgctggtgctggcggcggtgaccggccacacggccgcgcaggacaactgcacgtgtcccaccaacaagatgaccgtgtgcagccccgacggccccggcggccgctgccagtgccgcgcgctgggctcgggcatggcggtcgactgctccacgctgacctccaagtgtctgctgctcaaggcgcgcatgagcgcccccaagaacgcccgcacgctggtgcggccgagtgagcacgcgctcgtggacaacgatggcctctacgaccccgactgcgaccccgagggccgcttcaaggcgcgccagtgcaaccagacgtcggtgtgctggtgcgtgaactcggtgggcgtgcgccgcacggacaagggcgacctgagcctacgctgcgatgagctggtgcgcacccaccacatcctcattgacctgcgccaccgccccaccgccggcgccttcaaccactcagacctggacgccgagctgaggcggctcttccgcgagcgctatcggctgcaccccaagttcgtggcggccgtgcactacgagcagcccaccatccagatcgagctgcggcagaacacgtctcagaaggccgccggtgacgtggatatcggcgatgccgcctactacttcgagagggacatcaagggcgagtctctattccagggccgcggcggcctggacttgcgcgtgcgcggagaacccctgcaggtggagcgcacgctcatctattacctggacgagattcccccgaagttctccatgaagcgcctcaccgccggcctcatcgccgtcatcgtggtggtcgtggtggccctcgtcgccggcatggccgtcctggtgatcaccaaccggagaaagtcggggaagtacaagaaggtggagatcaaggaactgggggagttgagaaaggaaccgagcttgtaggtacccggcggggcaggggatggggtggggtaccggatttcggtatcgtcccagacccaagtgagtcacgcttcctgattcctcggcgcaaaggagacgtttatcctttcaaattcctgccttccccctcccttttgcgcacacaccaggtttaatagatcctggcctcagggtctcctttctttctcacttctgtcttgaaggaagcatttctaaaatgtatcccctttcggtccaacaacaggaaacctgactggggcagtgaaggaagggatggcatagcgttatgtgtaaaaaacaagtatctgtatgacaacccgggatcgtttgcaagtaactgaatccattgcgacattgtgaaggcttaaatgagtttagatgggaaatagcgttgttatcgccttgggtttaaattatttgatgagttccacttgtatcatggcctacccgaggagaagaggagtttgttaactgggcctatgtagtagcctcatttaccatcgtttgtattactgaccacatatgcttgtcactgggaaagaagcctgtttcagctgcctgaacgcagtttggatgtctttgaggacagacattgcccggaaactcagtctatttattcttcagcttgcccttactgccactgatattggtaatgttcttttttgtaaaatgtttgtacatatgttgtctttgataatgttgctgtaatttttaattaaccgaattctaattggaagccaaaaaaaaaaaaaaaattgttggcccggcccgaaatttaaacaccttggcgccgcccgataaaggcatgtcagaccggcgaaggtgtgtcccaaaaccgggcggttgaacacgggtggttgttcagccaaacccccgg

SEQ ID NO: 456062 - DNA, 1106 bp, Homo sapiens
ctatacagatatctgctgtgtgctggaaaaattacctgtaattttgcattccaaaagtttaataatgactacatttatttcacaatttgagaatcagttatacacaagatatagttgtaagcacatactcctctaaatatgatttgtttgtacagtagaccaaataagtatgttcagcttagaatatgctccttatggtcatgtgtacaataaataaattatcttaaaacattatcaatattaaggttgatgttttcagaaacatgtaagaaagctagcttttaaaattgactagggaagttctctcaaactgccagtccatgagatattgtatattttctatctgaaaaacttttaatctcagaattctttaaaagagctctccctggggctcccattacttacttgtgactcccagtggaaatcgtacccagcccctcgagaggggctgaatctgttgggagtgggagggtagaaaaaatgctgcagcttcttgtgggtatccttcacacacaaacacccagtgccccaagcactgtgcagtcaaacatcaaccccactcagactttcctccttgggattgagaagcaatggattatagagaaagaaaggtggattagcactccaaaactttgaagagtaattgaccaagacccccaaagccaaagctgtgggcatccccacttccagtataccctgtaccaacacgtaatggctactagatacaggggcactagtacctacctgtctgcttggctacctgccctctttgcagaagtggtgaagggaatcactcaacctcagaaagggaaaatggctttctcattttcagattgaaagaggttggcagtgggtgaggagaataacaggtaaggatctcttttaatatacccatttgaagccaaaacctctgtttagacatacggtattttgaacctggtgattattcattgcccatgtttgtgaattatcagaaagcagaattcttgccaggcatagtggctcatgcctgtaatcccagcactttgggaagccaaggtgggaggatcacttgagcccaggagtttgagaccagcctgagcaacatggtgagatcctgtctctac

SEQ ID NO: 456063 - DNA, 3179 bp, Homo sapiens
cgcctcccgccccgcgtcgcgacgtagcacttccgtttttgctgggtaggcgacccggacggagggccggcgaggtgcggggtctggtgatgcgagctgcgcctctcggcaagatttcgcgctgcccatcccgggccctttcatcagtaatcggtagtggatcactctgccaagcggcaggaagaattaaggaaacgacaaggagacgctcggctctctcccgcttggctccttgcggcctcctcttcccttcgctccggcccggtgaaactgaacttataatcgtcactggattgtaagtacccgaggcgaagagagctcgctgagccctgattttttgagtgtctttgttccgggagagtttgtgagttgaaagtatctctgctgggctttctgggccgaaaaccgttccgggggagccgccatttgctttcctgttccctagctagctagctagctctctccgcgttgtccggcagcggcacctagaggttgggacttggcattgcatctgatttaatgaacttaagtctgtgaataagcctttgtgttaacgactggtattcggtcacagcatatttagagaaaagacttggagcttaaataaaaactaaggcaaaatagacgcttagctgctgatctacagagaacttcttgtaattaaaagatttcaattcatagcaaactggtgttttaaactattgcagtagctggaactttttagtgtaaccagcatttattggagaagtgaatcaccaaggaaattaaagatgagtaaaagcaaagatgatgctcctcacgaactggagagccagtttatcttacgtctgcctccagaatatgcctctactgtgagaagggcagtacagtctggtcatgtcaacctcaaggacagactgacaattgagttacatcctgatgggcgtcatggaatcgtcagagtggaccgtgttccattggcctcaaaattagtagacctgccctgtgttatggaaagcttgaaaaccattgataaaaaaactttttacaagacagctgatatctgtcagatgcttgtatccacagttgatggtgatctctatcctcctgtggaggagccagttgctagcactgatcctaaagcaagcaagaaaaaggataaggacaaagagaaaaagtttatctggaaccacggaattactctgcctctaaagaatgtcaggaagagaaggttccggaagacagcaaagaagaaatatattgaatctccagatgttgaaaaagaagtgaaacgattgctgagtacagatgctgaagctgttagtactcggtgggaaataattgccgaagatgaaacaaaggaggcagaaaatcaaggcctggatatctcttctccaggaatgtctggtcacaggcagggccatgactcattagaacatgatgagcttcgggagatattcaatgacctcagcagcagcagtgaggatgaagatgagacccagcatcaagatgaagaagatataaacatcattgacacggaggaagatctggagagacagctacaggacaagctaaatgaatcagatgaacagcaccaggaaaatgaaggaaccaatcagctggttatgggaattcagaagcagattgacaacatgaaaggcaagctccaagagacccaggacagggcaaaacgacaagaggatctcatcatgaaagtggaaaatctggctctcaagaacagatttcaggctgtactggatgagctcaaacaaaaggaagaccgagaaaaggagcaactcagctctttgcaagaggagctagaatcactcctagagaagtaaaaagaactgatatttaatttcagtcttcagactggtcagcattagaaaattcttggctttattgtactgggtattaagaccttgctcttcctagtccttttaatgctgtgtgttctgttaagttctttcatttgtttgtaattttgtttttcagcaaatttatattgttttgctaggtgttcatcctataagaagcaggattgtataggcagaaaaatgattgtaggaaagttgcaggattagcggaatgtatggttcaaccttaattatagcttcattgcaggactttactgtttctccattttctagaagctgctgttgctgctttgtgatgacgtgagatcaataagaagaacctagtctagagacaatgatgctagtttgcatatgttttcctatgcaatagttgttttcccagttattcaaagcagctttctatatgtagagatgcaaattattaagttgtttccaatacaataaataaaagcatctgtttttcactttaaaaaaaaaaaaaaaaaaaaaaaaaaaaaaaaaaaaaaaaaacaaaaaaaaaaaaaaaaaacaaaaaaaaaaaacaaaaacaaaacaagaggcggccgggcggcgacacagaataagtacccctcctagcgaggggcgagccacatcaagctaacgcagaccagaagagatattttgagaaagagagcaggccacacataatgaagcgatacatcatatcaagcacaaagacagccaggcaggacgagcgatcacaaaaacagcggacgtggacgtagaacacaaaacatccagcaacagacatccacattctagatggaacaaaaggacaccaaaacaagtgcgcgccggagaaggaacaaaaataagggagacaaagaccaaccacacaaagaccaggagactaaccacccaccgacgagagatagtaaacgccatacatagaaggtaggaatacgtagcagtcaaacaccaagcgcaataataccgcgacacgacaaaacaataacagtgcaaccaggacgtcttgactacaaaacacaataaaacacagggggcagggggatagaaataagtagcgaagaagaggaacgacaacaggagaacagagaagaagcagaaaaagaaacaggagaggacatgagaagagagagaagcagaaagaagaaggaaggaggcgcgaaaaccgcgagggacagggaacacaacgaaggagaaagaacaaaacggaagaaagaaggaggcggaagagacaaggccgagagacaagaaacagagagagacgaagacgagagaagagcaaggagaaaagacgaggaagagagagtagacggggcaaaaaaggaagaagaagag

SEQ ID NO: 456064 - DNA, 3130 bp, Homo sapiens
cgcctcccgccccgcgtcgcgacgtagcacttccgtttttgctgggtaggcgacccggacggagggccggcgaggtgcggggtctggtgatgcgagctgcgcctctcggcaagatttcgcgctgcccatcccgggccctttcatcagtaatcggtagtggatcactctgccaagcggcaggaagaattaaggaaacgacaaggagacgctcggctctctcccgcttggctccttgcggcctcctcttcccttcgctccggcccggtgaaactgaacttataatcgtcactggattgtaagtacccgaggcgaagagagctcgctgagccctgattttttgagtgtctttgttccgggagagtttgtgagttgaaagtatctctgctgggctttctgggccgaaaaccgttccgggggagccgccatttgctttcctgttccctagctagctagctagctctctccgcgttgtccggcagcggcacctagaggttgggacttggcattgcatctgatttaatgaacttaagtctgtgaataagcctttgtgttaacgactggtattcggtcacagcatatttagagaaaagacttggagcttaaataaaaactaaggcaaaatagacgcttagctgctgatctacagagaacttcttgtaattaaaagatttcaattcatagcaaactggtgttttaaactattgcagtagctggaactttttagtgtaaccagcatttattggagaagtgaatcaccaaggaaattaaagatgagtaaaagcaaagatgatgctcctcacgaactggagagccagtttatcttacgtctgcctccagaatatgcctctactgtgagaagggcagtacagtctggtcatgtcaacctcaaggacagactgacaattgagttacatcctgatgggcgtcatggaatcgtcagagtggaccgtgttccattggcctcaaaattagtagacctgccctgtgttatggaaagcttgaaaaccattgataaaaaaactttttacaagacagctgatatctgtcagatgcttgtatccacagttgatggtgatctctatcctcctgtggaggagccagttgctagcactgatcctaaagcaagcaagaaaaaggataaggacaaagagaaaaagtttatctggaaccacggaattactctgcctctaaagaatgtcaggaagagaaggttccggaagacagcaaagaagaaatatattgaatctccagatgttgaaaaagaagtgaaacgattgctgagtacagatgctgaagctgttagtactcggtgggaaataattgccgaagatgaaacaaaggaggcagaaaatcaaggcctggatatctcttctccaggaatgtctggtcacaggcagggccatgactcattagaacatgatgagcttcgggagatattcaatgacctcagcagcagcagtgaggatgaagatgagacccagcatcaagatgaagaagatataaacatcattgacacggaggaagatctggagagacagctacaggacaagctaaatgaatcagatgaacagcaccaggaaaaatgaaaggcaagctccaagagacccaggacagggcaaaacgacaagaggatctcatcatgaaagtggaaaatctggctctcaagaacagatttcaggctgtactggatgagctcaaacaaaaggaagaccgagaaaaggagcaactcagctctttgcaagaggagctagaatcactcctagagaagtaaaaagaactgatatttaatttcagtcttcagactggtcagcattagaaaattcttggctttattgtactgggtattaagaccttgctcttcctagtccttttaatgctgtgtgttctgttaagttctttcatttgtttgtaattttgtttttcagcaaatttatattgttttgctaggtgttcatcctataagaagcaggattgtataggcagaaaaatgattgtaggaaagttgcaggattagcggaatgtatggttcaaccttaattatagcttcattgcaggactttactgtttctccattttctagaagctgctgttgctgctttgtgatgacgtgagatcaataagaagaacctagtctagagacaatgatgctagtttgcatatgttttcctatgcaatagttgttttcccagttattcaaagcagctttctatatgtagagatgcaaattattaagttgtttccaatacaataaataaaagcatctgtttttcactttaaaaaaaaaaaaaaaaaaaaaaaaaaaaaaaaaaaaaaaaaacaaaaaaaaaaaaaaaaaacaaaaaaaaaaaacaaaaacaaaacaagaggcggccgggcggcgacacagaataagtacccctcctagcgaggggcgagccacatcaagctaacgcagaccagaagagatattttgagaaagagagcaggccacacataatgaagcgatacatcatatcaagcacaaagacagccaggcaggacgagcgatcacaaaaacagcggacgtggacgtagaacacaaaacatccagcaacagacatccacattctagatggaacaaaaggacaccaaaacaagtgcgcgccggagaaggaacaaaaataagggagacaaagaccaaccacacaaagaccaggagactaaccacccaccgacgagagatagtaaacgccatacatagaaggtaggaatacgtagcagtcaaacaccaagcgcaataataccgcgacacgacaaaacaataacagtgcaaccaggacgtcttgactacaaaacacaataaaacacagggggcagggggatagaaataagtagcgaagaagaggaacgacaacaggagaacagagaagaagcagaaaaagaaacaggagaggacatgagaagagagagaagcagaaagaagaaggaaggaggcgcgaaaaccgcgagggacagggaacacaacgaaggagaaagaacaaaacggaagaaagaaggaggcggaagagacaaggccgagagacaagaaacagagagagacgaagacgagagaagagcaaggagaaaagacgaggaagagagagtagacggggcaaaaaaggaagaagaagag

SEQ ID NO: 456065 - DNA, 3162 bp, Homo sapiens
tatttcattcacgggactgcgtttccttgctacgattcgcaggcccttggcctgtatcaattatacatggtgatgcgagctgcgcctctcggcaagatttcgcgctgcccatcccgggccctttcatcagtaatcggtagtggatcactctgccaagcggcaggaagaattaaggaaacgacaaggagacgctcggctctctcccgcttggctccttgcggcctcctcttcccttcgctccggcccggtgaaactgaacttataatcgtcactggattgtaagtacccgaggcgaagagagctcgctgagccctgattttttgagtgtctttgttccgggagagtttgtgagttgaaagtatctctgctgggctttctgggccgaaaaccgttccgggggagccgccatttgctttcctgttccctagctagctagctagctctctccgcgttgtccggcagcggcacctagaggttgggacttggcattgcatctgatttaatgaacttaagtctgtgaataagcctttgtgttaacgactggtattcggtcacagcatatttagagaaaagacttggagcttaaataaaaactaaggcaaaatagacgcttagctgctgatctacagagaacttcttgtaattaaaagatttcaattcatagcaaactggtgttttaaactattgcagtagctggaactttttagtgtaaccagcatttattggagaagtgaatcaccaaggaaattaaagatgagtaaaagcaaagatgatgctcctcacgaactggagagccagtttatcttacgtctgcctccagaatatgcctctactgtgagaagggcagtacagtctggtcatgtcaacctcaaggacagactgacaattgagttacatcctgatgggcgtcatggaatcgtcagagtggaccgtgttccattggcctcaaaattagtagacctgccctgtgttatggaaagcttgaaaaccattgataaaaaaactttttacaagacagctgatatctgtcagatgcttgtatccacagttgatggtgatctctatcctcctgtggaggagccagttgctagcactgatcctaaagcaagcaagaaaaaggataaggacaaagagaaaaagtttatctggaaccacggaattactctgcctctaaagaatgtcaggaagagaaggttccggaagacagcaaagaagaaatatattgaatctccagatgttgaaaaagaagtgaaacgattgctgagtacagatgctgaagctgttagtactcggtgggaaataattgccgaagatgaaacaaaggaggcagaaaatcaaggcctggatatctcttctccaggaatgtctggtcacaggcagggccatgactcattagaacatgatgagcttcgggagatattcaatgacctcagcagcagcagtgaggatgaagatgagacccagcatcaagatgaagaagatataaacatcattgacacggaggaagatctggagagacagctacaggacaagctaaatgaatcagatgaacagcaccaggaaaatgaaggaaccaatcagctggttatgggaattcagaagcagattgacaacatgaaaggcaagctccaagagacccaggacagggcaaaacgacaagaggatctcatcatgaaagtggaaaatctggctctcaagaacagatttcaggctgtactggatgagctcaaacaaaaggaagaccgagaaaaggagcaactcagctctttgcaagaggagctagaatcactcctagagaagtaaaaagaactgatatttaatttcagtcttcagactggtcagcattagaaaattcttggctttattgtactgggtattaagaccttgctcttcctagtccttttaatgctgtgtgttctgttaagttctttcatttgtttgtaattttgtttttcagcaaatttatattgttttgctaggtgttcatcctataagaagcaggattgtataggcagaaaaatgattgtaggaaagttgcaggattagcggaatgtatggttcaaccttaattatagcttcattgcaggactttactgtttctccattttctagaagctgctgttgctgctttgtgatgacgtgagatcaataagaagaacctagtctagagacaatgatgctagtttgcatatgttttcctatgcaatagttgttttcccagttattcaaagcagctttctatatgtagagatgcaaattattaagttgtttccaatacaataaataaaagcatctgtttttcactttaaaaaaaaaaaaaaaaaaaaaaaaaaaaaaaaaaaaaaaaaacaaaaaaaaaaaaaaaaaacaaaaaaaaaaaacaaaaacaaaacaagaggcggccgggcggcgacacagaataagtacccctcctagcgaggggcgagccacatcaagctaacgcagaccagaagagatattttgagaaagagagcaggccacacataatgaagcgatacatcatatcaagcacaaagacagccaggcaggacgagcgatcacaaaaacagcggacgtggacgtagaacacaaaacatccagcaacagacatccacattctagatggaacaaaaggacaccaaaacaagtgcgcgccggagaaggaacaaaaataagggagacaaagaccaaccacacaaagaccaggagactaaccacccaccgacgagagatagtaaacgccatacatagaaggtaggaatacgtagcagtcaaacaccaagcgcaataataccgcgacacgacaaaacaataacagtgcaaccaggacgtcttgactacaaaacacaataaaacacagggggcagggggatagaaataagtagcgaagaagaggaacgacaacaggagaacagagaagaagcagaaaaagaaacaggagaggacatgagaagagagagaagcagaaagaagaaggaaggaggcgcgaaaaccgcgagggacagggaacacaacgaaggagaaagaacaaaacggaagaaagaaggaggcggaagagacaaggccgagagacaagaaacagagagagacgaagacgagagaagagcaaggagaaaagacgaggaagagagagtagacggggcaaaaaaggaagaagaagag

SEQ ID NO: 456066 - DNA, 2639 bp, Homo sapiens
cgcctcccgccccgcgtcgcgacgtagcacttccgtttttgctgggtaggcgacccggacggagggccggcgaggtgcggggtctggtgatgcgagctgcgcctctcggcaagatttcgcgctgcccatcccgggccctttcatcagtaatcggtagtggatcactctgccaagcggcaggaagaattaaggaaacgacaaggagacgctcggctctctcccgcttggctccttgcggcctcctcttcccttcgctccggcccggtgaaactgaacttataatcgtcactggattgtaagtacccgaggcgaagagagctcgctgagccctgattttttgagtgtctttgttccgggagagtttgtgagttgaaagtatctctgctgggctttctgggccgaaaaccgttccgggggagccgccatttgctttcctgttccctagctagctagctagctctctccgcgttgtccggcagcggcacctagaggttgggacttggcattgcatctgatttaatgaacttaagtctgtgaataagcctttgtgttaacgactggtattcggtcacagcatatttagagaaaagacttggagcttaaataaaaactaaggcaaaatagacgcttagctgctgatctacagagaacttcttgtaattaaaagatttcaattcatagcaaactggtgttttaaactattgcagtagctggaactttttagtgtaaccagcatttattggagaagtgaatcaccaaggaaattaaagatgagtaaaagcaaagatgatgctcctcacgaactggagagccagtttatcttacgtctgcctccagaatatgcctctactgtgagaagggcagtacagtctggtcatgtcaacctcaaggacagactgacaattgagttacatcctgatgggcgtcatggaatcgtcagagtggaccgtgttccattggcctcaaaattagtagacctgccctgtgttatggaaagcttgaaaaccattgataaaaaaactttttacaagacagctgatatctgtcagatgcttgtatccacagttgatggtgatctctatcctcctgtggaggagccagttgctagcactgatcctaaagcaagcaagaaaaaggataaggacaaagagaaaaagtttatctggaaccacggaattactctgcctctaaagaatgtcaggaagagaaggttccggaagacagcaaagaagaaatatattgaatctccagatgttgaaaaagaagtgaaacgattgctgagtacagatgctgaagctgttagtactcggtgggaaataattgccgaagatgaaacaaaggaggcagaaaatcaaggcctggatatctcttctccaggaatgtctggtcacaggcagggccatgactcattagaacatgatgagcttcgggagatattcaatgacctcagcagcagcagtgaggatgaagatgagacccagcatcaagatgaaaaaatgattgtaggaaagttgcaggattagcggaatgtatggttcaaccttaattatagcttcattgcaggactttactgtttctccattttctagaagctgctgttgctgctttgtgatgacgtgagatcaataagaagaacctagtctagagacaatgatgctagtttgcatatgttttcctatgcaatagttgttttcccagttattcaaagcagctttctatatgtagagatgcaaattattaagttgtttccaatacaataaataaaagcatctgtttttcactttaaaaaaaaaaaaaaaaaaaaaaaaaaaaaaaaaaaaaaaaaacaaaaaaaaaaaaaaaaaacaaaaaaaaaaaacaaaaacaaaacaagaggcggccgggcggcgacacagaataagtacccctcctagcgaggggcgagccacatcaagctaacgcagaccagaagagatattttgagaaagagagcaggccacacataatgaagcgatacatcatatcaagcacaaagacagccaggcaggacgagcgatcacaaaaacagcggacgtggacgtagaacacaaaacatccagcaacagacatccacattctagatggaacaaaaggacaccaaaacaagtgcgcgccggagaaggaacaaaaataagggagacaaagaccaaccacacaaagaccaggagactaaccacccaccgacgagagatagtaaacgccatacatagaaggtaggaatacgtagcagtcaaacaccaagcgcaataataccgcgacacgacaaaacaataacagtgcaaccaggacgtcttgactacaaaacacaataaaacacagggggcagggggatagaaataagtagcgaagaagaggaacgacaacaggagaacagagaagaagcagaaaaagaaacaggagaggacatgagaagagagagaagcagaaagaagaaggaaggaggcgcgaaaaccgcgagggacagggaacacaacgaaggagaaagaacaaaacggaagaaagaaggaggcggaagagacaaggccgagagacaagaaacagagagagacgaagacgagagaagagcaaggagaaaagacgaggaagagagagtagacggggcaaaaaaggaagaagaagag

SEQ ID NO: 456067 - DNA, 2350 bp, Homo sapiens
cgcctcccgccccgcgtcgcgacgtagcacttccgtttttgctgggtaggcgacccggacggagggccggcgaggtgcggggtctggtgatgcgagctgcgcctctcggcaagatttcgcgctgcccatcccgggccctttcatcagtaatcggtagtggatcactctgccaagcggcaggaagaattaaggaaacgacaaggagacgctcggctctctcccgcttggctccttgcggcctcctcttcccttcgctccggcccggtgaaactgaacttataatcgtcactggattgtaagtacccgaggcgaagagagctcgctgagccctgattttttgagtgtctttgttccgggagagtttgtgagttgaaagtatctctgctgggctttctgggccgaaaaccgttccgggggagccgccatttgctttcctgttccctagctagctagctagctctctccgcgttgtccggcagcggcacctagaggttgggacttggcattgcatctgatttaatgaacttaagtctgtgaataagcctttgtgttaacgactggtattcggtcacagcatatttagagaaaagacttggagcttaaataaaaactaaggcaaaatagacgcttagctgctgatctacagagaacttcttgtaattaaaagatttcaattcatagcaaactggtgttttaaactattgcagtagctggaactttttagtgtaaccagcatttattggagaagtgaattgaaggaaccaatcagctggttatgggaattcagaagcagattgacaacatgaaaggcaagctccaagagacccaggacagggcaaaacgacaagaggatctcatcatgaaagtggaaaatctggctctcaagaacagatttcaggctgtactggatgagctcaaacaaaaggaagaccgagaaaaggagcaactcagctctttgcaagaggagctagaatcactcctagagaagtaaaaagaactgatatttaatttcagtcttcagactggtcagcattagaaaattcttggctttattgtactgggtattaagaccttgctcttcctagtccttttaatgctgtgtgttctgttaagttctttcatttgtttgtaattttgtttttcagcaaatttatattgttttgctaggtgttcatcctataagaagcaggattgtataggcagaaaaatgattgtaggaaagttgcaggattagcggaatgtatggttcaaccttaattatagcttcattgcaggactttactgtttctccattttctagaagctgctgttgctgctttgtgatgacgtgagatcaataagaagaacctagtctagagacaatgatgctagtttgcatatgttttcctatgcaatagttgttttcccagttattcaaagcagctttctatatgtagagatgcaaattattaagttgtttccaatacaataaataaaagcatctgtttttcactttaaaaaaaaaaaaaaaaaaaaaaaaaaaaaaaaaaaaaaaaaacaaaaaaaaaaaaaaaaaacaaaaaaaaaaaacaaaaacaaaacaagaggcggccgggcggcgacacagaataagtacccctcctagcgaggggcgagccacatcaagctaacgcagaccagaagagatattttgagaaagagagcaggccacacataatgaagcgatacatcatatcaagcacaaagacagccaggcaggacgagcgatcacaaaaacagcggacgtggacgtagaacacaaaacatccagcaacagacatccacattctagatggaacaaaaggacaccaaaacaagtgcgcgccggagaaggaacaaaaataagggagacaaagaccaaccacacaaagaccaggagactaaccacccaccgacgagagatagtaaacgccatacatagaaggtaggaatacgtagcagtcaaacaccaagcgcaataataccgcgacacgacaaaacaataacagtgcaaccaggacgtcttgactacaaaacacaataaaacacagggggcagggggatagaaataagtagcgaagaagaggaacgacaacaggagaacagagaagaagcagaaaaagaaacaggagaggacatgagaagagagagaagcagaaagaagaaggaaggaggcgcgaaaaccgcgagggacagggaacacaacgaaggagaaagaacaaaacggaagaaagaaggaggcggaagagacaaggccgagagacaagaaacagagagagacgaagacgagagaagagcaaggagaaaagacgaggaagagagagtagacggggcaaaaaaggaagaagaagag

SEQ ID NO: 456068 - DNA, 1852 bp, Homo sapiens
tatttcattcacgggactgcgtttccttgctacgattcgcaggcccttggcctgtatcaattatacatggtgatgcgagctgcgcctctcggcaagatttcgcgctgcccatcccgggccctttcatcagtaatcggtagtggatcactctgccaagcggcaggaagaagatataaacatcattgacacggaggaagatctggagagacagctacaggacaagctaaatgaatcagatgaacagcaccaggaaaatgaaggaaccaatcagctggttatgggaattcagaagcagattgacaacatgaaaggcaagctccaagagacccaggacagggcaaaacgacaagaggatctcatcatgaaagtggaaaatctggctctcaagaacagatttcaggctgtactggatgagctcaaacaaaaggaagaccgagaaaaggagcaactcagctctttgcaagaggagctagaatcactcctagagaagtaaaaagaactgatatttaatttcagtcttcagactggtcagcattagaaaattcttggctttattgtactgggtattaagaccttgctcttcctagtccttttaatgctgtgtgttctgttaagttctttcatttgtttgtaattttgtttttcagcaaatttatattgttttgctaggtgttcatcctataagaagcaggattgtataggcagaaaaatgattgtaggaaagttgcaggattagcggaatgtatggttcaaccttaattatagcttcattgcaggactttactgtttctccattttctagaagctgctgttgctgctttgtgatgacgtgagatcaataagaagaacctagtctagagacaatgatgctagtttgcatatgttttcctatgcaatagttgttttcccagttattcaaagcagctttctatatgtagagatgcaaattattaagttgtttccaatacaataaataaaagcatctgtttttcactttaaaaaaaaaaaaaaaaaaaaaaaaaaaaaaaaaaaaaaaaaacaaaaaaaaaaaaaaaaaacaaaaaaaaaaaacaaaaacaaaacaagaggcggccgggcggcgacacagaataagtacccctcctagcgaggggcgagccacatcaagctaacgcagaccagaagagatattttgagaaagagagcaggccacacataatgaagcgatacatcatatcaagcacaaagacagccaggcaggacgagcgatcacaaaaacagcggacgtggacgtagaacacaaaacatccagcaacagacatccacattctagatggaacaaaaggacaccaaaacaagtgcgcgccggagaaggaacaaaaataagggagacaaagaccaaccacacaaagaccaggagactaaccacccaccgacgagagatagtaaacgccatacatagaaggtaggaatacgtagcagtcaaacaccaagcgcaataataccgcgacacgacaaaacaataacagtgcaaccaggacgtcttgactacaaaacacaataaaacacagggggcagggggatagaaataagtagcgaagaagaggaacgacaacaggagaacagagaagaagcagaaaaagaaacaggagaggacatgagaagagagagaagcagaaagaagaaggaaggaggcgcgaaaaccgcgagggacagggaacacaacgaaggagaaagaacaaaacggaagaaagaaggaggcggaagagacaaggccgagagacaagaaacagagagagacgaagacgagagaagagcaaggagaaaagacgaggaagagagagtagacggggcaaaaaaggaagaagaagag

SEQ ID NO: 456069 - DNA, 1213 bp, Homo sapiens
cgcctcccgccccgcgtcgcgacgtagcacttccgtttttgctgggtaggcgacccggacggagggccggcgaggtgcggggtctggtgatgcgagctgcgcctctcggcaagatttcgcgctgcccatcccgggccctttcatcagtaatcggtagtggatcactctgccaagcggcaggaagaattaaggaaacgacaaggagacgctcggctctctcccgcttggctccttgcggcctcctcttcccttcgctccggcccggtgaaactgaacttataatcgtcactggattatggagtctcgcactgtcgtccaggctggaatgcaatggcacgatctcagctcactgcaacctccgcctcctgaattcaaccaattcttctgcctcagcctcctgagtaactgggattacaggccctcgattgattaaatggtgcccagccacgctggatgaggcctgatcttccttactcaacctacggattccaatgtcaatctgttctggactaccctcacagatatatccaaaattaatgctttaccaggtacctgagtatccttaacccagtcaaattgacccataaagttaaccatcacacagtgatttttcatattgtttacaattatagaggctgtcttcggtgtttgttctcacatttctattgaaagaagagggcaaactgtatacttgcccatctttcttacatgcataaagttcctttttggtttattttcatttgaacaggaagttttgaggaataaatgaaggcttttcttcattctctatattgataaatcctctctccaacgttagttcttacatgtacagcaagagatctggaagaaatcaagcctatctcacattcttttatatccatagggtaaattacaatatgagttatcacatatgccctaaaggattaggggcaactcaaggtttttctacatttttatgttaataagatttctcttcagtgagagttttcacatgttttctaaaagattaaagaaaattgaaagctttttcacatttcttatactcataaggcttatctccactgtctactgtgagttcatttttttttttttttttttttgtgagacggagtctcgctctgtcacccaggctggagtgcagtggcatgatcctggctcactacaacctctacctcctgggttcaagcaattctcctgtctcagcctcctgagt

SEQ ID NO: 456070 - DNA, 1267 bp, Homo sapiens
cgcctcccgccccgcgtcgcgacgtagcacttccgtttttgctgggtaggcgacccggacggagggccggcgaggtgcggggtctggtgatgcgagctgcgcctctcggcaagatttcgcgctgcccatcccgggccctttcatcagtaatcggtagtggatcactctgccaagcggcaggaagaattaaggaaacgacaaggagacgctcggctctctcccgcttggctccttgcggcctcctcttcccttcgctccggcccggtgaaactgaacttataatcgtcactggattatggagtctcgcactgtcgtccaggctggaatgcaatggcacgatctcagctcactgcaacctccgcctcctgaattcaaccaattcttctgcctcagcctcctgagtaactgggattacaggccctcgattgattaaatggtgcccagccacgctggatgaggcctgatcttccttactcaacctacggattccaatgtcaatctgttctggactaccctcacagatatatccaaaattaatgctttaccaggtacctgagtatccttaacccagtcaaattgacccataaagttaaccatcacacagtgtttctccaatgtgtattatcacatgagtggtaaaatatgaagaataaatgaaggatttttcatattgtttacaattatagaggctgtcttcggtgtttgttctcacatttctattgaaagaagagggcaaactgtatacttgcccatctttcttacatgcataaagttcctttttggtttattttcatttgaacaggaagttttgaggaataaatgaaggcttttcttcattctctatattgataaatcctctctccaacgttagttcttacatgtacagcaagagatctggaagaaatcaagcctatctcacattcttttatatccatagggtaaattacaatatgagttatcacatatgccctaaaggattaggggcaactcaaggtttttctacatttttatgttaataagatttctcttcagtgagagttttcacatgttttctaaaagattaaagaaaattgaaagctttttcacatttcttatactcataaggcttatctccactgtctactgtgagttcatttttttttttttttttttttgtgagacggagtctcgctctgtcacccaggctggagtgcagtggcatgatcctggctcactacaacctctacctcctgggttcaagcaattctcctgtctcagcctcctgagt

SEQ ID NO: 456071 - DNA, 2372 bp, Homo sapiens
cgcctcccgccccgcgtcgcgacgtagcacttccgtttttgctgggtaggcgacccggacggagggccggcgaggtgcggggtctggtgatgcgagctgcgcctctcggcaagatttcgcgctgcccatcccgggccctttcatcagtaatcggtagtggatcactctgccaagcggcaggaagaattaaggaaacgacaaggagacgctcggctctctcccgcttggctccttgcggcctcctcttcccttcgctccggcccggtgaaactgaacttataatcgtcactggattgtaagtacccgaggcgaagagagctcgctgagccctgattttttgagtgtctttgttccgggagagtttgtgagttgaaagtatctctgctgggctttctgggccgaaaaccgttccgggggagccgccatttgctttcctgttccctagctagctagctagctctctccgcgttgtccggcagcggcacctagaggttgggacttggcattgcatctgatttaatgaacttaagtctgtgaataagcctttgtgttaacgactggtattcggtcacagcatatttagagaaaagacttggagcttaaataaaaactaaggcaaaatagacgcttagctgctgatctacagagaacttcttgtaattaaaagatttcaattcatagcaaactggtgttttaaactattgcagtagctggaactttttagtgtaaccagcatttattggagaagtgaatcaccaaggaaattaaagatgagtaaaagcaaagatgatgctcctcacgaactggagagccagtttatcttacgtctgcctccagaatatgcctctactgtgagaagggcagtacagtctggtcatgtcaacctcaaggacagactgacaattgagttacatcctgatgggcgtcatggaatcgtcagagtggaccgtgttccattggcctcaaaattagtagacctgccctgtgttatggaaagcttgaaaaccattgataaaaaaactttttacaagacagctgatatctgtcagatgcttgtatccacagttgatggtgatctctatcctcctgtggaggagccagttgctagcactgatcctaaagcaagcaagaaaaaggataaggacaaagagaaaaagtttatctggaaccacggaattactctgcctctaaagaatgtcaggaagagaaggttccggaagacagcaaagaagaaatatattgaatctccagatgttgaaaaagaagtgaaacgattgctgagtacagatgctgaagctgttagtactcggtgggaaataattgccgaagatgaaacaaaggaggcagaaaatcaaggcctggatatctcttctccaggaatgtctggtcacaggcagggccatgactcattagaacatgatgagcttcgggagatattcaatgacctcagcagcagcagtgaggatgaagatgagacccagcatcaagatgaagaagatataaacatcattgacacggaggaagatctggagagacagctacaggacaagctaaatgaatcagatgaacagcaccaggaaaatgaaggaaccaatcagctggttatgggaattcagaagcagattgacaacatgaaaggcaagctccaagagacccaggacagggcaaaacgacaagaggatctcatcatgaaagtggaaaatctggctctcaagaacagatttcaggctgtactggatgagctcaaacaaaaggaagaccgagaaaaggagcaactcagctctttgcaagaggagctagaatcactcctagagaagtaaaaagaactgatatttaatttcagtcttcagactggtcagcattagaaaattcttggctttattgtactgggtattaagaccttgctcttcctagtccttttaatgctgtgtgttctgttaagttctttcatttgtttgtaattttgtttttcagcaaatttatattgttttgctaggtgttcatcctataagaagcaggattgtataggcagaaaaatgattgtaggaaagttgcaggattagcggaatgtatggttcaaccttaattatagcttcattgcaggactttactgtttctccattttctagaagctgctgttgctgctttgtgatgacgtgagatcaataagaagaacctagtctagagacaatgatgctagtttgcatatgttttcctatgcaatagttgttttcccagttattcaaagcagctttttttaaagtgaaaaacagatgcttttatttattgtattggaaacaacttaataatttgcatctctacatatagaaagctgctttgaataactgggaaaacaactattgcataggtcg

SEQ ID NO: 456072 - DNA, 2480 bp, Homo sapiens
  misc_feature (38)..(38): n is a, c, g, or t
ttttttgagagggagtctcactctgtcatccaggctgnagtaaagtggtgtgatcaaggctcactgcagcctcaacctcctgggctcaagtgattctatctcagcctcccgagtagctgggattataggcacctaccaccgggcctggttaatatttgtatttttagtagaggtaaagtttcgccgtgttggccaggctggtctcggagttacatcctgatgggcgtcatggaatcgtcagagtggaccgtgttccattggcctcaaaattagtagacctgccctgtgttatggaaagcttgaaaaccattgataaaaaaactttttacaagacagctgatatctgtcagatgcttgtatccacagttgatggtgatctctatcctcctgtggaggagccagttgctagcactgatcctaaagcaagcaagaaaaaggataaggacaaagagaaaaagtttatctggaaccacggaattactctgcctctaaagaatgtcaggaagagaaggttccggaagacagcaaagaagaaatatattgaatctccagatgttgaaaaagaagtgaaacgattgctgagtacagatgctgaagctgttagtactcggtgggaaataattgccgaagatgaaacaaaggaggcagaaaatcaaggcctggatatctcttctccaggaatgtctggtcacaggcagggccatgactcattagaacatgatgagcttcgggagatattcaatgacctcagcagcagcagtgaggatgaagatgagacccagcatcaagatgaagaagatataaacatcattgacacggaggaagatctggagagacagctacaggacaagctaaatgaatcagatgaacagcaccaggaaaatgaaggaaccaatcagctggttatgggaattcagaagcagattgacaacatgaaaggcaagctccaagagacccaggacagggcaaaacgacaagaggatctcatcatgaaagtggaaaatctggctctcaagaacagatttcaggctgtactggatgagctcaaacaaaaggaagaccgagaaaaggagcaactcagctctttgcaagaggagctagaatcactcctagagaagtaaaaagaactgatatttaatttcagtcttcagactggtcagcattagaaaattcttggctttattgtactgggtattaagaccttgctcttcctagtccttttaatgctgtgtgttctgttaagttctttcatttgtttgtaattttgtttttcagcaaatttatattgttttgctaggtgttcatcctataagaagcaggattgtataggcagaaaaatgattgtaggaaagttgcaggattagcggaatgtatggttcaaccttaattatagcttcattgcaggactttactgtttctccattttctagaagctgctgttgctgctttgtgatgacgtgagatcaataagaagaacctagtctagagacaatgatgctagtttgcatatgttttcctatgcaatagttgttttcccagttattcaaagcagctttctatatgtagagatgcaaattattaagttgtttccaatacaataaataaaagcatctgtttttcactttaaaaaaaaaaaaaaaaaaaaaaaaaaaaaaaaaaaaaaaaaacaaaaaaaaaaaaaaaaaacaaaaaaaaaaaacaaaaacaaaacaagaggcggccgggcggcgacacagaataagtacccctcctagcgaggggcgagccacatcaagctaacgcagaccagaagagatattttgagaaagagagcaggccacacataatgaagcgatacatcatatcaagcacaaagacagccaggcaggacgagcgatcacaaaaacagcggacgtggacgtagaacacaaaacatccagcaacagacatccacattctagatggaacaaaaggacaccaaaacaagtgcgcgccggagaaggaacaaaaataagggagacaaagaccaaccacacaaagaccaggagactaaccacccaccgacgagagatagtaaacgccatacatagaaggtaggaatacgtagcagtcaaacaccaagcgcaataataccgcgacacgacaaaacaataacagtgcaaccaggacgtcttgactacaaaacacaataaaacacagggggcagggggatagaaataagtagcgaagaagaggaacgacaacaggagaacagagaagaagcagaaaaagaaacaggagaggacatgagaagagagagaagcagaaagaagaaggaaggaggcgcgaaaaccgcgagggacagggaacacaacgaaggagaaagaacaaaacggaagaaagaaggaggcggaagagacaaggccgagagacaagaaacagagagagacgaagacgagagaagagcaaggagaaaagacgaggaagagagagtagacggggcaaaaaaggaagaagaagag

SEQ ID NO: 456073 - DNA, 2128 bp, Homo sapiens
cttgctttaggatcagtgctagcaacgggcgcctccacaggaggatagagatcaccatcaactgtggatacaagcatctgacagataccagctgtcttgtaaaaagtttatctggaaccacggaattactctgcctctaaagaatgtcaggaagagaaggttccggaagacagcaaagaagaaatatattgaatctccagatgttgaaaaagaagtgaaacgattgctgagtacagatgctgaagctgttagtactcggtgggaaataattgccgaagatgaaacaaaggaggcagaaaatcaaggcctggatatctcttctccaggaatgtctggtcacaggcagggccatgactcattagaacatgatgagcttcgggagatattcaatgacctcagcagcagcagtgaggatgaagatgagacccagcatcaagatgaagaagatataaacatcattgacacggaggaagatctggagagacagctacaggacaagctaaatgaatcagatgaacagcaccaggaaaatgaaggaaccaatcagctggttatgggaattcagaagcagattgacaacatgaaaggcaagctccaagagacccaggacagggcaaaacgacaagaggatctcatcatgaaagtggaaaatctggctctcaagaacagatttcaggctgtactggatgagctcaaacaaaaggaagaccgagaaaaggagcaactcagctctttgcaagaggagctagaatcactcctagagaagtaaaaagaactgatatttaatttcagtcttcagactggtcagcattagaaaattcttggctttattgtactgggtattaagaccttgctcttcctagtccttttaatgctgtgtgttctgttaagttctttcatttgtttgtaattttgtttttcagcaaatttatattgttttgctaggtgttcatcctataagaagcaggattgtataggcagaaaaatgattgtaggaaagttgcaggattagcggaatgtatggttcaaccttaattatagcttcattgcaggactttactgtttctccattttctagaagctgctgttgctgctttgtgatgacgtgagatcaataagaagaacctagtctagagacaatgatgctagtttgcatatgttttcctatgcaatagttgttttcccagttattcaaagcagctttctatatgtagagatgcaaattattaagttgtttccaatacaataaataaaagcatctgtttttcactttaaaaaaaaaaaaaaaaaaaaaaaaaaaaaaaaaaaaaaaaaacaaaaaaaaaaaaaaaaaacaaaaaaaaaaaacaaaaacaaaacaagaggcggccgggcggcgacacagaataagtacccctcctagcgaggggcgagccacatcaagctaacgcagaccagaagagatattttgagaaagagagcaggccacacataatgaagcgatacatcatatcaagcacaaagacagccaggcaggacgagcgatcacaaaaacagcggacgtggacgtagaacacaaaacatccagcaacagacatccacattctagatggaacaaaaggacaccaaaacaagtgcgcgccggagaaggaacaaaaataagggagacaaagaccaaccacacaaagaccaggagactaaccacccaccgacgagagatagtaaacgccatacatagaaggtaggaatacgtagcagtcaaacaccaagcgcaataataccgcgacacgacaaaacaataacagtgcaaccaggacgtcttgactacaaaacacaataaaacacagggggcagggggatagaaataagtagcgaagaagaggaacgacaacaggagaacagagaagaagcagaaaaagaaacaggagaggacatgagaagagagagaagcagaaagaagaaggaaggaggcgcgaaaaccgcgagggacagggaacacaacgaaggagaaagaacaaaacggaagaaagaaggaggcggaagagacaaggccgagagacaagaaacagagagagacgaagacgagagaagagcaaggagaaaagacgaggaagagagagtagacggggcaaaaaaggaagaagaagag

SEQ ID NO: 456074 - DNA, 1111 bp, Homo sapiens
attcgcggccgcgtcgaccagcagcttctagaaaatggagaaacagtaaagtcctgcaatgaagctgctgttgctgctttgtgatgacgtgagatcaataagaagaacctagtctagagacaatgatgctagtttgcatatgttttcctatgcaatagttgttttcccagttattcaaagcagctttctatatgtagagatgcaaattattaagttgtttccaatacaataaataaaagcatctgtttttcactttaaaaaaaaaaaaaaaaaaaaaaaaaaaaaaaaaaaaaaaaaacaaaaaaaaaaaaaaaaaacaaaaaaaaaaaacaaaaacaaaacaagaggcggccgggcggcgacacagaataagtacccctcctagcgaggggcgagccacatcaagctaacgcagaccagaagagatattttgagaaagagagcaggccacacataatgaagcgatacatcatatcaagcacaaagacagccaggcaggacgagcgatcacaaaaacagcggacgtggacgtagaacacaaaacatccagcaacagacatccacattctagatggaacaaaaggacaccaaaacaagtgcgcgccggagaaggaacaaaaataagggagacaaagaccaaccacacaaagaccaggagactaaccacccaccgacgagagatagtaaacgccatacatagaaggtaggaatacgtagcagtcaaacaccaagcgcaataataccgcgacacgacaaaacaataacagtgcaaccaggacgtcttgactacaaaacacaataaaacacagggggcagggggatagaaataagtagcgaagaagaggaacgacaacaggagaacagagaagaagcagaaaaagaaacaggagaggacatgagaagagagagaagcagaaagaagaaggaaggaggcgcgaaaaccgcgagggacagggaacacaacgaaggagaaagaacaaaacggaagaaagaaggaggcggaagagacaaggccgagagacaagaaacagagagagacgaagacgagagaagagcaaggagaaaagacgaggaagagagagtagacggggcaaaaaaggaagaagaagag

SEQ ID NO: 456075 - DNA, 3560 bp, Homo sapiens
agcggagtgaggtagccgccgccgccgccgccgccgcgtcccctcgccggctcgctggtaccggcagtgccatggcggccttcagcaagtacttgacggcgcgaaactcctcgctggctggtgccgcgttcctgctgctctgcctgctccacaagcggcgccgcgccctcggcctgcacggaaagaggggaaaaaggagcgagctgtggtggacaaggtgtttttctcaaggctcatacagattctgaaaatcatggtccctagaacattttgtaaagagacaggttacttggtacttattgctgttatgctggtgtctcgaacatattgtgatgtttggatgattcaaaatgggacactaattgaaagtggtatcattggtcgtagcaggaaagatttcaagagatacttactcaacttcatcgctgccatgcctcttatctctctggttaataacttcttgaagtatgggttaaatgagcttaaactgtgcttccgagtaaggctcactaaatacctctatgaggagtatcttcaagctttcacatattataaaatggggaatctggacaacagaatagctaatccagaccagctgcttacacaagatgtagaaaaattttgtaacagtgtagtcgatctgtattcaaatcttagtaagccatttttagacatagttttgtatatctttaagttaacgagtgcaattggagctcagggcccagcgagcatgatggcctacttggttgtttctgggctattcctaactcgacttcgaagacccattggtaagatgacaataactgagcaaaagtatgaaggagaatatagatatgttaattctcggctcatcacaaacagtgaagaaattgccttttacaatgggaataaaagagaaaagcagacagtccactcagtcttccgaaaactggtggaacacctacataatttcattttgtttcggttttcaatgggcttcattgatagtattattgccaaataccttgccactgttgttggttacctagttgtcagtcgccctttcttagatttgtctcatcctcgacatctcaagagtacacattcggaacttctagaggattactaccaaagtggaagaatgcttttgcgaatgtctcaagctctgggtcgaatagttttggctgggcgtgaaatgactagattggccggttttactgctcggattacagaattaatgcaagtactgaaggatttaaatcatggcaaatatgagcgcacaatggtctcacaacaggaaaagggtattgaaggagtacaagtcattcccttgatacctggtgctggagaaatcattattgcagataacattataaagtttgatcatgttcctttagcaacgccaaatggagatgttttgatccgagaccttaattttgaagttcgatctggggctaatgttctaatttgtggtccaaatggctgcggaaagagttcacttttccgtgttcttggtgaattatggcctctttttggaggacgtctaactaaacctgaaagaggaaaattattttatgttcctcagagaccttacatgacccttggaacacttcgagatcaagtgatatatccagatggacgagaagatcagaaaaggaagggaatttctgacctagtactgaaggaatacttagacaatgtccagttgggtcatatccttgaacgtgaaggaggctgggacagtgttcaggattggatggacgtactcagtggtggagaaaagcaaagaatggcgatggcaagattattttatcataaaccccagtttgccattttggatgaatgcacaagtgcagttagtgtcgacgtggaaggctacatttatagtcattgtcgaaaggttggcatcactctcttcactgtgtctcataggaaatctctttggaaacatcatgagtactacctgcatatggatggcagaggcaactatgaattcaaacagataacagaagatacagttgagtttggctcttagagaaatctggagaactatacctgcttcagtgaaataattacagaatatacttagaaaggcaaagtacattgtaaaataaagttgagcttagttttttttaaaaaaaaaaacaaagcaacaaattaactagatacagaataatggagaacaagttgttaaaacatttaatattatataggatattgctaattgtgtatatgttggtttaattaataatatgtactaagaatgtccttattcttgtggttaaaaacctgcctaaattaaattgggcttcaatcactgtaacctgattcatcctgggatgtaaaccattcgaagtcagctaattggacttttatggctctatcttttccttcagtgaagaaccctatttaaaactgggtcatcatttgtcctgttctagcaagatagtcttcagtttcattttcctgtgccctgtggtagttggaaacaaatcataatgtattatttaaatgtttaacatcattgcataacagcgtttattatacagtggcagatttctttagctgccacagtaatactcattccttgtgtgtgtcttggagtgcatttgactccaggaaaagccattttggttttccttaactaaatgataaatgtacccctctcagtctgcagtattgagttgtttaaagtatatgtgcagtcttgcttacaaggaggggttaccatgtatcacacctaatcttcccaatgtttgggatattaaaacacaaagtccttaacatgccaggctcaaggtcttataagagttctagatttttaagagaattagacaaatttgtgtgtgttagaagcccattcattagaagtgtggtggttatttggtattaaactccaaatgagccataggaaggcactacatgaaataatgcactgagtatgcaatgctatcactgtctttgactgtgattttatgtttaaaaagtatgttctaaaattattatatatacatgggtgaattatgtttccgaggcactgttttatctctgtgaatcttgaataacttttttatatttgggttatgatgtcaaacgatcctaagcgaagatgatttcagttcatcaaatcatcattaatgactttatgtattatttgcacagggagaattgaaactgagtataatcaataagctagatacgaaatcagtttctcaaactgagcttcagaaaggggcattttgtactcttgtttttgcataactggttttgtttttttgcagaattaactataacaatcactggctaccgaagtaaactgatgtactgaattccataatacataacattcaatttttaccacttctgtttagcgaacttgtatacttattttctgttcagattaaaaaaaaaaaaaaaaactcagatatcctatacaacctttgcttgttctttttattctggtatctaaatactgagaagttcatttataattcagccttgacttgaaaacatagatagtttaatcttgacttgaaaaacacaaaaataaattcagaaaatgcttttaaaaaaaagtctct

SEQ ID NO: 456076 - DNA, 3605 bp, Homo sapiens
agcgggggcgaaccggcgcccagccagcactcaggcagcggcctccagttgggggtgggagggggacgcggtgtgtcccccacccccttccctacatcacccccttctgtgtcaactttctgggtgaggaataagtaaaaatggtatctaattatgagagtccttaagttcgaattaaccatgtggaagtaagaaaagtggaaaaccaccattacagaacaatgagaaagaggggaaaaaggagcgagctgtggtggacaaggtgtttttctcaaggctcatacagattctgaaaatcatggtccctagaacattttgtaaagagacaggttacttggtacttattgctgttatgctggtgtctcgaacatattgtgatgtttggatgattcaaaatgggacactaattgaaagtggtatcattggtcgtagcaggaaagatttcaagagatacttactcaacttcatcgctgccatgcctcttatctctctggttaataacttcttgaagtatgggttaaatgagcttaaactgtgcttccgagtaaggctcactaaatacctctatgaggagtatcttcaagctttcacatattataaaatggggaatctggacaacagaatagctaatccagaccagctgcttacacaagatgtagaaaaattttgtaacagtgtagtcgatctgtattcaaatcttagtaagccatttttagacatagttttgtatatctttaagttaacgagtgcaattggagctcagggcccagcgagcatgatggcctacttggttgtttctgggctattcctaactcgacttcgaagacccattggtaagatgacaataactgagcaaaagtatgaaggagaatatagatatgttaattctcggctcatcacaaacagtgaagaaattgccttttacaatgggaataaaagagaaaagcagacagtccactcagtcttccgaaaactggtggaacacctacataatttcattttgtttcggttttcaatgggcttcattgatagtattattgccaaataccttgccactgttgttggttacctagttgtcagtcgccctttcttagatttgtctcatcctcgacatctcaagagtacacattcggaacttctagaggattactaccaaagtggaagaatgcttttgcgaatgtctcaagctctgggtcgaatagttttggctgggcgtgaaatgactagattggccggttttactgctcggattacagaattaatgcaagtactgaaggatttaaatcatggcaaatatgagcgcacaatggtctcacaacaggaaaagggtattgaaggagtacaagtcattcccttgatacctggtgctggagaaatcattattgcagataacattataaagtttgatcatgttcctttagcaacgccaaatggagatgttttgatccgagaccttaattttgaagttcgatctggggctaatgttctaatttgtggtccaaatggctgcggaaagagttcacttttccgtgttcttggtgaattatggcctctttttggaggacgtctaactaaacctgaaagaggaaaattattttatgttcctcagagaccttacatgacccttggaacacttcgagatcaagtgatatatccagatggacgagaagatcagaaaaggaagggaatttctgacctagtactgaaggaatacttagacaatgtccagttgggtcatatccttgaacgtgaaggaggctgggacagtgttcaggattggatggacgtactcagtggtggagaaaagcaaagaatggcgatggcaagattattttatcataaaccccagtttgccattttggatgaatgcacaagtgcagttagtgtcgacgtggaaggctacatttatagtcattgtcgaaaggttggcatcactctcttcactgtgtctcataggaaatctctttggaaacatcatgagtactacctgcatatggatggcagaggcaactatgaattcaaacagataacagaagatacagttgagtttggctcttagagaaatctggagaactatacctgcttcagtgaaataattacagaatatacttagaaaggcaaagtacattgtaaaataaagttgagcttagttttttttaaaaaaaaaaacaaagcaacaaattaactagatacagaataatggagaacaagttgttaaaacatttaatattatataggatattgctaattgtgtatatgttggtttaattaataatatgtactaagaatgtccttattcttgtggttaaaaacctgcctaaattaaattgggcttcaatcactgtaacctgattcatcctgggatgtaaaccattcgaagtcagctaattggacttttatggctctatcttttccttcagtgaagaaccctatttaaaactgggtcatcatttgtcctgttctagcaagatagtcttcagtttcattttcctgtgccctgtggtagttggaaacaaatcataatgtattatttaaatgtttaacatcattgcataacagcgtttattatacagtggcagatttctttagctgccacagtaatactcattccttgtgtgtgtcttggagtgcatttgactccaggaaaagccattttggttttccttaactaaatgataaatgtacccctctcagtctgcagtattgagttgtttaaagtatatgtgcagtcttgcttacaaggaggggttaccatgtatcacacctaatcttcccaatgtttgggatattaaaacacaaagtccttaacatgccaggctcaaggtcttataagagttctagatttttaagagaattagacaaatttgtgtgtgttagaagcccattcattagaagtgtggtggttatttggtattaaactccaaatgagccataggaaggcactacatgaaataatgcactgagtatgcaatgctatcactgtctttgactgtgattttatgtttaaaaagtatgttctaaaattattatatatacatgggtgaattatgtttccgaggcactgttttatctctgtgaatcttgaataacttttttatatttgggttatgatgtcaaacgatcctaagcgaagatgatttcagttcatcaaatcatcattaatgactttatgtattatttgcacagggagaattgaaactgagtataatcaataagctagatacgaaatcagtttctcaaactgagcttcagaaaggggcattttgtactcttgtttttgcataactggttttgtttttttgcagaattaactataacaatcactggctaccgaagtaaactgatgtactgaattccataatacataacattcaatttttaccacttctgtttagcgaacttgtatacttattttctgttcagattaaaaaaaaaaaaaaaaactcagatatcctatacaacctttgcttgttctttttattctggtatctaaatactgagaagttcatttataattcagccttgacttgaaaacatagatagtttaatcttgacttgaaaaacacaaaaataaattcagaaaatgcttttaaaaaaaagtctct

SEQ ID NO: 456077 - DNA, 3084 bp, Homo sapiens
tgagcaaaatgtaggagagctgagggataagctacagtggtaagaggaaaagcccatgagtagtaaaagtgtagaggctactgtgtactttttcagaaaaaaaacaaagggaaaaaattacccagtagggcaatttctttcagtcattgaggttaattataaaaattgtacatgtttgtatctaagtgaatttattattatatcccagaactttgtgtatctttctctcccaataataatagggcccagcgagcatgatggcctacttggttgtttctgggctattcctaactcgacttcgaagacccattggtaagatgacaataactgagcaaaagtatgaaggagaatatagatatgttaattctcggctcatcacaaacagtgaagaaattgccttttacaatgggaataaaagagaaaagcagacagtccactcagtcttccgaaaactggtggaacacctacataatttcattttgtttcggttttcaatgggcttcattgatagtattattgccaaataccttgccactgttgttggttacctagttgtcagtcgccctttcttagatttgtctcatcctcgacatctcaagagtacacattcggaacttctagaggattactaccaaagtggaagaatgcttttgcgaatgtctcaagctctgggtcgaatagttttggctgggcgtgaaatgactagattggccggttttactgctcggattacagaattaatgcaagtactgaaggatttaaatcatggcaaatatgagcgcacaatggtctcacaacaggaaaagggtattgaaggagtacaagtcattcccttgatacctggtgctggagaaatcattattgcagataacattataaagtttgatcatgttcctttagcaacgccaaatggagatgttttgatccgagaccttaattttgaagttcgatctggggctaatgttctaatttgtggtccaaatggctgcggaaagagttcacttttccgtgttcttggtgaattatggcctctttttggaggacgtctaactaaacctgaaagaggaaaattattttatgttcctcagagaccttacatgacccttggaacacttcgagatcaagtgatatatccagatggacgagaagatcagaaaaggaagggaatttctgacctagtactgaaggaatacttagacaatgtccagttgggtcatatccttgaacgtgaaggaggctgggacagtgttcaggattggatggacgtactcagtggtggagaaaagcaaagaatggcgatggcaagattattttatcataaaccccagtttgccattttggatgaatgcacaagtgcagttagtgtcgacgtggaaggctacatttatagtcattgtcgaaaggttggcatcactctcttcactgtgtctcataggaaatctctttggaaacatcatgagtactacctgcatatggatggcagaggcaactatgaattcaaacagataacagaagatacagttgagtttggctcttagagaaatctggagaactatacctgcttcagtgaaataattacagaatatacttagaaaggcaaagtacattgtaaaataaagttgagcttagttttttttaaaaaaaaaaacaaagcaacaaattaactagatacagaataatggagaacaagttgttaaaacatttaatattatataggatattgctaattgtgtatatgttggtttaattaataatatgtactaagaatgtccttattcttgtggttaaaaacctgcctaaattaaattgggcttcaatcactgtaacctgattcatcctgggatgtaaaccattcgaagtcagctaattggacttttatggctctatcttttccttcagtgaagaaccctatttaaaactgggtcatcatttgtcctgttctagcaagatagtcttcagtttcattttcctgtgccctgtggtagttggaaacaaatcataatgtattatttaaatgtttaacatcattgcataacagcgtttattatacagtggcagatttctttagctgccacagtaatactcattccttgtgtgtgtcttggagtgcatttgactccaggaaaagccattttggttttccttaactaaatgataaatgtacccctctcagtctgcagtattgagttgtttaaagtatatgtgcagtcttgcttacaaggaggggttaccatgtatcacacctaatcttcccaatgtttgggatattaaaacacaaagtccttaacatgccaggctcaaggtcttataagagttctagatttttaagagaattagacaaatttgtgtgtgttagaagcccattcattagaagtgtggtggttatttggtattaaactccaaatgagccataggaaggcactacatgaaataatgcactgagtatgcaatgctatcactgtctttgactgtgattttatgtttaaaaagtatgttctaaaattattatatatacatgggtgaattatgtttccgaggcactgttttatctctgtgaatcttgaataacttttttatatttgggttatgatgtcaaacgatcctaagcgaagatgatttcagttcatcaaatcatcattaatgactttatgtattatttgcacagggagaattgaaactgagtataatcaataagctagatacgaaatcagtttctcaaactgagcttcagaaaggggcattttgtactcttgtttttgcataactggttttgtttttttgcagaattaactataacaatcactggctaccgaagtaaactgatgtactgaattccataatacataacattcaatttttaccacttctgtttagcgaacttgtatacttattttctgttcagattaaaaaaaaaaaaaaaaactcagatatcctatacaacctttgcttgttctttttattctggtatctaaatactgagaagttcatttataattcagccttgacttgaaaacatagatagtttaatcttgacttgaaaaacacaaaaataaattcagaaaatgcttttaaaaaaaagtctct

SEQ ID NO: 456078 - DNA, 1965 bp, Homo sapiens
ggtggcgtgggtcgacgcacgcgtctgagaaacggacgggaatactgaacctagatttagtactgaaggaatacttagacaatgtccagttgggtcatatccttgaacgtgaaggaggctgggacagtgttcaggattggatggacgtactcagtggtggagaaaagcaaagaatggcgatggcaagattattttatcataaaccccagtttgccattttggatgaatgcacaagtgcagttagtgtcgacgtggaaggctacatttatagtcattgtcgaaaggttggcatcactctcttcactgtgtctcataggaaatctctttggaaacatcatgagtactacctgcatatggatggcagaggcaactatgaattcaaacagataacagaagatacagttgagtttggctcttagagaaatctggagaactatacctgcttcagtgaaataattacagaatatacttagaaaggcaaagtacattgtaaaataaagttgagcttagttttttttaaaaaaaaaaacaaagcaacaaattaactagatacagaataatggagaacaagttgttaaaacatttaatattatataggatattgctaattgtgtatatgttggtttaattaataatatgtactaagaatgtccttattcttgtggttaaaaacctgcctaaattaaattgggcttcaatcactgtaacctgattcatcctgggatgtaaaccattcgaagtcagctaattggacttttatggctctatcttttccttcagtgaagaaccctatttaaaactgggtcatcatttgtcctgttctagcaagatagtcttcagtttcattttcctgtgccctgtggtagttggaaacaaatcataatgtattatttaaatgtttaacatcattgcataacagcgtttattatacagtggcagatttctttagctgccacagtaatactcattccttgtgtgtgtcttggagtgcatttgactccaggaaaagccattttggttttccttaactaaatgataaatgtacccctctcagtctgcagtattgagttgtttaaagtatatgtgcagtcttgcttacaaggaggggttaccatgtatcacacctaatcttcccaatgtttgggatattaaaacacaaagtccttaacatgccaggctcaaggtcttataagagttctagatttttaagagaattagacaaatttgtgtgtgttagaagcccattcattagaagtgtggtggttatttggtattaaactccaaatgagccataggaaggcactacatgaaataatgcactgagtatgcaatgctatcactgtctttgactgtgattttatgtttaaaaagtatgttctaaaattattatatatacatgggtgaattatgtttccgaggcactgttttatctctgtgaatcttgaataacttttttatatttgggttatgatgtcaaacgatcctaagcgaagatgatttcagttcatcaaatcatcattaatgactttatgtattatttgcacagggagaattgaaactgagtataatcaataagctagatacgaaatcagtttctcaaactgagcttcagaaaggggcattttgtactcttgtttttgcataactggttttgtttttttgcagaattaactataacaatcactggctaccgaagtaaactgatgtactgaattccataatacataacattcaatttttaccacttctgtttagcgaacttgtatacttattttctgttcagattaaaaaaaaaaaaaaaaactcagatatcctatacaacctttgcttgttctttttattctggtatctaaatactgagaagttcatttataattcagccttgacttgaaaacatagatagtttaatcttgacttgaaaaacacaaaaataaattcagaaaatgcttttaaaaaaaagtctct

SEQ ID NO: 456079 - DNA, 1744 bp, Homo sapiens
tcgacgagagaggcgagggcggcgcggcggtagatgggcggccgggaggaagaaagcctgagggttggcatcactctcttcactgtgtctcataggaaatctctttggaaacatcatgagtactacctgcatatggatggcagaggcaactatgaattcaaacagataacagaagatacagttgagtttggctcttagagaaatctggagaactatacctgcttcagtgaaataattacagaatatacttagaaaggcaaagtacattgtaaaataaagttgagcttagttttttttaaaaaaaaaaacaaagcaacaaattaactagatacagaataatggagaacaagttgttaaaacatttaatattatataggatattgctaattgtgtatatgttggtttaattaataatatgtactaagaatgtccttattcttgtggttaaaaacctgcctaaattaaattgggcttcaatcactgtaacctgattcatcctgggatgtaaaccattcgaagtcagctaattggacttttatggctctatcttttccttcagtgaagaaccctatttaaaactgggtcatcatttgtcctgttctagcaagatagtcttcagtttcattttcctgtgccctgtggtagttggaaacaaatcataatgtattatttaaatgtttaacatcattgcataacagcgtttattatacagtggcagatttctttagctgccacagtaatactcattccttgtgtgtgtcttggagtgcatttgactccaggaaaagccattttggttttccttaactaaatgataaatgtacccctctcagtctgcagtattgagttgtttaaagtatatgtgcagtcttgcttacaaggaggggttaccatgtatcacacctaatcttcccaatgtttgggatattaaaacacaaagtccttaacatgccaggctcaaggtcttataagagttctagatttttaagagaattagacaaatttgtgtgtgttagaagcccattcattagaagtgtggtggttatttggtattaaactccaaatgagccataggaaggcactacatgaaataatgcactgagtatgcaatgctatcactgtctttgactgtgattttatgtttaaaaagtatgttctaaaattattatatatacatgggtgaattatgtttccgaggcactgttttatctctgtgaatcttgaataacttttttatatttgggttatgatgtcaaacgatcctaagcgaagatgatttcagttcatcaaatcatcattaatgactttatgtattatttgcacagggagaattgaaactgagtataatcaataagctagatacgaaatcagtttctcaaactgagcttcagaaaggggcattttgtactcttgtttttgcataactggttttgtttttttgcagaattaactataacaatcactggctaccgaagtaaactgatgtactgaattccataatacataacattcaatttttaccacttctgtttagcgaacttgtatacttattttctgttcagattaaaaaaaaaaaaaaaaactcagatatcctatacaacctttgcttgttctttttattctggtatctaaatactgagaagttcatttataattcagccttgacttgaaaacatagatagtttaatcttgacttgaaaaacacaaaaataaattcagaaaatgcttttaaaaaaaagtctct

SEQ ID NO: 456080 - DNA, 3543 bp, Homo sapiens
agcggagtgaggtagccgccgccgccgccgccgccgcgtcccctcgccggctcgctggtaccggcagtgccatggcggccttcagcaagtacttgacggcgcgaaactcctcgctggctggtgccgcgttcctgctgctctgcctgctccacaagcggcgccgcgccctcggcctgcacggtaagaaaagtggaaaaccaccattacagaacaatgagaaagaggggaaaaaggagcgagctgtggtggacaaggtgtttttctcaaggctcatacagattctgaaaatcatggtccctagaacattttgtaaagagacaggttacttggtacttattgctgttatgctggtgtctcgaacatattgtgatgtttggatgattcaaaatgggacactaattgaaagtggtatcattggtcgtagcaggaaagatttcaagagatacttactcaacttcatcgctgccatgcctcttatctctctggttaataacttcttgaagtatgggttaaatgagcttaaactgtgcttccgagtaaggctcactaaatacctctatgaggagtatcttcaagctttcacatattataaaatggggaatctggacaacagaatagctaatccagaccagctgcttacacaagatgtagaaaaattttgtaacagtgtagtcgatctgtattcaaatcttagtaagccatttttagacatagttttgtatatctttaagttaacgagtgcaattggagctcagggcccagcgagcatgatggcctacttggttgtttctgggctattcctaactcgacttcgaagacccattggtaagatgacaataactgagcaaaagtatgaaggagaatatagatatgttaattctcggctcatcacaaacagtgaagaaattgccttttacaatgggaataaaagagaaaagcagacagtccactcagtcttccgaaaactggtggaacacctacataatttcattttgtttcggttttcaatgggcttcattgatagtattattgccaaataccttgccactgttgttggttacctagttgtcagtcgccctttcttagatttgtctcatcctcgacatctcaagagtacacattcggaacttctagaggattactaccaaagtggaagaatgcttttgcgaatgtctcaagctctgggtcgaatagttttggctgggcgtgaaatgactagattggccggttttactgctcggattacagaattaatgcaagtactgaaggatttaaatcatggcaaatatgagcgcacaatggtctcacaacaggaaaagggtattgaaggagtacaagtcattcccttgatacctggtgctggagaaatcattattgcagataacattataaagtttgatcatgttcctttagcaacgccaaatggagatgttttgatccgagaccttaattttgaagttcgatctggggctaatgttctaatttgtggtccaaatggctgcggaaagagttcacttttccgtgttcttggtgaattatggcctctttttggaggacgtctaactaaacctgaaagaggaaaattattttatgttcctcagagaccttacatgacccttggaacacttcgagatcaagtgatatatccagatggacgagaagatcagaaaaggaagggaatttctgacctagtactgaaggaatacttagacaatgtccagttgggtcatatccttgaacgtgaaggaggctgggacagtgttcaggattggatggacgtactcagtggtggagaaaagcaaagaatggcgatggcaagattattttatcataaaccccagtttgccattttggatgaatgcacaagtgcagttagtgtcgacgtggaaggctacatttatagtcattgtcgaaaggttggcatcactctcttcactgtgtctcataggaaatctctttggaaacatcatgagtactacctgcatatggatggcagaggcaactatgaattcaaacagataacagaagatacagttgagtttggctcttagagaaatctggagaactatacctgcttcagtgaaataattacagaatatacttagaaaggcaaagtacattgtaaaataaagttgagcttagttttttttaaaaaaaaaaacaaagcaacaaattaactagatacagaataatggagaacaagttgttaaaacatttaatattatataggatattgctaattgtgtatatgttggtttaattaataatatgtactaagaatgtccttattcttgtggttaaaaacctgcctaaattaaattgggcttcaatcactgtaacctgattcatcctgggatgtaaaccattcgaagtcagctaattggacttttatggctctatcttttccttcagtgaagaaccctatttcctgtgccctgtggtagttggaaacaaatcataatgtattatttaaatgtttaacatcattgcataacagcgtttattatacagtggcagatttctttagctgccacagtaatactcattccttgtgtgtgtcttggagtgcatttgactccaggaaaagccattttggttttccttaactaaatgataaatgtacccctctcagtctgcagtattgagttgtttaaagtatatgtgcagtcttgcttacaaggaggggttaccatgtatcacacctaatcttcccaatgtttgggatattaaaacacaaagtccttaacatgccaggctcaaggtcttataagagttctagatttttaagagaattagacaaatttgtgtgtgttagaagcccattcattagaagtgtggtggttatttggtattaaactccaaatgagccataggaaggcactacatgaaataatgcactgagtatgcaatgctatcactgtctttgactgtgattttatgtttaaaaagtatgttctaaaattattatatatacatgggtgaattatgtttccgaggcactgttttatctctgtgaatcttgaataacttttttatatttgggttatgatgtcaaacgatcctaagcgaagatgatttcagttcatcaaatcatcattaatgactttatgtattatttgcacagggagaattgaaactgagtataatcaataagctagatacgaaatcagtttctcaaactgagcttcagaaaggggcattttgtactcttgtttttgcataactggttttgtttttttgcagaattaactataacaatcactggctaccgaagtaaactgatgtactgaattccataatacataacattcaatttttaccacttctgtttagcgaacttgtatacttattttctgttcagattaaaaaaaaaaaaaaaaactcagatatcctatacaacctttgcttgttctttttattctggtatctaaatactgagaagttcatttataattcagccttgacttgaaaacatagatagtttaatcttgacttgaaaaacacaaaaataaattcagaaaatgcttttaaaaaaaagtctct

SEQ ID NO: 456081 - DNA, 984 bp, Homo sapiens
agcggagtgaggtagccgccgccgccgccgccgccgcgtcccctcgccggctcgctggtaccggcagtgccatggcggccttcagcaagtacttgacggcgcgaaactcctcgctggctggtgccgcgttcctgctgctctgcctgctccacaagcggcgccgcgccctcggcctgcacggtaagaaaagtggaaaaccaccattacagaacaatgagaaagaggggaaaaaggagcgagctgtggtggacaaggtgtttttctcaaggctcatacagattctgaaaatcatggtccctagaacattttgtaaagagacaggttacttggtacttattgctgttatgctggtgtctcgaacatattgtgatgtttggatgattcaaaatgggacactaattgaaagtggtatcattggtcgtagcaggaaagatttcaagagatacttactcaacttcatcgctgccatgcctcttatctctctggttaataacttcttgaagtatgggttaaatgagcttaaactgtgcttccgagtaaggctcactaaatacctctatgaggagtatcttcaagctttcacatattataaaatggggaatctggacaacagaatagctaatccagaccagctgcttacacaagatgtagaaaaattttgtaacagtgtagtcgatctgtattcaaatcttagtaagccatttttagacatagttttgtatatctttaagttaacgagtgcaattggagctcaggtacttggaaaaattttgtggcattaaaaaccagacaaatgtattggccaggcgtggtggctcatgcctgtaatcccagcactttgggaggctgagatgggaggatcgcttgaatccaggagttcgagacaagcctggacaaaaagcgagacccgcttctttaaaaaataataataaacccggatgcggcagcttgtttttttttttctttatttaatttttctaaatt

SEQ ID NO: 456082 - DNA, 666 bp, Homo sapiens
gggaacacaactagaatgtgaggggccaggatagctaagaaatagtaatacagaaaatggaaactcagaaagctttctgaaaataagccactaaataaaaacagaaggctttgtaactgctgttgtgtcttcagaggttaggatatatcggcagtttttatagctctttttcccctctactaaattaaaaacaaataaaaagccttaagctggagatttcaagctgattaggaaatcaggctacaggaaacaatactgactgacctatggaacagtcttgcatttagcacagtttaacctactggtagctgagatccttggtcatggagttacggaagcattctgatttgtgggatgcttatagatttagctcccttaaaataatgaggaagtctgtattttacttttcataaaagacagtactatattcactcttagttactgactttttttcccccttctttcccatagtactacctgcatatggatggcagaggcaactatgaattcaaacagataacagaagatacagttgagtttggctcttagagaaatctggagaactatacctgcttcagtgaaataattacagaatatacttagaaaggcaaagtacattgtaaaataaagttgagcttagttttttttaaaaaaaaaaacaaagca

SEQ ID NO: 456083 - DNA, 3597 bp, Homo sapiens
agcggagtgaggtagccgccgccgccgccgccgccgcgtcccctcgccggctcgctggtaccggcagtgccatggcggccttcagcaagtacttgacggcgcgaaactcctcgctggctggtgccgcgttcctgctgctctgcctgctccacaagcggcgccgcgccctcggcctgcacggtaagaaaagtggaaaaccaccattacagaacaatgagaaagaggggaaaaaggagcgagctgtggtggacaaggtgtttttctcaaggctcatacagattctgaaaatcatggtccctagaacattttgtaaagagacaggttacttggtacttattgctgttatgctggtgtctcgaacatattgtgatgtttggatgattcaaaatgggacactaattgaaagtggtatcattggtcgtagcaggaaagatttcaagagatacttactcaacttcatcgctgccatgcctcttatctctctggttaataacttcttgaagtatgggttaaatgagcttaaactgtgcttccgagtaaggctcactaaatacctctatgaggagtatcttcaagctttcacatattataaaatggggaatctggacaacagaatagctaatccagaccagctgcttacacaagatgtagaaaaattttgtaacagtgtagtcgatctgtattcaaatcttagtaagccatttttagacatagttttgtatatctttaagttaacgagtgcaattggagctcagggcccagcgagcatgatggcctacttggttgtttctgggctattcctaactcgacttcgaagacccattggtaagatgacaataactgagcaaaagtatgaaggagaatatagatatgttaattctcggctcatcacaaacagtgaagaaattgccttttacaatgggaataaaagagaaaagcagacagtccactcagtcttccgaaaactggtggaacacctacataatttcattttgtttcggttttcaatgggcttcattgatagtattattgccaaataccttgccactgttgttggttacctagttgtcagtcgccctttcttagatttgtctcatcctcgacatctcaagagtacacattcggaacttctagaggattactaccaaagtggaagaatgcttttgcgaatgtctcaagctctgggtcgaatagttttggctgggcgtgaaatgactagattggccggttttactgctcggattacagaattaatgcaagtactgaaggatttaaatcatggcaaatatgagcgcacaatggtctcacaacaggaaaagggtattgaaggagtacaagtcattcccttgatacctggtgctggagaaatcattattgcagataacattataaagtttgatcatgttcctttagcaacgccaaatggagatgttttgatccgagaccttaattttgaagttcgatctggggctaatgttctaatttgtggtccaaatggctgcggaaagagttcacttttccgtgttcttggtgaattatggcctctttttggaggacgtctaactaaacctgaaagaggaaaattattttatgttcctcagagaccttacatgacccttggaacacttcgagatcaagtgatatatccagatggacgagaagatcagaaaaggaagggaatttctgacctagtactgaaggaatacttagacaatgtccagttgggtcatatccttgaacgtgaaggaggctgggacagtgttcaggattggatggacgtactcagtggtggagaaaagcaaagaatggcgatggcaagattattttatcataaaccccagtttgccattttggatgaatgcacaagtgcagttagtgtcgacgtggaaggctacatttatagtcattgtcgaaaggttggcatcactctcttcactgtgtctcataggaaatctctttggaaacatcatgagtactacctgcatatggatggcagaggcaactatgaattcaaacagataacagaagatacagttgagtttggctcttagagaaatctggagaactatacctgcttcagtgaaataattacagaatatacttagaaaggcaaagtacattgtaaaataaagttgagcttagttttttttaaaaaaaaaaacaaagcaacaaattaactagatacagaataatggagaacaagttgttaaaacatttaatattatataggatattgctaattgtgtatatgttggtttaattaataatatgtactaagaatgtccttattcttgtggttaaaaacctgcctaaattaaattgggcttcaatcactgtaacctgattcatcctgggatgtaaaccattcgaagtcagctaattggacttttatggctctatcttttccttcagtgaagaaccctatttaaaactgggtcatcatttgtcctgttctagcaagatagtcttcagtttcattttcctgtgccctgtggtagttggaaacaaatcataatgtattatttaaatgtttaacatcattgcataacagcgtttattatacagtggcagatttctttagctgccacagtaatactcattccttgtgtgtgtcttggagtgcatttgactccaggaaaagccattttggttttccttaactaaatgataaatgtacccctctcagtctgcagtattgagttgtttaaagtatatgtgcagtcttgcttacaaggaggggttaccatgtatcacacctaatcttcccaatgtttgggatattaaaacacaaagtccttaacatgccaggctcaaggtcttataagagttctagatttttaagagaattagacaaatttgtgtgtgttagaagcccattcattagaagtgtggtggttatttggtattaaactccaaatgagccataggaaggcactacatgaaataatgcactgagtatgcaatgctatcactgtctttgactgtgattttatgtttaaaaagtatgttctaaaattattatatatacatgggtgaattatgtttccgaggcactgttttatctctgtgaatcttgaataacttttttatatttgggttatgatgtcaaacgatcctaagcgaagatgatttcagttcatcaaatcatcattaatgactttatgtattatttgcacagggagaattgaaactgagtataatcaataagctagatacgaaatcagtttctcaaactgagcttcagaaaggggcattttgtactcttgtttttgcataactggttttgtttttttgcagaattaactataacaatcactggctaccgaagtaaactgatgtactgaattccataatacataacattcaatttttaccacttctgtttagcgaacttgtatacttattttctgttcagattaaaaaaaaaaaaaaaaactcagatatcctatacaacctttgcttgttctttttattctggtatctaaatactgagaagttcatttataattcagccttgacttgaaaacatagatagtttaatcttgacttgaaaaacacaaaaataaattcagaaaatgcttttaaaaaaaagtctct

SEQ ID NO: 456084 - DNA, 3543 bp, Homo sapiens
agcggagtgaggtagccgccgccgccgccgccgccgcgtcccctcgccggctcgctggtaccggcagtgccatggcggccttcagcaagtacttgacggcgcgaaactcctcgctggctggtgccgcgttcctgctgctctgcctgctccacaagcggcgccgcgccctcggcctgcacggtaagaaaagtggaaaaccaccattacagaacaatgagaaagaggggaaaaaggagcgagctgtggtggacaaggtgtttttctcaaggctcatacagattctgaaaatcatggtccctagaacattttgtaaagagacaggttacttggtacttattgctgttatgctggtgtctcgaacatattgtgatgtttggatgattcaaaatgggacactaattgaaagtggtatcattggtcgtagcaggaaagatttcaagagatacttactcaacttcatcgctgccatgcctcttatctctctggttaataacttcttgaagtatgggttaaatgagcttaaactgtgcttccgagtaaggctcactaaatacctctatgaggagtatcttcaagctttcacatattataaaatggggaatctggacaacagaatagctaatccagaccagctgcttacacaagatgtagaaaaattttgtaacagtgtagtcgatctgtattcaaatcttagtaagccatttttagacatagttttgtatatctttaagttaacgagtgcaattggagctcagggcccagcgagcatgatggcctacttggttgtttctgggctattcctaactcgacttcgaagacccattggtaagatgacaataactgagcaaaagtatgaaggagaatatagatatgttaattctcggctcatcacaaacagtgaagaaattgccttttacaatgggaataaaagagaaaagcagacagtccactcagtcttccgaaaactggtggaacacctacataatttcattttgtttcggttttcaatgggcttcattgatagtattattgccaaataccttgccactgttgttggttacctagttgtcagtcgccctttcttagatttgtctcatcctcgacatctcaagagtacacattcggaacttctagaggattactaccaaagtggaagaatgcttttgcgaatgtctcaagctctgggtcgaatagttttggctgggcgtgaaatgactagattggccggttttactgctcggattacagaattaatgcaagtactgaaggatttaaatcatggcaaatatgagcgcacaatggtctcacaacaggaaaagggtattgaaggagtacaagtcattcccttgatacctggtgctggagaaatcattattgcagataacattataaagtttgatcatgttcctttagcaacgccaaatggagatgttttgatccgagaccttaattttgaagttcgatctggggctaatgttctaatttgtggtccaaatggctgcggaaagagttcacttttccgtgttcttggtgaattatggcctctttttggaggacgtctaactaaacctgaaagaggtcaagtgatatatccagatggacgagaagatcagaaaaggaagggaatttctgacctagtactgaaggaatacttagacaatgtccagttgggtcatatccttgaacgtgaaggaggctgggacagtgttcaggattggatggacgtactcagtggtggagaaaagcaaagaatggcgatggcaagattattttatcataaaccccagtttgccattttggatgaatgcacaagtgcagttagtgtcgacgtggaaggctacatttatagtcattgtcgaaaggttggcatcactctcttcactgtgtctcataggaaatctctttggaaacatcatgagtactacctgcatatggatggcagaggcaactatgaattcaaacagataacagaagatacagttgagtttggctcttagagaaatctggagaactatacctgcttcagtgaaataattacagaatatacttagaaaggcaaagtacattgtaaaataaagttgagcttagttttttttaaaaaaaaaaacaaagcaacaaattaactagatacagaataatggagaacaagttgttaaaacatttaatattatataggatattgctaattgtgtatatgttggtttaattaataatatgtactaagaatgtccttattcttgtggttaaaaacctgcctaaattaaattgggcttcaatcactgtaacctgattcatcctgggatgtaaaccattcgaagtcagctaattggacttttatggctctatcttttccttcagtgaagaaccctatttaaaactgggtcatcatttgtcctgttctagcaagatagtcttcagtttcattttcctgtgccctgtggtagttggaaacaaatcataatgtattatttaaatgtttaacatcattgcataacagcgtttattatacagtggcagatttctttagctgccacagtaatactcattccttgtgtgtgtcttggagtgcatttgactccaggaaaagccattttggttttccttaactaaatgataaatgtacccctctcagtctgcagtattgagttgtttaaagtatatgtgcagtcttgcttacaaggaggggttaccatgtatcacacctaatcttcccaatgtttgggatattaaaacacaaagtccttaacatgccaggctcaaggtcttataagagttctagatttttaagagaattagacaaatttgtgtgtgttagaagcccattcattagaagtgtggtggttatttggtattaaactccaaatgagccataggaaggcactacatgaaataatgcactgagtatgcaatgctatcactgtctttgactgtgattttatgtttaaaaagtatgttctaaaattattatatatacatgggtgaattatgtttccgaggcactgttttatctctgtgaatcttgaataacttttttatatttgggttatgatgtcaaacgatcctaagcgaagatgatttcagttcatcaaatcatcattaatgactttatgtattatttgcacagggagaattgaaactgagtataatcaataagctagatacgaaatcagtttctcaaactgagcttcagaaaggggcattttgtactcttgtttttgcataactggttttgtttttttgcagaattaactataacaatcactggctaccgaagtaaactgatgtactgaattccataatacataacattcaatttttaccacttctgtttagcgaacttgtatacttattttctgttcagattaaaaaaaaaaaaaaaaactcagatatcctatacaacctttgcttgttctttttattctggtatctaaatactgagaagttcatttataattcagccttgacttgaaaacatagatagtttaatcttgacttgaaaaacacaaaaataaattcagaaaatgcttttaaaaaaaagtctct

SEQ ID NO: 456085 - DNA, 3543 bp, Homo sapiens
agcggagtgaggtagccgccgccgccgccgccgccgcgtcccctcgccggctcgctggtaccggcagtgccatggcggccttcagcaagtacttgacggcgcgaaactcctcgctggctggtgccgcgttcctgctgctctgcctgctccacaagcggcgccgcgccctcggcctgcacggtaagaaaagtggaaaaccaccattacagaacaatgagaaagaggggaaaaaggagcgagctgtggtggacaaggtgtttttctcaaggctcatacagattctgaaaatcatggtccctagaacattttgtaaagagacaggttacttggtacttattgctgttatgctggtgtctcgaacatattgtgatgtttggatgattcaaaatgggacactaattgaaagtggtatcattggtcgtagcaggaaagatttcaagagatacttactcaacttcatcgctgccatgcctcttatctctctggttaataacttcttgaagtatgggttaaatgagcttaaactgtgcttccgagtaaggctcactaaatacctctatgaggagtatcttcaagctttcacatattataaaatggggaatctggacaacagaatagctaatccagaccagctgcttacacaagatgtagaaaaattttgtaacagtgtagtcgatctgtattcaaatcttagtaagccatttttagacatagttttgtatatctttaagttaacgagtgcaattggagctcagggcccagcgagcatgatggcctacttggttgtttctgggctattcctaactcgacttcgaagacccattggtaagatgacaataactgagcaaaagtatgaaggagaatatagatatgttaattctcggctcatcacaaacagtgaagaaattgccttttacaatgggaataaaagagaaaagcagacagtccactcagtcttccgaaaactggtggaacacctacataatttcattttgtttcggttttcaatgggcttcattgatagtattattgccaaataccttgccactgttgttggttacctagttgtcagtcgccctttcttagatttgtctcatcctcgacatctcaagagtacacattcggaacttctagaggattactaccaaagtggaagaatgcttttgcgaatgtctcaagctctgggtcgaatagttttggctgggcgtgaaatgactagattggccggttttactgctcggattacagaattaatgcaagtactgaaggatttaaatcatggcaaatatgagcgcacaatggtctcacaacaggaaaagggtattgaaggagtacaagtcattcccttgatacctggtgctggagaaatcattattgcagataacattataaagtttgatcatgttcctttagcaacgccaaatggagatgttttgatccgagaccttaattttgaagttcgatctggggctaatgttctaatttgtggtccaaatggctgcggaaagagttcacttttccgtgttcttggtgaattatggcctctttttggaggacgtctaactaaacctgaaagaggaaaattattttatgttcctcagagaccttacatgacccttggaacacttcgagatcaagtgatatatccagatggacgagaagatcagttgggtcatatccttgaacgtgaaggaggctgggacagtgttcaggattggatggacgtactcagtggtggagaaaagcaaagaatggcgatggcaagattattttatcataaaccccagtttgccattttggatgaatgcacaagtgcagttagtgtcgacgtggaaggctacatttatagtcattgtcgaaaggttggcatcactctcttcactgtgtctcataggaaatctctttggaaacatcatgagtactacctgcatatggatggcagaggcaactatgaattcaaacagataacagaagatacagttgagtttggctcttagagaaatctggagaactatacctgcttcagtgaaataattacagaatatacttagaaaggcaaagtacattgtaaaataaagttgagcttagttttttttaaaaaaaaaaacaaagcaacaaattaactagatacagaataatggagaacaagttgttaaaacatttaatattatataggatattgctaattgtgtatatgttggtttaattaataatatgtactaagaatgtccttattcttgtggttaaaaacctgcctaaattaaattgggcttcaatcactgtaacctgattcatcctgggatgtaaaccattcgaagtcagctaattggacttttatggctctatcttttccttcagtgaagaaccctatttaaaactgggtcatcatttgtcctgttctagcaagatagtcttcagtttcattttcctgtgccctgtggtagttggaaacaaatcataatgtattatttaaatgtttaacatcattgcataacagcgtttattatacagtggcagatttctttagctgccacagtaatactcattccttgtgtgtgtcttggagtgcatttgactccaggaaaagccattttggttttccttaactaaatgataaatgtacccctctcagtctgcagtattgagttgtttaaagtatatgtgcagtcttgcttacaaggaggggttaccatgtatcacacctaatcttcccaatgtttgggatattaaaacacaaagtccttaacatgccaggctcaaggtcttataagagttctagatttttaagagaattagacaaatttgtgtgtgttagaagcccattcattagaagtgtggtggttatttggtattaaactccaaatgagccataggaaggcactacatgaaataatgcactgagtatgcaatgctatcactgtctttgactgtgattttatgtttaaaaagtatgttctaaaattattatatatacatgggtgaattatgtttccgaggcactgttttatctctgtgaatcttgaataacttttttatatttgggttatgatgtcaaacgatcctaagcgaagatgatttcagttcatcaaatcatcattaatgactttatgtattatttgcacagggagaattgaaactgagtataatcaataagctagatacgaaatcagtttctcaaactgagcttcagaaaggggcattttgtactcttgtttttgcataactggttttgtttttttgcagaattaactataacaatcactggctaccgaagtaaactgatgtactgaattccataatacataacattcaatttttaccacttctgtttagcgaacttgtatacttattttctgttcagattaaaaaaaaaaaaaaaaactcagatatcctatacaacctttgcttgttctttttattctggtatctaaatactgagaagttcatttataattcagccttgacttgaaaacatagatagtttaatcttgacttgaaaaacacaaaaataaattcagaaaatgcttttaaaaaaaagtctct

SEQ ID NO: 456086 - DNA, 3543 bp, Homo sapiens
agcggagtgaggtagccgccgccgccgccgccgccgcgtcccctcgccggctcgctggtaccggcagtgccatggcggccttcagcaagtacttgacggcgcgaaactcctcgctggctggtgccgcgttcctgctgctctgcctgctccacaagcggcgccgcgccctcggcctgcacggtaagaaaagtggaaaaccaccattacagaacaatgagaaagaggggaaaaaggagcgagctgtggtggacaaggtgtttttctcaaggctcatacagattctgaaaatcatggtccctagaacattttgtaaagagacaggttacttggtacttattgctgttatgctggtgtctcgaacatattgtgatgtttggatgattcaaaatgggacactaattgaaagtggtatcattggtcgtagcaggaaagatttcaagagatacttactcaacttcatcgctgccatgcctcttatctctctggttaataacttcttgaagtatgggttaaatgagcttaaactgtgcttccgagtaaggctcactaaatacctctatgaggagtatcttcaagctttcacatattataaaatggggaatctggacaacagaatagctaatccagaccagctgcttacacaagatgtagaaaaattttgtaacagtgtagtcgatctgtattcaaatcttagtaagccatttttagacatagttttgtatatctttaagttaacgagtgcaattggagctcagggcccagcgagcatgatggcctacttggttgtttctgggctattcctaactcgacttcgaagacccattggtaagatgacaataactgagcaaaagtatgaaggagaatatagatatgttaattctcggctcatcacaaacagtgaagaaattgccttttacaatgggaataaaagagaaaagcagacagtccactcagtcttccgaaaactggtggaacacctacataatttcattttgtttcggttttcaatgggcttcattgatagtattattgccaaataccttgccactgttgttggttacctagttgtcagtcgccctttcttagatttgtctcatcctcgacatctcaagagtacacattcggaacttctagaggattactaccaaagtggaagaatgcttttgcgaatgtctcaagctctgggtcgaatagttttggctgggcgtgaaatgactagattggccggttttactgctcggattacagaattaatgcaagtactgaaggatttaaatcatggcaaatatgagcgcacaatggtctcacaacaggaaaagggtattgaaggagtacaagtcattcccttgatacctggtgctggagaaatcattattgcagataacattataaagtttgatcatgttcctttagcaacgccaaatggagatgttttgatccgagaccttaattttgaagttcgatctggggctaatgttctaatttgtggtccaaatggctgcggaaagagttcacttttccgtgttcttggtgaattatggcctctttttggaggacgtctaactaaacctgaaagaggaaaattattttatgttcctcagagaccttacatgacccttggaacacttcgagatcaagtgatatatccagatggacgagaagatcagaaaaggaagggaatttctgacctagtactgaaggaatacttagacaatgtccagttgggtcatatccttgaacgtgaaggaggctgggacagtgttcaggattggatggacgtactcagtggtggagaaaagcaaagaatggcgatggcaagattattttatcataaaccccagtttgccattttggatgaatgcacaagtgcagttagtgtcgacgtggaaggctacatttatagtcattgtcgaaaggttggcatcactctcttcactgtgtctcataggaaatctctttggaaacatcatgagtactacctgcatatggatggcagaggcaactatgaattcaaacagataacagaagatacagttgagtttggctcttagagaaatctggagaactatacctgcttcagtgaaataattacagaatatacttagaaaggcaaagtacattgtaaaataaagttgagcttagttttttttaaaaaaaaaaacaaagcaacaaattaactagatacagaataatggagaacaagttgttaaaacatttaatattatataggatattgctaattgtgtatatgttggtttaattaataatatgtactaagaatgtccttattcttgtggttagatgtaaaccattcgaagtcagctaattggacttttatggctctatcttttccttcagtgaagaaccctatttaaaactgggtcatcatttgtcctgttctagcaagatagtcttcagtttcattttcctgtgccctgtggtagttggaaacaaatcataatgtattatttaaatgtttaacatcattgcataacagcgtttattatacagtggcagatttctttagctgccacagtaatactcattccttgtgtgtgtcttggagtgcatttgactccaggaaaagccattttggttttccttaactaaatgataaatgtacccctctcagtctgcagtattgagttgtttaaagtatatgtgcagtcttgcttacaaggaggggttaccatgtatcacacctaatcttcccaatgtttgggatattaaaacacaaagtccttaacatgccaggctcaaggtcttataagagttctagatttttaagagaattagacaaatttgtgtgtgttagaagcccattcattagaagtgtggtggttatttggtattaaactccaaatgagccataggaaggcactacatgaaataatgcactgagtatgcaatgctatcactgtctttgactgtgattttatgtttaaaaagtatgttctaaaattattatatatacatgggtgaattatgtttccgaggcactgttttatctctgtgaatcttgaataacttttttatatttgggttatgatgtcaaacgatcctaagcgaagatgatttcagttcatcaaatcatcattaatgactttatgtattatttgcacagggagaattgaaactgagtataatcaataagctagatacgaaatcagtttctcaaactgagcttcagaaaggggcattttgtactcttgtttttgcataactggttttgtttttttgcagaattaactataacaatcactggctaccgaagtaaactgatgtactgaattccataatacataacattcaatttttaccacttctgtttagcgaacttgtatacttattttctgttcagattaaaaaaaaaaaaaaaaactcagatatcctatacaacctttgcttgttctttttattctggtatctaaatactgagaagttcatttataattcagccttgacttgaaaacatagatagtttaatcttgacttgaaaaacacaaaaataaattcagaaaatgcttttaaaaaaaagtctct

SEQ ID NO: 456087 - DNA, 3121 bp, Homo sapiens
agcggagtgaggtagccgccgccgccgccgccgccgcgtcccctcgccggctcgctggtaccggcagtgccatggcggccttcagcaagtacttgacggcgcgaaactcctcgctggctggtgccgcgttcctgctgctctgcctgctccacaagcggcgccgcgccctcggcctgcacggtaagaaaagtggaaaaccaccattacagaacaatgagaaagaggggaaaaaggagcgagctgtggtggacaaggtgtttttctcaaggctcatacagattctgaaaatcatggtccctagaacattttgtaaagagacaggttacttggtacttattgctgttatgctggtgtctcgaacatattgtgatgtttggatgattcaaaatgggacactaattgaaagtggtatcattggtcgtagcaggaaagatttcaagagatacttactcaacttcatcgctgccatgcctcttatctctctggttaataacttcttgaagtatgggttaaatgagcttaaactgtgcttccgagtaaggctcactaaatacctctatgaggagtatcttcaagctttcacatattataaaatggggaatctggacaacagaatagctaatccagaccagctgcttacacaagatgtagaaaaattttgtaacagtgtagtcgatctgtattcaaatcttagtaagccatttttagacatagttttgtatatctttaagttaacgagtgcaattggagctcagggcccagcgagcatgatggcctacttggttgtttctgggctattcctaactcgacttcgaagacccattggtaagatgacaataactgagcaaaagtatgaaggagaatatagatatgttaattctcggctcatcacaaacagtgaagaaattgccttttacaatgggaataaaagagaaaagcagacagtccactcagtcttccgaaaactggtggaacacctacataatttcattttgtttcggttttcaatgggcttcattgatagtattattgccaaataccttgccactgttgttggttacctagttgtcagtcgccctttcttagatttgtctcatcctcgacatctcaagagtacacattcggaacttctagaggattactaccaaagtggaagaatgcttttgcgaatgtctcaagctctgggtcgaatagttttggctgggcgtgaaatgactagattggccggttttactgctcggattacagaattaatgcaagtactgaaggatttaaatcatggcaaatatgagcgcacaatggtctcacaacaggaaaagggtattgaaggagtacaagtcattcccttgatacctggtgctggagaaatcattattgcagataacattataaagtttgatcatgttcctttagcaacgccaaatggagatgttttgatccgagaccttaattttgaagttcgatctggggctaatgttctaatttgtggtccaaatggctgcggaaagagttcacttttccgtgttcttggtgaattatggcctctttttggaggacgtctaactaaacctgaaagaggaaaattattttatgttcctcagagaccttacatgacccttggaacacttcgagatcaagtgatatatccagatggacgagaagatcagaaaaggaagggaatttctgacctagtactgaaggaatacttagacaatgtccagttgggtcatatccttgaacgtgaaggaggctgggacagtgttcaggattggatggacgtactcagtggtggagaaaagcaaagaatggcgatggcaagattattttatcataaaccccagtttgccattttggatgaatgcacaagtgcagttagtgtcgacgtggaaggctacatttatagtcattgtcgaaaggttggcatcactctcttcactgtgtctcataggaaatctctttggaaacatcatgagtactacctgcatatggatggcagaggcaactatgaattcaaacagataacagaagatacagttgagtttggctcttagagaaatctggagaactatacctgcttcagtgaaataattacagaatatacttagaaaggcaaagtacattgtaaaataaagttgagcttagttttttttaaaaaaaaaaacaaagcaacaaattaactagatacagaataatggagaacaagttgttaaaacatttaatattatataggatattgctaattgtgtatatgttggtttaattaataatatgtactaagaatgtccttattcttgtggttaaaaacctgcctaaattaaattgggcttcaatcactgtaacctgattcatcctgggatgtaaaccattcgaagtcagctaattggacttttatggctctatcttttccttcagtgaagaaccctatttaaaactgggtcatcatttgtcctgttctagcaagatagtcttcagtttcattttcctgtgccctgtggtagttggaaacaaatcataatgtattatttaaatgtttaacatcattgcataacagcgtttattatacagtggcagatttctttagctgccacagtaatactcattccttgtgtgtgtcttggagtgcatttgactccaggaaaagccattttggttttccttaactaaatgataaatgtacccctctcagtctgcagtattgagttgtttaaagtatatgtgcagtcttgcttacaaggaggggttaccatgtatcacacctaatcttcccaatgtttgggatattaaaacacaaagtccttaacatgccaggctcaaggtcttataagagttctagatttttaagagaattagacaaatttgtgtgtgttagaagcccattcattagaagtgtggtggttatttggtattaaactccaaatgagccataggaaggcactacatgaaataatgcactgagtatgcaatgctatcactgtctttgactgtgattttatgtttaaaaagtatgttctaaaattattatatatacatgggtgaattatgtttccgaggcactgtttggactctgggcactgtttggactctgggcactgtttggactctgggcactgtttggactctg

SEQ ID NO: 456088 - DNA, 2083 bp, Homo sapiens
gccgacgcgtgcagacgtccttctaatcctagtcttcgtttggtccggttgcactcttcctatagcccagagggcgagagggcctgtggcctgggggaaggaggacgaggttctgcctggatcccagcagtaggacgctgtgccatttgggaacaaaggaatagtctgcctggaatccctgcagatcttggggccggaggccagtccaacccttggagcaggaagaaacgcaaagttgtcaagaaccaagtcgagctgcctcagagccggcccgcagtagctgcagactccgcccgcgacgtgtgcgcgcttctctgggccagagcgagcctgttttgtgctcgggttaagagatttgtcccagctataccatgggccgcactcgggaagctggctgcgtggccgctggtgtggttatcggggctggtgcctgctactgtgtatacagactggcttggggaagagacgagaacgagaaaatctgggacgaagacgaggagtctacggacacctcagagattggggttgagactgtgaaaggagctaaaactaacgctggggcagggtctggggccaaacttcagggtgattcagaggtcaagcctgaggtgagtttgggactcgaggattgtccgggtgtaaaagagaaggcccattcaggatcccacagcggaggtggcctagaggccaaggccaaggcccttttcaacacgctgaaggaacaggcaagtgcaaaggcaggcaaaggggctagggtgggtaccatctctgggaacaggacccttgcaccgagtttaccctgcccaggaggcaggggtggaggctgccaccccaccaggagtggatctagggccgggggcagggcaagtggaaaatccaagggaaaggcccgaagtaagagcaccagggctccagctacaacatggcctgtccggagaggcaagttcaactttccttataaaattgatgatattctgagtgctcccgacctccaaaaggtcctcaacatcctggagcgaacaaatgatccttttattcaagaagtagccttggtcactctgggtaacaatgcagcatattcatttaaccagaatgccatacgtgaattgggtggtgtcccaattattgcaaaactgataaaaacaaaagaccccataattagggaaaagacttacaatgcccttaataacttgagtgtgaacgcagaaaatcagggcaagattaagacgtacatcagtcaagtgtgtgatgacaccatggtctgtcgcttggactcagctgtgcagatggctgggctaagactgttaaccaacatgactgtgactaatcattaccaacatttgctttcctattcttttccagacttttttgctttgttattcctgggaaatcacttcaccaagatacagattatgaaactaattataaactttactgaaaatccagccatgacaagagagctggtcagttgtaaagtaccatcagaattgatttccctctttaataaagaatgggatagagagattcttcttaatatccttaccctatttgagaatataaatgacaacataaaaaatgaagggctcgcatcatccaggaaagaattcagcagaagttcactttttttcttattcaaagagtctggagtttgtgttaagaaaatattaaccaaactctaatttggagtctgtcccaaacaatattgagatatttgcagttggtacgatgtgatttgtaaattctttgtttttcattgtgcgtatatggtaaagagatcttttcagctgctattttggaataatgactatcatatatcataacagtgactgatgttggttgtaatggttgggtttaggatgaaccattttaaggatgccaaatgaaatattagtatttgtacacagaaagaatttattgatttgatcttattacctagattgagattttttaatctttcctctacctaaactgacaatgaattggttatacatcatgcataagctacacttttatattagtttatatttgttattctaagacttgtgtttcatcaataaagttgtgttttaagcagcagaaaaaa

SEQ ID NO: 456089 - DNA, 2137 bp, Homo sapiens
gccgacgcgtgcagacgtccttctaatcctagtcttcgtttggtccggttgcactcttcctatagcccagagggcgagagggcctgtggcctgggggaaggaggacgaggttctgcctggatcccagcagtaggacgctgtgccatttgggaacaaaggaatagtctgcctggaatccctgcagatcttggggccggaggccagtccaacccttggagcaggaagaaacgcaaagttgtcaagaaccaagtcgagctgcctcagagccggcccgcagtagctgcagactccgcccgcgacgtgtgcgcgcttctctgggccagagcgagcctgttttgtgctcgggttaagagatttgtcccagctataccatgggccgcactcgggaagctggctgcgtggccgctggtgtggttatcggggctggtgcctgctactgtgtatacagactggcttggggaagagacgagaacgagaaaatctgggacgaagacgaggagtctacggacacctcagagattggggttgagactgtgaaaggagctaaaactaacgctggggcagggtctggggccaaacttcagggtgattcagaggtcaagcctgaggtgagtttgggactcgaggattgtccgggtgtaaaagagaaggcccattcaggatcccacagcggaggtggcctagaggccaaggccaaggcccttttcaacacgctgaaggaacaggcaagtgcaaaggcaggcaaaggggctagggtgggtaccatctctgggaacaggacccttgcaccgagtttaccctgcccaggaggcaggggtggaggctgccaccccaccaggagtggatctagggccgggggcagggcaagtggaaaatccaagggaaaggcccgaagtaagagcaccagggctccagctacaacatggcctgtccggagaggcaagttcaactttccttataaaattgatgatattctgagtgctcccgacctccaaaaggtcctcaacatcctggagcgaacaaatgatccttttattcaagaagtagccttggtcactctgggtaacaatgcagcatattcatttaaccagaatgccatacgtgaattgggtggtgtcccaattattgcaaaactgataaaaacaaaagaccccataattagggaaaagacttacaatgcccttaataacttgagtgtgaacgcagaaaatcagggcaagattaagacgtacatcagtcaagtgtgtgatgacaccatggtctgtcgcttggactcagctgtgcagatggctgggctaagactgttaaccaacatgactgtgactaatcattaccaacatttgctttcctattcttttccagacttttttgctttgttattcctgggaaatcacttcaccaagatacagattatgaaactaattataaactttactgaaaatccagccatgacaagagagctggtcagttgtaaagtaccatcagaattgatttccctctttaataaagaatgggatagagagattcttcttaatatccttaccctatttgagaatataaatgacaacataaaaaatgaagggctcgcatcatccaggaaagaattcagcagaagttcactttttttcttattcaaagagtctggagtttgtgttaagaaaatcaaagcactagcaaatcacaatgatctggtggtgaaagtaaaagtcctgaaagtattaaccaaactctaatttggagtctgtcccaaacaatattgagatatttgcagttggtacgatgtgatttgtaaattctttgtttttcattgtgcgtatatggtaaagagatcttttcagctgctattttggaataatgactatcatatatcataacagtgactgatgttggttgtaatggttgggtttaggatgaaccattttaaggatgccaaatgaaatattagtatttgtacacagaaagaatttattgatttgatcttattacctagattgagattttttaatctttcctctacctaaactgacaatgaattggttatacatcatgcataagctacacttttatattagtttatatttgttattctaagacttgtgtttcatcaataaagttgtgttttaagcagcagaaaaaa

SEQ ID NO: 456090 - DNA, 897 bp, Homo sapiens
  misc_feature (594)..(594): n is a, c, g, or t
  misc_feature (612)..(612): n is a, c, g, or t
  misc_feature (631)..(631): n is a, c, g, or t
  misc_feature (633)..(633): n is a, c, g, or t
  misc_feature (637)..(637): n is a, c, g, or t
  misc_feature (643)..(643): n is a, c, g, or t
  misc_feature (648)..(648): n is a, c, g, or t
  misc_feature (650)..(650): n is a, c, g, or t
  misc_feature (658)..(659): n is a, c, g, or t
  misc_feature (662)..(662): n is a, c, g, or t
  misc_feature (667)..(667): n is a, c, g, or t
  misc_feature (680)..(680): n is a, c, g, or t
  misc_feature (683)..(683): n is a, c, g, or t
aagcagtggtatcaacgcagagtggccattacggccggggcttttttcttttttttccttttttcttttttccggcgttcaagatgtcgaagcgaggacgtggtgggtcctctggtgcgaaattccggatttccttgggtcttccggtaggagctgtaatcaattgtgctgacaacacaggagccaaaaacctgtatatcatctccgtgaaggggatcaagggacggctgaacagacttcccgctgctggtgtgggtgacatggtgatggccacagtcaagaaaggcaaaccagagctcagaaaaaaggtacatccagcagtggtcattcgacaacgaaagtcataccgtagaaaagatggcgtgtttctttattttgaagataatgcaggagtcatagtgaacaataaaggcgagatgaaaggttctgccattacaggaccagtagcaaaggagtgtgcagacttgtggccccggattgcatccaatgctggcagcattgcatgattctccagtatatttgtaaaaaataaaaaaaaactaaacccattaaaaaaaaaaaaaaaaaaaaaaaaaaaaaaaaaaaaaaaaaaangggggggggggtaaaaantttcccccggggggggccnangttnacgggntaccncnggtttttnnttnacaangggggcccataanggngagcgaggtttattaagagaggacgaggggccgcggtaaaaaagcgtgggtagtgggtacaacgtgctacgttgggcatcttggggaaggaactctacttgggggggtggaccattaggggccacccccaaggaaatttaagggcctagggaatattaacatgacggtatgtggaacacgggatttgtggggaagttggcaggtattttacatt

SEQ ID NO: 456091 - DNA, 501 bp, Homo sapiens
  misc_feature (22)..(22): n is a, c, g, or t
aaaacagctaggtggaggacgnggttgaagatgtcgaagcggacgtggtgggtcctctggtgcgaaattccggatttccttgggtcttccggtaggagctgtaatcaattgtgctgacaacacaggagccaaaaacctgtatatcatctccgtgaaggggatcaagggacggctgaacagacttcccgctgctggtgtgggtgacatggtgatggccacagtcaagaaaggcaaaccagagctcagaaaaaaggtacatccagcagtggtcattcgacaacgaaagtcataccgtagaaaagatggcgtgtttctttattttgaagataatgcaggagtcatagtgaacaataaaggcgagatgaaaggttctgccattacaggaccagtagcaaaggagtgtgcagacttgtggccccggattgcatccaatgctggcagcattgcatgattctccagtatatttgtaaaaaataaaaaaaaactaaacccattaaaaaa

SEQ ID NO: 456092 - DNA, 828 bp, Homo sapiens
  misc_feature (575)..(575): n is a, c, g, or t
  misc_feature (584)..(584): n is a, c, g, or t
cccacgcgtccgcggacgcgtggggtcgaagcggacgtggtgggtcctctggtgcgaaattccggatttccttgggtcttccggtaggagctgtaatcaattgtgctgacaacacaggagccaaaaacctgtatatcatctccgtgaaggggatcaagggacggctgaacagacttcccgctgctggtgtgggtgacatggtgatggccacagtcaagaaaggcaaaccagagctcagaaaaaaggtacatccagcagtggtcattcgacaacgaaagtcataccgtagaaaagatggcgtgtttctttattttgaagataatgcaggagtcatagtgaacaataaaggcgagatgaaaggttctgccattacaggaccagtagcaaaggagtgtgcagacttgtggccccggattgcatccaatgctggcagcattgcatgattctccagtatatttgtaaaaaataaaaaaaaactaaacccattaaaaaaaaaaaaaaaaaaaaaaaaaaaaaaaaaaaaaaaaaaaaaaaaaaagaaaaaaaaaaaaaaaaaaaaaagggggggggggggnaaaaaaatnccccgggggggggcacaaatttgggcgccccccccatttttcgagaaaaggggggcgcccataaggaggaggcgccataataaaaagcgagacgaacgggggccgcgtaaaacacagcggcgcggcgtgggacacaccgctccgcggggggaaaccggggaaaagacccccacggggggggggcaattggggacacacccccagaaaaatagagcgggggacaaaaacacggggcatcggggac

SEQ ID NO: 456093 - DNA, 961 bp, Homo sapiens
  misc_feature (22)..(22): n is a, c, g, or t
  misc_feature (511)..(511): n is a, c, g, or t
  misc_feature (515)..(515): n is a, c, g, or t
  misc_feature (519)..(519): n is a, c, g, or t
  misc_feature (525)..(525): n is a, c, g, or t
aaaacagctaggtggaggacgnggttgaagatgtcgaagcggacgtggtgggtcctctggtgcgaaattccggatttccttgggtcttccggtaggagctgtaatcaattgtgctgacaacacaggagccaaaaacctgtatatcatctccgtgaaggggatcaagggacggctgaacagacttcccgctgctggtgtgggtgacatggtgatggccacagtcaagaaaggcaaaccagagctcagaaaaaaggtacatccagcagtggtcattcgacaacgaaagtcataccgtagaaaagatggcgtgtttctttattttgaagataatgcaggagtcatagtgaacaataaaggcgagatgaaaggttctgccattacaggaccagtagcaaaggagtgtgcagacttgtggccccggattgcatccaatgctggcagcattgcatgattctccagtatatttgtaaaaaataaaaaaaaactaaacccattaaaaaaaagaaaacanacancaanacacanaaacaccaacaacacacaccaccaccccccccacaccacccacccccccccccctccaccccaccccacacacacccacccccccccccacccaccccccccccaccaccatcaccaccccgacgctccacactccatcccccccacccacactaacacacaaccccacactacccccccacaaccaacacccgcccggccgcgcaacacacccacgtgcgaccaagacaaaccccgctccccctcaaccacacaaaccaccccagcgcacccacagccgcaccgacacgacacccacaccccagcacacaccctcgccctgcgcccagccaataccgcacaatcccacggccccaccaccaccagccgcccgcacccccccaccccacccccaccgacacccccaccaccccccaccccccaccccccgctgcgg

SEQ ID NO: 456094 - DNA, 496 bp, Homo sapiens
  misc_feature (1)..(1): n is a, c, g, or t
  misc_feature (11)..(11): n is a, c, g, or t
  misc_feature (18)..(19): n is a, c, g, or t
  misc_feature (41)..(41): n is a, c, g, or t
  misc_feature (44)..(44): n is a, c, g, or t
  misc_feature (48)..(48): n is a, c, g, or t
  misc_feature (51)..(51): n is a, c, g, or t
  misc_feature (56)..(56): n is a, c, g, or t
  misc_feature (107)..(107): n is a, c, g, or t
  misc_feature (120)..(120): n is a, c, g, or t
ntttctttttnccggcgnncaagaattctttgctaggacgnggngggnccncaggngcgaaaagccgttttttattaaaacttgcgggagcacccccaatcaattgngctgacaacacangagccaaaaacctgtatatcatctccgtgaaggggatcaagggacggctgaacagacttcccgctgctggtgtgggtgacatggtgatggccacagtcaagaaaggcaaaccagagctcagaaaaaaggtacatccagcagtggtcattcgacaacgaaagtcataccgtagaaaagatggcgtgtttctttattttgaagataatgcaggagtcatagtgaacaataaaggcgagatgaaaggttctgccattacaggaccagtagcaaaggagtgtgcagacttgtggccccggattgcatccaatgctggcagcattgcatgattctccagtatatttgtaaaaaataaaaaaaaactaaacccattaaaaaa

SEQ ID NO: 456095 - DNA, 543 bp, Homo sapiens
ttttatttacattcttttgtaggagccaaaaacctgtatatcatctccgtgaaggggatcaagggacggctgaacagacttcccgctgctggtgtgggtgacatggtgatggccacagtcaagaaaggcaaaccagagctcagaaaaaaggtacatccagcagtggtcattcgacaacgaaagtcataccgtagaaaagatggcgtgtttctttattttgaagataatgcaggagtcatagtgaacaataaaggcgagatgaaaggttctgccattacaggaccagtagcaaaggagtgtgcagacttgtggccccggattgcatccaatgctggcagcattgcatgattctccagtatatttgctggagtgcagtaacaccactgaagctcactgtaactttgaactgctggacttggaatcctcctgctgtggccttcaaagggctgcaattacaagtgtgagccactgcatcccacctcacattttattctttggagattttttttgacttggattaaaaaactttatatttacacttca

SEQ ID NO: 456096 - DNA, 1101 bp, Homo sapiens
aggcttgcccatggtgtcagactaaaggcaaaccagagctcagaaaaaaggtacatccagcagtggtcattcgacaacgaaagtcataccgtagaaaagatggcgtgtttctttattttgaagataatgcaggagtcatagtgaacaataaaggcgagatgaaaggttctgccattacaggaccagtagcaaaggagtgtgcagacttgtggccccggattgcatccaatgctggcagcattgcatgattctccagtatatttgtaaaaaataaaaaaaaactaaacccattaaaaaaaaaaaaaaaaaacaaaacaacaacaaatgtggggcgcgcgaccaggcgccctggaaacaccttcaaaaccccacgagaagggaccccgcggcccacaaaggcacacgggaaacaggggccaaaccatgacacccaaggaaaaccgggagccaaaacacaaggcgacggaaatcccaccaaaatacaaaccgccggaggacaacccgaaacgtcgagacacaaccccacaagagcacaccagcgagaacaccacacggcgaccccaaccacagagagctcaaagcgaagccacgtaaacaaaaatagcggcccaaaacgagggaaacacaacacaccacaaaaacaacacgcaaaaccacagacagcaccaacacagagcaacacacagaagcacaccaccgccaacccgaccaccacaacacgacactccacaacacgccacaaacatctatggacaccatataccatactcactcccgtcacacatcaccctaattaatcaattcattcacacgaccacactcacctcatctgtaccattcagccacaacgctgagtgccacccatcggtggtgcgtagtgtccgtgtgcggctgttgtggcagccctgacccccggcgcagccatatcgggaggccgggcgttgggcgtaggagtagaaagcgtcggtgactgtggcgtgatcggcaggcgctacgggaggggtcagttagactggagggtagagcgagggacgacgccctggcgcgcgggcgggcggtacaccggtgaggcgggagggaggagtggtcgtcggcgcgagc

SEQ ID NO: 456097 - DNA, 950 bp, Homo sapiens
gcggccgcctactactactaaattcgcggccgcgtcgacgagtcgaagcgtacatccagcagtggtcattcgacaacgaaagtcataccgtagaaaagatggcgtgtttctttattttgaagataatgcaggagtcatagtgaacaataaaggcgagatgaaaggttctgccattacaggaccagtagcaaaggagtgtgcagacttgtggccccggattgcatccaatgctggcagcattgcatgattctccagtatatttgtaaaaaataaaaaaaaactaaacccattaaaaaaaaaaacacaaacaaaacaaaaacaaatgtttgggcccccccccgcggcccacaaaacaagacctttaaaaaccacaaatggctttagtgggcccgagcggccccaccatgtgcgggacactaccacaaccagctcggaaccaggcccgcctcgactccacccaaaagaggaaaacccaccgggccgcgcacccaacagcgcgcacgaggacccccaccccacaaaatgaaaacaaccccgccgcggcagagacacccaagacgcaggctccagaaacaaactaaactcccaaatggcaggcacaacagccacggcaccacccagggaaccacaaaccaacccgcgcgcaccacacgcaggccccgcgaatcatccaaataacatcaccgccacggcagggaacacaccacacaaccaccaacgcccccccccacaccggcaccaacgacaaacacaacgccaacacgcccgaagcaggggtaccaacaccgacggggaaccacccgaaaggcaccacaaatccaacgacaccacccccaccacaagacaacaggacgcacagacgcgcaccaaaggcacacactagcgcatccgactacccacataccgaaagaaccaaacgaccagcgcgcacatgcacttgcatagcgtac

SEQ ID NO: 456098 - DNA, 251 bp, Homo sapiens
atggaccatggatgtgacggaatgtgcgagctgcgggaccccgccacagtcaagaaaggcaaaccagagctcagaaaaaaggtacatccagcagtggtcattcgacaacgaaagtcataccgtagaaaagatggcgtgtttctttattttgaagataatgcaggagtcatagtgaacaataaaggcgagatgaaagtctgccattacaggccagtagcagcaggagaaatgccgggggaaacccggctcga

SEQ ID NO: 456099 - DNA, 542 bp, Homo sapiens
  misc_feature (27)..(27): n is a, c, g, or t
  misc_feature (31)..(31): n is a, c, g, or t
  misc_feature (33)..(34): n is a, c, g, or t
  misc_feature (38)..(38): n is a, c, g, or t
cgaccacgcgtcgcggacgcgtgggtngacncnngcgnccttccttttttcttttttccggcgttcaagatgtcgaagcgaggacgtggtgggtcctctggtgcgaaattccggatttccttgggtcttccggtaggagctgtaatcaattgtgctgacaacacaggagccaaaaacctgtatatcatctccgtgaaggggatcaagggacggctgaacagacttcccgctgctggtgtgggtgacatggtgatggccacagtcaagaaaggcaaaccagagctcagaaaaaaggtacatccagcagtggtcattcgacaacgaaagtcataccgtagaaaagatggcgtgtttctttattttgaagataatgcaggagtcatagtgaacaataaaggcgagatgaaaggttctgccattacaggaccagtagcaaaggagtgtgcagacttgtggccccggattgcatccaatgctggcagcattgcatgattctccagtatatttgtaaaaaataaaaaaaaactaaacccattaaaaaa

SEQ ID NO: 456100 - DNA, 554 bp, Homo sapiens
ctgtggccatcaccatgtcacccacaccagcagcgggaagtctgttcagccgttccttttttcttttttccggcgttcaagatgtcgaagcgaggacgtggtgggtcctctggtgcgaaattccggatttccttgggtcttccggtaggagctgtaatcaattgtgctgacaacacaggagccaaaaacctgtatatcatctccgtgaaggggatcaagggacggctgaacagacttcccgctgctggtgtgggtgacatggtgatggccacagtcaagaaaggcaaaccagagctcagaaaaaaggtacatccagcagtggtcattcgacaacgaaagtcataccgtagaaaagatggcgtgtttctttattttgaagataatgcaggagtcatagtgaacaataaaggcgagatgaaaggttctgccattacaggaccagtagcaaaggagtgtgcagacttgtggccccggattgcatccaatgctggcagcattgcatgattctccagtatatttgtaaaaaataaaaaaaaactaaacccattaaaaaa

SEQ ID NO: 456101 - DNA, 971 bp, Homo sapiens
  misc_feature (971)..(971): n is a, c, g, or t
agcgggctcgggccacgtgaggagggtgggcggggcgttaaagttcatatcccagtgtcctttgaatcgacttccttttttcttttttccggcgttcaagatgtcgaagcgaggacgtggtgggtcctctggtgcgaaattccggatttccttgggtcttccggtaggagctgtaatcaattgtgctgacaacacaggagccaaaaacctgtatatcatctccgtgaaggggatcaagggacggctgaacagacttcccgctgctggtgtgggtgacatggtgatggccacagtcaagaaaggcaaaccagagctcagaaaaaaggtacatccagcagtggtcattcgacaacgaaagtcataccgtagaaaagatggcgtgtttctttattttgaagataatgcaggagtcatagtgaacaataaaggcgagatgaaaggttctgccattacaggaccagtagcaaaggagtgtgcagacttgtggccccggattgcatccaatgctggcagcattgcatgattctccagtatatttgtaaaaaataaaaaaaaactaaacccattaaaaaaaaaaaaaaaaaaaaagggcgccgtcgcgatctagaattaagccctcgtagtaacagccattctcatccaaaccccctgaagtttaaccggcgcagtcattctcataatcgcccagggtttaatcctcattagtattcgtggctagcaaactcaaatacgaacgcatcacagtcgcatcataatcctctctcaaggatttcaaatctatcccaataataggtttggaaggacttctaggcaagctcgtaacttcgctttacccccattattactatggggagaacctctgggtaataacaggctcctgataatataatttctattaggatcgaatataggaagcttatcctttaaatttcccaacaggggtctcccccattaaataaccttaaggaaan

SEQ ID NO: 456102 - DNA, 954 bp, Homo sapiens
  misc_feature (649)..(649): n is a, c, g, or t
  misc_feature (665)..(665): n is a, c, g, or t
  misc_feature (673)..(673): n is a, c, g, or t
  misc_feature (683)..(683): n is a, c, g, or t
  misc_feature (685)..(685): n is a, c, g, or t
  misc_feature (693)..(693): n is a, c, g, or t
  misc_feature (695)..(695): n is a, c, g, or t
  misc_feature (703)..(703): n is a, c, g, or t
  misc_feature (709)..(709): n is a, c, g, or t
  misc_feature (714)..(714): n is a, c, g, or t
  misc_feature (725)..(725): n is a, c, g, or t
  misc_feature (727)..(727): n is a, c, g, or t
  misc_feature (729)..(729): n is a, c, g, or t
  misc_feature (739)..(739): n is a, c, g, or t
  misc_feature (745)..(745): n is a, c, g, or t
  misc_feature (752)..(752): n is a, c, g, or t
  misc_feature (761)..(761): n is a, c, g, or t
  misc_feature (765)..(765): n is a, c, g, or t
  misc_feature (768)..(768): n is a, c, g, or t
  misc_feature (772)..(772): n is a, c, g, or t
  misc_feature (776)..(776): n is a, c, g, or t
  misc_feature (781)..(781): n is a, c, g, or t
  misc_feature (787)..(787): n is a, c, g, or t
  misc_feature (789)..(791): n is a, c, g, or t
  misc_feature (793)..(793): n is a, c, g, or t
  misc_feature (796)..(797): n is a, c, g, or t
  misc_feature (954)..(954): n is a, c, g, or t
agcgggctcgggccacgtgaggagggtgggcggggcgttaaagttcatatcccagtgtcctttgaatcgacttccttttttcttttttccggcgttcaagatgtcgaagcgaggacgtggtgggtcctctggtgcgaaattccggatttccttgggtcttccggtaggagctgtaatcaattgtgctgacaacacaggagccaaaaacctgtatatcatctccgtgaaggggatcaagggacggctgaacagacttcccgctgctggtgtgggtgacatggtgatggccacagtcaagaaaggcaaaccagagctcagaaaaaaggtacatccagcagtggtcattcgacaacgaaagtcataccgtagaaaagatggcgtgtttctttattttgaagataatgcaggagtcatagtgaacaataaaggcgagatgaaaggttctgccattacaggaccagtagcaaaggagtgtgcagacttgtggccccggattgcatccaatgctggcagcattgcatgattctccagtatatttgtaaaaaataaaaaaaaactaaacccattaaaaaaaaaaaaaaaaaaaaaaaaaaaaaaaaaaaaaaaaaaaaaaaaaaaaaaaaaaaaaaaaaaaaaaaaaaaaaaaaanaaaaaaaaaaaccttntgggccgnttgggccaantnaattttanantgggcaantttatncttgnggccgaatttngngntaattgggcnatttcnccttatngggggcggnttanaantaantggncgggntttaanannntnggnnttggaaaacccttgggtgttcccaaatttaaacgcctttgaacaaattccccttttggcaagtgtggttaatggcaaaagggcccaacgattggcttttccaaaaagtgggcaacctttatgggcaaagggaattgggcgttttttgggttcgggcn

SEQ ID NO: 456103 - DNA, 2797 bp, Homo sapiens
agcgggctcgggccacgtgaggagggtgggcggggcgttaaagttcatatcccagtgtcctttgaatcgacttccttttttcttttttccggcgttcaagatgtcgaagcgaggacgtggtgggtcctctggtgcgaaattccggatttccttgggtcttccggtaggagctgtaatcaattgtgctgacaacacaggagccaaaaacctgtatatcatctccgtgaaggggatcaagggacggctgaacagacttcccgctgctggtgtgggtgacatggtgatggccacagtcaagaaaggcaaaccagagctcagaaaaaaggtacatccagcagtggtcattcgacaacgaaagtcataccgtagaaaagatggcgtgtttctttattttgaagataatgcaggagtcatagtgaacaataaaggcgagatgaaaggttctgccattacaggaccagtagcaaaggagtgtgcagacttgtggccccggattgcatccaatgctggcagcattgcatgattctccagtatatttgtaaaaaataaaaaaaaactaaacccattaaaaaaaaagtatttgtttgcagtgcttgtctccctgttcacttccagggttcaagcgattctcctgcctcagcctcctaagtagctgggattacaggcacctgccgtcatgcctggctagtttttgtatttttggtggagacagggtttcaccatgtttgccaaacgactcaaactcctgatctcaagtgatctgcccacccaggcctctgcagtgtttttgacataccctgaccatcacttttctgaaatggaaactctgggcattttttttttaaagcaatccttgcttttttgtgagtttgcagactttcagcatcttccaattgctgtatttacaattttggcctcaaaaagtattatttgggttttgagtcccaaaaataatagtagatactgctcaatgactggctatacatggtagcttctcctggagtgaggaaggcattcaaatggctgggcgcggtagctggcacctgtaatcccaacactttcggaggccaaggcaggcagatcatgaggtcaggagttcaagaccaggctgaccaacgtggtgaaacctcctcttttctaaaaatacaaaaattagctgggcgtggtggcgcaccgcctgtaatctcagctactgagagaatcgcttgaacctgggaggtggagtttgcagcgagtcgagattgcaccattgtactccatccagcctgggcaacggagcaagattccgttcccgcccccgccccaaaaaaaggcattgaagttaagatagactatatagttagatcctggacacacacatggattttgaggaatgatgtgagtttgtttatgtatgtacattttagcagttaacaggtttggagtaaattgaatatttataaaacaacagtaattgccatgtaggtttactgtcatagtggaagatgattaagttgatggtacctacaggtattttgctatgaaaatgttttgacaaacaggatgatcgtgtaatttatgttccaagctctagtttgagaatggaagaatgtggtaaatttttgccaactgaacaggcataaagcgctgataataagggacttggccttaaggtaggaggttgttagcatttctttctaaacgtgtaagagtttatttaggtgacacccagcgttttggaaaaatgggtgtttgtttagaacaataatttggagggaagtggactaaacagggtttttagattaaggtttgtgtttatgtatctgtatctgcaaatactcagccataaatgtttctacctgtaagttgggtataatacaagctccacttggtatcaaaaaggactacccttagtgtcttccatgactagttatggaatgtaccagacctagagaggagttgttctaacctggagcttttgaaaatgtttccggtccataccctagaccaattaagtcagactgcagaataggactcagacatcagaattgtgaagctcccaggagatgtcaaggtatacccaagactgagaaccagtaccctgtctagactgaaccaggcttggttttagaagtattaaatctcacctgggtacggtggctcacacctataatcccagcactttgggaggctgaggtgggtggatcatctgaggtcaggagagtgagaccagcctgtccaacatgttgaaaccccatctctactatacaaaattagccaggcatggtggtgcatgctgtaatcccagctacttgggaggctgaggcaggagaattgcttgaaccccggagatggaggttgcagtgagctgaggtcgcacgattgtgctccagcctgggcaaccagtgaaactctggggggaaagaaaaaaaatgtattaaatctctagttttagagagttacaccataacatccctgagtatggtcaatttcaagtcagctttagtgtgacaagcccctaggcccaccatttatgtctttatatattatggcaatatatgatccttatatattaaccactaatcgctgctgtttttgaatgttatcttttctgaggcagtcttgctctgtcacacaggctggagtgcagtaacaccactgaagctcactgtaactttgaactgctggacttggaatcctcctgctgtggccttcaaagggctgcaattacaagtgtgagccactgcatcccacctcacattttattctttggagattttttttgacttggattaaaaaactttatatttacacttca

SEQ ID NO: 456104 - DNA, 786 bp, Homo sapiens
  misc_feature (786)..(786): n is a, c, g, or t
agcgggctcgggccacgtgaggagggtgggcggggcgttaaagttcatatcccagtgtcctttgaatcgacttccttttttcttttttccggcgttcaagatgtcgaagcgaggacgtggtgggtcctctggtgcgaaattccggatttccttgggtcttccggtaggagctgtaatcaattgtgctgacaacacaggagccaaaaacctgtatatcatctccgtgaaggggatcaagggacggctgaacagacttcccgctgctggtgtgggtgacatggtgatggccacagtcaagaaaggcaaaccagagctcagaaaaaaggtacatccagcagtggtcattcgacaacgaaagtcataccgtagaaaagatggcgtgtttctttattttgaagataatgcaggagtcatagtgaacaataaaggcgagatgaaaggttctgccattacaggaccagtagcaaaggagtgtgcagacttgtggccccggattgcatccaatgctggcagcattgcatgattctccagtatatttgtaaaaaataaaaaaaaactaaacccattaaaaaaaaaaaaaaaaaaaaaaaacatggcggccggtttggtccaatagactttagactagggcaagcttaaaaaagaaatggggaccgccttggcaccaggcaaatttagctttgagcaggttaatgattggcgcccaaattcgggctttattggccaattgcccttataggggtcggtataacattaactggcccggggttacggtcctttgggccn

SEQ ID NO: 456105 - DNA, 1212 bp, Homo sapiens
agcgggctcgggccacgtgaggagggtgggcggggcgttaaagttcatatcccagtgtcctttgaatcgacttccttttttcttttttccggcgttcaagatgtcgaagcgaggacgtggtgggtcctctggtgcgaaattccggatttccttgggtcttccggtaggagctgtaatcaattgtgctgacaacacaggagccaaaaacctgtatatcatctccgtgaaggggatcaagggacggctgaacagacttcccgctgctggtgtgggtgacatggtgatggccacagtcaagaaaggcaaaccagagctcagaaaaaaggtacatccagcagtggtcattcgacaacgaaagtcataccgtagaaaagatggcgtgtttctttattttgaagataatgcaggagtcatagtgaacaataaaggcgagatgaaaggttctgccattacaggaccagtagcaaaggagtgtgcagacttgtggccccggattgcatccaatgctggcagcattgcatgattctccagtatatttgtaaaaaataaaaaaaaactaaacccattaaaaaaaaaaaaaaaaaaaaaaaaaaaaaaaaaaaaaaaaaaaaaaaaaaaaaaaaaaaaaaaaaaaaaaaaaagaaaaaaaaaaaaaaaaaaaaaagaaaaaaagagagagagaggggggcggcgcccctctccgctccggggggagacaaaaagagagacaccacgacgcgacaaagcaagcaaagaaggcgggagagcacacaagagcggcgcgggagctagaaaaacagggagagaaggaggggacaaggaaatagaaagcaaaaagagcagaaaggaaaaaaaacgagacgagagacaaacaaaaagaaggaggagaccaaaccacacaaaaagagggcggcggggggaaacccacagaggcggcagcaaaaacaacacaacaaaagcgacgaaaggaaaatagacgacccgcgcagggccgcagacaccagacgaaagacagaagacagggacggagcgcagacgcagcgcgggcggcgcccgaacccaaagacagaaaaaggagaaaacaaagcgaagaggaagaagacaagagcacgcagcggacgacgacaaagaacagacgagaacgcgcggacgaaagagacaaaaaacacacgaaggggacagacgagcacaagaccaagcagacgagggggg

SEQ ID NO: 456106 - DNA, 930 bp, Homo sapiens
  misc_feature (625)..(625): n is a, c, g, or t
  misc_feature (641)..(641): n is a, c, g, or t
  misc_feature (649)..(649): n is a, c, g, or t
  misc_feature (659)..(659): n is a, c, g, or t
  misc_feature (661)..(661): n is a, c, g, or t
  misc_feature (669)..(669): n is a, c, g, or t
  misc_feature (671)..(671): n is a, c, g, or t
  misc_feature (679)..(679): n is a, c, g, or t
  misc_feature (685)..(685): n is a, c, g, or t
  misc_feature (690)..(690): n is a, c, g, or t
  misc_feature (701)..(701): n is a, c, g, or t
  misc_feature (703)..(703): n is a, c, g, or t
  misc_feature (705)..(705): n is a, c, g, or t
  misc_feature (715)..(715): n is a, c, g, or t
  misc_feature (721)..(721): n is a, c, g, or t
  misc_feature (728)..(728): n is a, c, g, or t
  misc_feature (737)..(737): n is a, c, g, or t
  misc_feature (741)..(741): n is a, c, g, or t
  misc_feature (744)..(744): n is a, c, g, or t
  misc_feature (748)..(748): n is a, c, g, or t
  misc_feature (752)..(752): n is a, c, g, or t
  misc_feature (757)..(757): n is a, c, g, or t
  misc_feature (763)..(763): n is a, c, g, or t
  misc_feature (765)..(767): n is a, c, g, or t
  misc_feature (769)..(769): n is a, c, g, or t
  misc_feature (772)..(773): n is a, c, g, or t
  misc_feature (930)..(930): n is a, c, g, or t
agcgggctcgggccacgtgaggagggtgggcggggcgttaaagttcatatcccagtgtcctttgaatcgacttccttttttcttttttccggcgttcaagatgtcgaagcgaggacgtggtgggtcctctggtgcgaaattccggatttccttgggtcttccggtaggagctgtaatcaattgtgctgacaacacaggagccaaaaacctgtatatcatctccgtgaaggggatcaagggacggctgaacagacttcccgctgctggtgtgggtgacatggtgatggccacagtcaagaaaggcaaaccagagctcagaaaaaaggtacatccagcagtggtcattcgacaacgaaagtcataccgtagaaaagatggcgtgtttctttattttgaagataatgcaggagtcatagtgaacaataaaggcgagatgaaaggttctgccattacaggaccagtagcaaaggagtgtgcagacttgtggccccggattgcatccaatgctggcagcattgcatgattctccagtatatttgtaaaaaataaaaaaaaactaaacccattaaaaaaaaaaaaaaaaaaaaaaaaaaaaaaaaaaaaaaaaaaaaaaaaaaaaaaaaanaaaaaaaaaaaccttntgggccgnttgggccaantnaattttanantgggcaantttatncttgnggccgaatttngngntaattgggcnatttcnccttatngggggcggnttanaantaantggncgggntttaanannntnggnnttggaaaacccttgggtgttcccaaatttaaacgcctttgaacaaattccccttttggcaagtgtggttaatggcaaaagggcccaacgattggcttttccaaaaagtgggcaacctttatgggcaaagggaattgggcgttttttgggttcgggcn

SEQ ID NO: 456107 - DNA, 881 bp, Homo sapiens
agcgggctcgggccacgtgaggagggtgggcggggcgttaaagttcatatcccagtgtcctttgaatcgacttccttttttcttttttccggcgttcaagatgtcgaagcgaggacgtggtgggtcctctggtgcgaaattccggatttccttgggtcttccggtaggagctgtaatcaattgtgctgacaacacaggagccaaaaacctgtatatcatctccgtgaaggggatcaagggacggctgaacagacttcccgctgctggtgtgggtgacatggtgatggccacagtcaagaaaggcaaaccagagctcagaaaaaaggtacatccagcagtggtcattcgacaacgaaagtcataccgtagaaaagatggcgtgtttctttattttgaagataatgcaggagtcatagtgaacaataaaggcgagatgaaaggttctgccattacaggaccagtagcaaaggagtgtgcagacttgtggccccggattgcatccaatgctggcagcattgcatgattctccagtatatttgtaaaaaataaaaaaaaactaaacccattaaaaaaaaagaaaaaacctcggagactagttctctctctctctcctcgggagggaaggccaagggtggcaactttccttcgggtcgtcccgaatccggggtctcatccggacgaccagccggcctccaccatggccgccgaatgttcgaccccaaggagatcaaaggtcggtatacctggagggtggccccggtgagggtgaaatgtcgggtggaccattttggcctgtgggccccaaagatcgggccccctgggagtctgggtgcttcccaaaaaactgctgggtgatggccttcggccagggccagggggta

SEQ ID NO: 456108 - DNA, 599 bp, Homo sapiens
  misc_feature (577)..(577): n is a, c, g, or t
  misc_feature (590)..(590): n is a, c, g, or t
agcgggctcgggccacgtgaggagggtgggcggggcgttaaagttcatatcccagtgtcctttgaatcgacttccttttttcttttttccggcgttcaagatgtcgaagcgaggacgtggtgggtcctctggtgcgaaattccggatttccttgggtcttccggtaggagctgtaatcaattgtgctgacaacacaggagccaaaaacctgtatatcatctccgtgaaggggatcaagggacggctgaacagacttcccgctgctggtgtgggtgacatggtgatggccacagtcaagaaaggcaaaccagagctcagaaaaaaggtacatccagcagtggtcattcgacaacgaaagtcataccgtagaaaagatggcgtgtttctttattttgaagataatgcaggagtcatagtgaacaataaaggcgagatgaaaggttctgccattacaggaccagtagcaaaggagtgtgcagacttgtggccccggattgcatccaatgctggcagcattgcatgattctccagtatatttgtaaaaaataaaaaaaaactaaacccattaaaaaacccntaataaaacaaanactcaaaaa

SEQ ID NO: 456109 - DNA, 908 bp, Homo sapiens
  misc_feature (655)..(655): n is a, c, g, or t
  misc_feature (664)..(664): n is a, c, g, or t
agcgggctcgggccacgtgaggagggtgggcggggcgttaaagttcatatcccagtgtcctttgaatcgacttccttttttcttttttccggcgttcaagatgtcgaagcgaggacgtggtgggtcctctggtgcgaaattccggatttccttgggtcttccggtaggagctgtaatcaattgtgctgacaacacaggagccaaaaacctgtatatcatctccgtgaaggggatcaagggacggctgaacagacttcccgctgctggtgtgggtgacatggtgatggccacagtcaagaaaggcaaaccagagctcagaaaaaaggtacatccagcagtggtcattcgacaacgaaagtcataccgtagaaaagatggcgtgtttctttattttgaagataatgcaggagtcatagtgaacaataaaggcgagatgaaaggttctgccattacaggaccagtagcaaaggagtgtgcagacttgtggccccggattgcatccaatgctggcagcattgcatgattctccagtatatttgtaaaaaataaaaaaaaactaaacccattaaaaaaaaaaaaaaaaaaaaaaaaaaaaaaaaaaaaaaaaaaaaaaaaaaagaaaaaaaaaaaaaaaaaaaaaagggggggggggggnaaaaaaatnccccgggggggggcacaaatttgggcgccccccccatttttcgagaaaaggggggcgcccataaggaggaggcgccataataaaaagcgagacgaacgggggccgcgtaaaacacagcggcgcggcgtgggacacaccgctccgcggggggaaaccggggaaaagacccccacggggggggggcaattggggacacacccccagaaaaatagagcgggggacaaaaacacggggcatcggggac

SEQ ID NO: 456110 - DNA, 510 bp, Homo sapiens
gcggccgcctactactactaaattcgcggccgcgtcgacgagtcgaagcggacgtggtgggtcctctggtgcgaaattccggatttccttgggtcttccggtaggagctgtaatcaattgtgctgacaacacaggagccaaaaacctgtatatcatctccgtgaaggggatcaagggacggctgaacagacttcccgctgctggtgtgggtgacatggtgatggccacagtcaagaaaggcaaaccagagctcagaaaaaaggtacatccagcagtggtcattcgacaacgaaagtcataccgtagaaaagatggcgtgtttctttattttgaagataatgcaggagtcatagtgaacaataaaggcgagatgaaaggttctgccattacaggaccagtagcaaaggagtgtgcagacttgtggccccggattgcatccaatgctggcagcattgcatgattctccagtatatttgtaaaaaataaaaaaaaactaaacccattaaaaaa

SEQ ID NO: 456111 - DNA, 491 bp, Homo sapiens
gaggactctcctttaatcaagcagtcaagcggacgtggtgggtcctctggtgcgaaattccggatttccttgggtcttccggtaggagctgtaatcaattgtgctgacaacacaggagccaaaaacctgtatatcatctccgtgaaggggatcaagggacggctgaacagacttcccgctgctggtgtgggtgacatggtgatggccacagtcaagaaaggcaaaccagagctcagaaaaaaggtacatccagcagtggtcattcgacaacgaaagtcataccgtagaaaagatggcgtgtttctttattttgaagataatgcaggagtcatagtgaacaataaaggcgagatgaaaggttctgccattacaggaccagtagcaaaggagtgtgcagacttgtggccccggattgcatccaatgctggcagcattgcatgattctccagtatatttgtaaaaaataaaaaaaaactaaacccattaaaaaa

SEQ ID NO: 456112 - DNA, 2761 bp, Homo sapiens
aagcagtggtatcaacgcagagtggccattacggccggggcttttttcttttttccggcgttcaagatgtcgaagcggacgtggtgggtcctctggtgcgaaattccggatttccttgggtcttccggtaggagctgtaatcaattgtgctgacaacacaggagccaaaaacctgtatatcatctccgtgaaggggatcaagggacggctgaacagacttcccgctgctggtgtgggtgacatggtgatggccacagtcaagaaaggcaaaccagagctcagaaaaaaggtacatccagcagtggtcattcgacaacgaaagtcataccgtagaaaagatggcgtgtttctttattttgaagataatgcaggagtcatagtgaacaataaaggcgagatgaaaggttctgccattacaggaccagtagcaaaggagtgtgcagacttgtggccccggattgcatccaatgctggcagcattgcatgattctccagtatatttgtaaaaaataaaaaaaaactaaacccattaaaaaaaaagtatttgtttgcagtgcttgtctccctgttcacttccagggttcaagcgattctcctgcctcagcctcctaagtagctgggattacaggcacctgccgtcatgcctggctagtttttgtatttttggtggagacagggtttcaccatgtttgccaaacgactcaaactcctgatctcaagtgatctgcccacccaggcctctgcagtgtttttgacataccctgaccatcacttttctgaaatggaaactctgggcattttttttttaaagcaatccttgcttttttgtgagtttgcagactttcagcatcttccaattgctgtatttacaattttggcctcaaaaagtattatttgggttttgagtcccaaaaataatagtagatactgctcaatgactggctatacatggtagcttctcctggagtgaggaaggcattcaaatggctgggcgcggtagctggcacctgtaatcccaacactttcggaggccaaggcaggcagatcatgaggtcaggagttcaagaccaggctgaccaacgtggtgaaacctcctcttttctaaaaatacaaaaattagctgggcgtggtggcgcaccgcctgtaatctcagctactgagagaatcgcttgaacctgggaggtggagtttgcagcgagtcgagattgcaccattgtactccatccagcctgggcaacggagcaagattccgttcccgcccccgccccaaaaaaaggcattgaagttaagatagactatatagttagatcctggacacacacatggattttgaggaatgatgtgagtttgtttatgtatgtacattttagcagttaacaggtttggagtaaattgaatatttataaaacaacagtaattgccatgtaggtttactgtcatagtggaagatgattaagttgatggtacctacaggtattttgctatgaaaatgttttgacaaacaggatgatcgtgtaatttatgttccaagctctagtttgagaatggaagaatgtggtaaatttttgccaactgaacaggcataaagcgctgataataagggacttggccttaaggtaggaggttgttagcatttctttctaaacgtgtaagagtttatttaggtgacacccagcgttttggaaaaatgggtgtttgtttagaacaataatttggagggaagtggactaaacagggtttttagattaaggtttgtgtttatgtatctgtatctgcaaatactcagccataaatgtttctacctgtaagttgggtataatacaagctccacttggtatcaaaaaggactacccttagtgtcttccatgactagttatggaatgtaccagacctagagaggagttgttctaacctggagcttttgaaaatgtttccggtccataccctagaccaattaagtcagactgcagaataggactcagacatcagaattgtgaagctcccaggagatgtcaaggtatacccaagactgagaaccagtaccctgtctagactgaaccaggcttggttttagaagtattaaatctcacctgggtacggtggctcacacctataatcccagcactttgggaggctgaggtgggtggatcatctgaggtcaggagagtgagaccagcctgtccaacatgttgaaaccccatctctactatacaaaattagccaggcatggtggtgcatgctgtaatcccagctacttgggaggctgaggcaggagaattgcttgaaccccggagatggaggttgcagtgagctgaggtcgcacgattgtgctccagcctgggcaaccagtgaaactctggggggaaagaaaaaaaatgtattaaatctctagttttagagagttacaccataacatccctgagtatggtcaatttcaagtcagctttagtgtgacaagcccctaggcccaccatttatgtctttatatattatggcaatatatgatccttatatattaaccactaatcgctgctgtttttgaatgttatcttttctgaggcagtcttgctctgtcacacaggctggagtgcagtaacaccactgaagctcactgtaactttgaactgctggacttggaatcctcctgctgtggccttcaaagggctgcaattacaagtgtgagccactgcatcccacctcacattttattctttggagattttttttgacttggattaaaaaactttatatttacacttca

SEQ ID NO: 456113 - DNA, 573 bp, Homo sapiens
  misc_feature (545)..(545): n is a, c, g, or t
aagcagtggtatcaacgcagagtggccattacggccggggcttttttcttttttccggcgttcaagatgtcgaagcggacgtggtgggtcctctggtgcgaaattccggatttccttgggtcttccggtaggagctgtaatcaattgtgctgacaacacaggagccaaaaacctgtatatcatctccgtgaaggggatcaagggacggctgaacagacttcccgctgctggtgtgggtgacatggtgatggccacagtcaagaaaggcaaaccagagctcagaaaaaaggtacatccagcagtggtcattcgacaacgaaagtcataccgtagaaaagatggcgtgtttctttattttgaagataatgcaggagtcatagtgaacaataaaggcgagatgaaaggttctgccattacaggaccagtagcaaaggagtgtgcagacttgtggccccggattgcatccaatgctggcagcattgcatgattctccagtatatttgtaaaaaataaaaaaaaactaaacccattaaaaaaaaaaaaanaacacaagaaacaaaaaaaaaaaatgtg

SEQ ID NO: 456114 - DNA, 2730 bp, Homo sapiens
ctgtggccatcaccatgtcacccacaccagcagcgggaagtctgttcagccgttccttttttcttttttccggcgttcaagatgtcgaagcgaggacgtggtgggtcctctggtgcgaaattccggatttccttgggtcttccggtaggagctgtaatcaattgtgctgacaacacaggagccaaaaacctgtatatcatctccgtgaaggggatcaagggacggctgaacagacttcccgctgctggtgtgggtgacatggtgatggccacagtcaagaaaggcaaaccagagctcagaaaaaaggtacatccagcagtggtcattcgacaacgaaagtcataccgtagaaaagatggcgtgtttctttattttgaagataatgcaggagtcatagtgaacaataaaggcgagatgaaagcccggattgcatccaatgctggcagcattgcatgattctccagtatatttgtaaaaaataaaaaaaaactaaacccattaaaaaaaaagtatttgtttgcagtgcttgtctccctgttcacttccagggttcaagcgattctcctgcctcagcctcctaagtagctgggattacaggcacctgccgtcatgcctggctagtttttgtatttttggtggagacagggtttcaccatgtttgccaaacgactcaaactcctgatctcaagtgatctgcccacccaggcctctgcagtgtttttgacataccctgaccatcacttttctgaaatggaaactctgggcattttttttttaaagcaatccttgcttttttgtgagtttgcagactttcagcatcttccaattgctgtatttacaattttggcctcaaaaagtattatttgggttttgagtcccaaaaataatagtagatactgctcaatgactggctatacatggtagcttctcctggagtgaggaaggcattcaaatggctgggcgcggtagctggcacctgtaatcccaacactttcggaggccaaggcaggcagatcatgaggtcaggagttcaagaccaggctgaccaacgtggtgaaacctcctcttttctaaaaatacaaaaattagctgggcgtggtggcgcaccgcctgtaatctcagctactgagagaatcgcttgaacctgggaggtggagtttgcagcgagtcgagattgcaccattgtactccatccagcctgggcaacggagcaagattccgttcccgcccccgccccaaaaaaaggcattgaagttaagatagactatatagttagatcctggacacacacatggattttgaggaatgatgtgagtttgtttatgtatgtacattttagcagttaacaggtttggagtaaattgaatatttataaaacaacagtaattgccatgtaggtttactgtcatagtggaagatgattaagttgatggtacctacaggtattttgctatgaaaatgttttgacaaacaggatgatcgtgtaatttatgttccaagctctagtttgagaatggaagaatgtggtaaatttttgccaactgaacaggcataaagcgctgataataagggacttggccttaaggtaggaggttgttagcatttctttctaaacgtgtaagagtttatttaggtgacacccagcgttttggaaaaatgggtgtttgtttagaacaataatttggagggaagtggactaaacagggtttttagattaaggtttgtgtttatgtatctgtatctgcaaatactcagccataaatgtttctacctgtaagttgggtataatacaagctccacttggtatcaaaaaggactacccttagtgtcttccatgactagttatggaatgtaccagacctagagaggagttgttctaacctggagcttttgaaaatgtttccggtccataccctagaccaattaagtcagactgcagaataggactcagacatcagaattgtgaagctcccaggagatgtcaaggtatacccaagactgagaaccagtaccctgtctagactgaaccaggcttggttttagaagtattaaatctcacctgggtacggtggctcacacctataatcccagcactttgggaggctgaggtgggtggatcatctgaggtcaggagagtgagaccagcctgtccaacatgttgaaaccccatctctactatacaaaattagccaggcatggtggtgcatgctgtaatcccagctacttgggaggctgaggcaggagaattgcttgaaccccggagatggaggttgcagtgagctgaggtcgcacgattgtgctccagcctgggcaaccagtgaaactctggggggaaagaaaaaaaatgtattaaatctctagttttagagagttacaccataacatccctgagtatggtcaatttcaagtcagctttagtgtgacaagcccctaggcccaccatttatgtctttatatattatggcaatatatgatccttatatattaaccactaatcgctgctgtttttgaatgttatcttttctgaggcagtcttgctctgtcacacaggctggagtgcagtaacaccactgaagctcactgtaactttgaactgctggacttggaatcctcctgctgtggccttcaaagggctgcaattacaagtgtgagccactgcatcccacctcacattttattctttggagattttttttgacttggattaaaaaactttatatttacacttca

SEQ ID NO: 456115 - DNA, 448 bp, Homo sapiens
aaccaaggccttgtatgccacgccttatgaagcactgtttcacagttactttcacttcccgaataaaggttaccaggtaattaataaaaaaaaaaaaagtgaaggggatcaagggacggctgaacagacttcccgctgctggtgtgggtgacatggtgatggccacagtcaagaaaggcaaaccagagctcagaaaaaaggtacatccagcagtggtcattcgacaacgaaagtcataccgtagaaaagatggcgtgtttctttattttgaagataatgcaggagtcatagtgaacaataaaggcgagatgaaaggttctgccattacaggaccagtagcaaaggagtgtgcagacttgtggccccggattgcatccaatgctggcagcattgcatgattctccagtatatttgtaaaaaataaaaaaaaactaaacccattaaaaaa

SEQ ID NO: 456116 - DNA, 2684 bp, Homo sapiens
ctgtggccatcaccatgtcacccacaccagcagcgggaagtctgttcagccgttccttttttcttttttccggcgttcaagatgtcgaagcgaggacgtggtgggtcctctggtgcgaaattccggatttccttgggtcttccggtaggagctgtaatcaattgtgctgacaacacaggagccaaaaacctgtatatcatctccgtgaaggggatcaagggacggctgaacagacttcccgctgctggtgtgggtgacatggtgatggccacagtcaagaaaggcaaaccagagctcagaaaaaaggggtgagtaaacactgagcccaccttaatactgatgagtagtggggggacgctttcctttattggaaaatggatcagttttcaaggcctcaagtttgttttccattgagaggcagtgtgagataagtatcttaagtttttgctcatattgtgttggaggggggaccatcatcttgtcacttccataccttagttgtttttttgttgttgtttttgttttgttttgttttgttttttgagatggagtctctctctgtcgcccagcccatactggagtgcaatggcacgatcttggctcactgcaacctccgcctcctgggctctcaaaaaaaaatatattacaaaacgaaaacaagctgcccgttgcttattttattatttgtttttgagatggagtctcacttgttgcccaggctggagtgcagtggcacatatctgttcactgcaacctccacctcccgggctcaagagattgtcctgcctcagcctcccgagtagctgggatcataggtgtgcaccaccacacccggctaattgctcattacttaatctcaggctccccactcaaaatttttcctgtcaggtgtatgatttaaagggggaggcctcaaaatacttgcagcttgtgtcctgtctggctttagaacttctggtgtttggtgcattttaacttcagcgcttgcacttttttcctgtgcctgcctaatctgtctctaccctgggatgtcttgctcttctaaagagttcctggccatcccttgatttacaaatgtgatgttgatttgtcagccctgtattacagttactcctattcctgtatccaccccacgatgctgtccagtagatttttagcctttgggttagaaattgttttttgttcaccattaatatccatttgagggctgggtagcactgtgattgtgattcagcaattgcatgggctttttcctcttctcagaacacttcctgggtctgattggtggcccagggagctgtcagagaagagcagagcaaatggccttcactttgtagatgagatggcaggagggtggattgttggtctcagtcagtggtgggacagaccagagctccgaacacttcagttttaaaactagttgtgagtttccaattctgttaatgtcttttttggtccttgtttctgctaaatgaatacatcccctccccttggaacttaatatcaataaataacaagcacagaaatatgcaaaaggaccaggtctacttgaagaatttgtgaggattaaatggtttatgagtagaggagggtcagtcagtaagtattggctacctcatgtgtgtcccattactaacttggttagacttatctattttttgtgtagtcttcctgtcataaaaattctgtgtaaggaccccatgctagtatcagtgaagattgtgaatccaggtgtgtctgactctacaatagttcttcacaagcattatatttcactgtgtagtgatacttcattttgaaagttgggaaaagcgtctttttcactttagtacagatgggtataaaagttacttaggacactagaaaacagttcattaaaagtaaaacaaagcctggtgcttgggcccaggaattcaaactgttttccagtgtaaatctgaatagcttggtctctgctcattgccaggactgggaggagttgggggtcccaggtcccatttctacatcccaattcagtgatactgggatcttaataacctacctgtgaggtgaagttggaaaaggcataggcaaggatagttgtcctgagagttttacacttgtgagaaaatactggcagctttgattttaagatgtgaatagatgatcgtggttcatgcctatactccctatactcccagcactttgggaggccaggcttgccaacatggcaaaaccctgtctctatgaaaaaaaaaaaaaaatctgggcatggtagtgtgcacctgtagtccaagatactagagaggctgaggtgggaggatcaccttgaagattgatatttacactgtcactgtctcaaacgctgagtgtacattctgtctagttggaaactgcttttgtggtggcactgcgacttgacaggttaatgactgctgtccttttttcttctctcagttacatccagcagtggtcattcgacaacgaaagtcataccgtagaaaagatggcgtgtttctttattttgaagataatgcaggagtcatagtgaacaataaaggcgagatgaaaggttctgccattacaggaccagtagcaaaggagtgtgcagacttgtggccccggattgcatccaatgctggcagcattgcatgattctccagtatatttgtaaaaaataaaaaaaaactaaacccattaaaaaa

SEQ ID NO: 456117 - DNA, 486 bp, Homo sapiens
ctgtggccatcaccatgtcacccacaccagcagcgggaagtctgttcagccgttccttttttcttttttccggcgttcaagatgtcgaagcgaggacgtggtgggtcctctggtgcgaaattccggatttccttgggtcttccggtaggagctgtaatcaattgtgctgacaacacaggagccaaaaacctgtatatcatctccgtgaaggggatcaagggacggctgaacagacttcccgctgctggtgtgggtgacatggtgatggccacagtcaagaaaggcaaaccagagctcagaaaaaaggtacatccagcagtggtcattcgacaacgaaagtcataccgtagaaagttctgccattacaggaccagtagcaaaggagtgtgcagacttgtggccccggattgcatccaatgctggcagcattgcatgattctccagtatatttgtaaaaaataaaaaaaaactaaacccattaaaaaa

SEQ ID NO: 456118 - DNA, 404 bp, Homo sapiens
ctgtggccatcaccatgtcacccacaccagcagcgggaagtctgttcagccgttccttttttcttttttccggcgttcaagatgtcgaagcgaggacgtggtgggtcctctggtgcgaaattccggatttccttgggtcttccggtaggagctgtaatcaattgtgctgacaacacaggagccaaaaacctgtatatcatctccgtgaaggggatcaagggacggctgaacagacttcccgctgctggtgtgggtgacatggtgatggccacagtcaagaaaggcaaaccagagctcagaaaaaaggtacatccagcagtggtcattcgacaacgaaagtcataccgtagaaagaagaagaaaatgatccggatcattttcttcttccggaagaagaaaatgat

SEQ ID NO: 456119 - DNA, 339 bp, Homo sapiens
acaaatatactggagaattatgcaatgctgccagcattggatgcagtccggggccacagtcaagaaaggcaaaccagagctcagaaaaaaggtacatccagcagtggtcattcgacaacgaaagtcataccgtagaaaagatggcgtgtttctttattttgaagataatgcaggagtcatagtgaacaataaaggcgagatgaaaggttctgccattacaggaccagtagcaaaggagtgtgcagacttgtggccccggattgcatccaatgctggcagcattgcatgattctccagtatatttgtaaaaaataaaaaaaaactaaacccattaaaaaa

SEQ ID NO: 456120 - DNA, 1864 bp, Homo sapiens
cttttgcaggaattagtactgaaattaatattaatcaatggcaaggaagaccagagcagaggatagtcctgtgacaaatggtcacaagcttctcccagctgtgaaatgtctttccttcataagtgactatttccattccctttcatgtatttgccttgtctggaagactttgattatgtgcttcttaggacacatataaagtccttactttgtatttggggcccagagaagtttagcaatttgcttaagctcacatagctagttagcagcagagctgggcctaaaatcttggaccatttccaaatccagtgtttgctttactgtatcacactgtgcaacgcttgtgttgatcactgtgagtacttaatatactagatttctaacagcagcctatttgcttctgattgccgactagttcacttcaattcatatttatcttaactgaaaaccactccttctgacggctcgtctgttgtctatagaaaatgagttggtgggctcattctagccctgttggacagccgaacccatcacaacaaatcaatgccaaaaatggcatttcaagaggaaaacatagcatttatttagtacccccaacagagtagctcaaagtgatttgaaaatgtctcattaatcctcataacacccctgtgggataataataatattattataacgtttaggcgtagaactgtggcaaagccaacagcttctctgagcatgtgcaggatttcctcatatttcagtctgcaatactagagcctgactaaaaccgtcaggtttgcaaacagcaagggtaaataaatcttggtgtttggcctttctgtgttgctctaggcatagtttgtgtttcctactgaccacatcaatcccagaaatagttcaccagttgtttgccagatggtaagcagcatttaggattagctcagaagtgtttgagagtgggacaaggcagggctagaggtcctgatccacaattacagataaatgaatggagaaatagcacctagtaacagtgtaaaagcgttcctatttctccacatcctctccagcatctgttgttttctgactttttaatgatcgccattctaactggcatgagatggtatctcattgtggttttgatttgcatttctctaatgaccagtgatggtgagctttttttcatgtttgttggctgcataaatgtcttcttttgagaggtgtctgttcatatccttcacccgctttttgatgggattgtttttttcttgtaaatttgtttaagttccttgcagattctggatattaaccctttgtcagatggatagatggcaaaaattttctcccattctgtaggttgtctgttcactctgatgatagtttcttttgctgtgcagaagctctttagtttaattaggccctatttgtcaattttggcttttgttcgcattgcttttactcatgcagtctttgcccatgcctatgtcctaaatggtattgcctaggttttcttctagggtttttatggttttaggttttacgtttaagtctttaatccatcttgagttaatttttgtatactgtataaggaaggggtccagtttcagttttctgcatatggctagccagttttcctacatccagcagtggtcattcgacaacgaaagtcataccgtagaaaagatggcgtgtttctttattttgaagataatgcaggagtcatagtgaacaataaaggcgagatgaaaggttctgccattacaggaccagtagcaaaggagtgtgcagacttgtggccccggattgcatccaatgctggcagcattgcatgattctccagtatatttgtaaaaaataaaaaaaaactaaacccattaaaaaa

SEQ ID NO: 456121 - DNA, 434 bp, Homo sapiens
caaatatttattgatgttaaatccacattacaccagcacaacaatccaaagtagtatgattgattgatagtacttttttttttataaatacaatataaaggtggcaaaataatgctagttaatcccaaacccagcaaatcagcaaaaaaaggtcacattcagaaaaatttggcaagtaagacataagtacatccagcagtggtcattcgacaacgaaagtcataccgtagaaaagatggcgtgtttctttattttgaagataatgcaggagtcatagtgaacaataaaggcgagatgaaaggttctgccattacaggaccagtagcaaaggagtgtgcagacttgtggccccggattgcatccaatgctggcagcattgcatgattctccagtatatttgtaaaaaataaaaaaaaactaaacccattaaaaaa

SEQ ID NO: 456122 - DNA, 298 bp, Homo sapiens
aggcttgcccatggtgtcagactaaaggcaaaccagagctcagaaaaaaggtacatccagcagtggtcattcgacaacgaaagtcataccgtagaaaagatggcgtgtttctttattttgaagataatgcaggagtcatagtgaacaataaaggcgagatgaaaggttctgccattacaggaccagtagcaaaggagtgtgcagacttgtggccccggattgcatccaatgctggcagcattgcatgattctccagtatatttgtaaaaaataaaaaaaaactaaacccattaaaaaa

SEQ ID NO: 456123 - DNA, 398 bp, Homo sapiens
  misc_feature (346)..(346): n is a, c, g, or t
ctgtggccatcaccatgtcacccacaccagcagcgggaagtctgttcagccgttccttttttcttttttccggcgttcaagatgtcgaagcgaggacgtggtgggtcctctggtgcgaaattccggatttccttgggtcttccggtaggagctgtaatcaattgtgctgacaacacaggagccaaaaacctgtatatcatctccgtgaaggggatcaagggacggctgaacagacttcccgctgctggtgtgggtgacatggtgatggccacagtcaagaaaggcaaaccagagctcagaaaaaaggggtacattcagcagtgtcattcgcaacgaagtcattccntgaaagatgcgtgtttcttattttgaggtatttggggcatgtttcaattggc

SEQ ID NO: 456124 - DNA, 2584 bp, Homo sapiens
  misc_feature (185)..(185): n is a, c, g, or t
  misc_feature (187)..(187): n is a, c, g, or t
  misc_feature (190)..(190): n is a, c, g, or t
ggctgagctcaacacaggaggaagtgcatcagctgagaagaggcatcgagaaactgagagttcgcattgaggccgatgaaaagaagcagctgcacatcgcagagaaactgaaagaacgcgagcgggagaatgattcacttaaggataaagttgagaaccttgaaagggaattgcagatgtcagangnaanccaggagtcatagtgaacaataaaggcgagatgaaaggttctgccattacaggaccagtagcaaaggagtgtgcagacttgtggccccggattgcatccaatgctggcagcattgcatgattctccagtatatttgtaaaaaataaaaaaaaactaaacccattaaaaaaaaagtatttgtttgcagtgcttgtctccctgttcacttccagggttcaagcgattctcctgcctcagcctcctaagtagctgggattacaggcacctgccgtcatgcctggctagtttttgtatttttggtggagacagggtttcaccatgtttgccaaacgactcaaactcctgatctcaagtgatctgcccacccaggcctctgcagtgtttttgacataccctgaccatcacttttctgaaatggaaactctgggcattttttttttaaagcaatccttgcttttttgtgagtttgcagactttcagcatcttccaattgctgtatttacaattttggcctcaaaaagtattatttgggttttgagtcccaaaaataatagtagatactgctcaatgactggctatacatggtagcttctcctggagtgaggaaggcattcaaatggctgggcgcggtagctggcacctgtaatcccaacactttcggaggccaaggcaggcagatcatgaggtcaggagttcaagaccaggctgaccaacgtggtgaaacctcctcttttctaaaaatacaaaaattagctgggcgtggtggcgcaccgcctgtaatctcagctactgagagaatcgcttgaacctgggaggtggagtttgcagcgagtcgagattgcaccattgtactccatccagcctgggcaacggagcaagattccgttcccgcccccgccccaaaaaaaggcattgaagttaagatagactatatagttagatcctggacacacacatggattttgaggaatgatgtgagtttgtttatgtatgtacattttagcagttaacaggtttggagtaaattgaatatttataaaacaacagtaattgccatgtaggtttactgtcatagtggaagatgattaagttgatggtacctacaggtattttgctatgaaaatgttttgacaaacaggatgatcgtgtaatttatgttccaagctctagtttgagaatggaagaatgtggtaaatttttgccaactgaacaggcataaagcgctgataataagggacttggccttaaggtaggaggttgttagcatttctttctaaacgtgtaagagtttatttaggtgacacccagcgttttggaaaaatgggtgtttgtttagaacaataatttggagggaagtggactaaacagggtttttagattaaggtttgtgtttatgtatctgtatctgcaaatactcagccataaatgtttctacctgtaagttgggtataatacaagctccacttggtatcaaaaaggactacccttagtgtcttccatgactagttatggaatgtaccagacctagagaggagttgttctaacctggagcttttgaaaatgtttccggtccataccctagaccaattaagtcagactgcagaataggactcagacatcagaattgtgaagctcccaggagatgtcaaggtatacccaagactgagaaccagtaccctgtctagactgaaccaggcttggttttagaagtattaaatctcacctgggtacggtggctcacacctataatcccagcactttgggaggctgaggtgggtggatcatctgaggtcaggagagtgagaccagcctgtccaacatgttgaaaccccatctctactatacaaaattagccaggcatggtggtgcatgctgtaatcccagctacttgggaggctgaggcaggagaattgcttgaaccccggagatggaggttgcagtgagctgaggtcgcacgattgtgctccagcctgggcaaccagtgaaactctggggggaaagaaaaaaaatgtattaaatctctagttttagagagttacaccataacatccctgagtatggtcaatttcaagtcagctttagtgtgacaagcccctaggcccaccatttatgtctttatatattatggcaatatatgatccttatatattaaccactaatcgctgctgtttttgaatgttatcttttctgaggcagtcttgctctgtcacacaggctggagtgcagtaacaccactgaagctcactgtaactttgaactgctggacttggaatcctcctgctgtggccttcaaagggctgcaattacaagtgtgagccactgcatcccacctcacattttattctttggagattttttttgacttggattaaaaaactttatatttacacttca

SEQ ID NO: 456125 - DNA, 573 bp, Homo sapiens
agcgggctcgggccacgtgaggagggtgggcggggcgttaaagttcatatcccagtgtcctttgaatcgacttccttttttcttttttccggcgttcaagatgtcgaagcgaggacgtggtgggtcctctggtgcgaaattccggatttccttgggtcttccggtaggagctgtaatcaattgtgctgacaacacaggagccaaaaacctgtatatcatctccgtgaaggggatcaagggacggctgaacagacttcccgctgctggtgtgggtgacatggtgatggccacagtcaagaaaggcaaaccagagctcagaaaaaaggtacatccagcagtggtcattcgacaacgaaagtcataccgtagaaaagatggcgtgtttctttattttgaagataatgcaggagtcatagtgaacaataaaggcgagatgaaaggttctgccattacaggaccagtagcaaaggagtgtgcagacttgtggccccggattgcatccaatgctggcagcattgcatgattctccagtatatttgtaaaaaataaaaaaaaactaaacccattaaaaaa

SEQ ID NO: 456126 - DNA, 537 bp, Homo sapiens
aagcagtggtatcaacgcagagtggccattacggccggggcttttttcttttttccggcgttcaagatgtcgaagcggacgtggtgggtcctctggtgcgaaattccggatttccttgggtcttccggtaggagctgtaatcaattgtgctgacaacacaggagccaaaaacctgtatatcatctccgtgaaggggatcaagggacggctgaacagacttcccgctgctggtgtgggtgacatggtgatggccacagtcaagaaaggcaaaccagagctcagaaaaaaggtacatccagcagtggtcattcgacaacgaaagtcataccgtagaaaagatggcgtgtttctttattttgaagataatgcaggagtcatagtgaacaataaaggcgagatgaaaggttctgccattacaggaccagtagcaaaggagtgtgcagacttgtggccccggattgcatccaatgctggcagcattgcatgattctccagtatatttgtaaaaaataaaaaaaaactaaacccattaaaaaa

SEQ ID NO: 456127 - DNA, 493 bp, Homo sapiens
cccacgcgtccgcggacgcgtggggtcgaagcggacgtggtgggtcctctggtgcgaaattccggatttccttgggtcttccggtaggagctgtaatcaattgtgctgacaacacaggagccaaaaacctgtatatcatctccgtgaaggggatcaagggacggctgaacagacttcccgctgctggtgtgggtgacatggtgatggccacagtcaagaaaggcaaaccagagctcagaaaaaaggtacatccagcagtggtcattcgacaacgaaagtcataccgtagaaaagatggcgtgtttctttattttgaagataatgcaggagtcatagtgaacaataaaggcgagatgaaaggttctgccattacaggaccagtagcaaaggagtgtgcagacttgtggccccggattgcatccaatgctggcagcattgcatgattctccagtatatttgtaaaaaataaaaaaaaactaaacccattaaaaaa

SEQ ID NO: 456128 - DNA, 830 bp, Homo sapiens
  misc_feature (27)..(27): n is a, c, g, or t
  misc_feature (31)..(31): n is a, c, g, or t
  misc_feature (33)..(34): n is a, c, g, or t
  misc_feature (38)..(38): n is a, c, g, or t
cgaccacgcgtcgcggacgcgtgggtngacncnngcgnccgacgtggtgggtcctctggtgcgaaattccggatttccttgggtcttccggtaggagctgtaatcaattgtgctgacaacacaggagccaaaaacctgtatatcatctccgtgaaggggatcaagggacggctgaacagacttcccgctgctggtgtgggtgacatggtgatggccacagtcaagaaaggcaaaccagagctcagaaaaaaggtacatccagcagtggtcattcgacaacgaaagtcataccgtagaaaagatggcgtgtttctttattttgaagataatgcaggagtcatagtgaacaataaaggcgagatgaaaggttctgccattacaggaccagtagcaaaggagtgtgcagacttgtggccccggattgcatccaatgctggcagcattgcatgattctccagtatatttgtaaaaaataaaaaaaaactaaacccattaaaaaacaaaacacacaccaccccccccacacaccccccacccaccccccccccacccccccccacccccagcagacaaccgagtagcaccaagacaccacaacgggggggcccgcccccacccgccccccgccgggcaacccggcccacaccaccaccagagccaccggcgcccaagcgcgggcaccagaagagcggccgtcccaaccaacgaccgcggcaaacccgcccgcacctccgagcaaccaccctggggcccaccccacccacccagaaggcgcgcgcaacaacacccggcgtgcccacacaccggacacccggatcaaaatacgccgg

SEQ ID NO: 456129 - DNA, 400 bp, Homo sapiens
gcggccgcctactactactaaattcgcggccgcgtcgacgagtcgaagcggtgaaggggatcaagggacggctgaacagacttcccgctgctggtgtgggtgacatggtgatggccacagtcaagaaaggcaaaccagagctcagaaaaaaggtacatccagcagtggtcattcgacaacgaaagtcataccgtagaaaagatggcgtgtttctttattttgaagataatgcaggagtcatagtgaacaataaaggcgagatgaaaggttctgccattacaggaccagtagcaaaggagtgtgcagacttgtggccccggattgcatccaatgctggcagcattgcatgattctccagtatatttgtaaaaaataaaaaaaaactaaacccattaaaaaa

SEQ ID NO: 456130 - DNA, 675 bp, Homo sapiens
  misc_feature (185)..(185): n is a, c, g, or t
  misc_feature (187)..(187): n is a, c, g, or t
  misc_feature (190)..(190): n is a, c, g, or t
  misc_feature (367)..(367): n is a, c, g, or t
  misc_feature (675)..(675): n is a, c, g, or t
ggctgagctcaacacaggaggaagtgcatcagctgagaagaggcatcgagaaactgagagttcgcattgaggccgatgaaaagaagcagctgcacatcgcagagaaactgaaagaacgcgagcgggagaatgattcacttaaggataaagttgagaaccttgaaagggaattgcagatgtcagangnaanccaggagtcatagtgaacaataaaggcgagatgaaaggttctgccattacaggaccagtagcaaaggagtgtgcagacttgtggccccggattgcatccaatgctggcagcattgcatgattctccagtatatttgtaaaaaataaaaaaaaactaaacccattaaaaaaaaaaaanaaaaaaaaacaacaaaaacagaacagaaaaaaaaaaaaaaaaaaaaaaaaaaaaagcaaaaaaaaaaacaaaccagcaaaagaaaaaaaaagaaaaaaaaaaaaaaaaaaaaacatggcggccggtttggtccaatagactttagactagggcaagcttaaaaaagaaatggggaccgccttggcaccaggcaaatttagctttgagcaggttaatgattggcgcccaaattcgggctttattggccaattgcccttataggggtcggtataacattaactggcccggggttacggtcctttgggccn

SEQ ID NO: 456131 - DNA, 1034 bp, Homo sapiens
agcgggctcgggccacgtgaggagggtgggcggggcgttaaagttcatatcccagtgtcctttgaatcgacttccttttttcttttttccggcgttcaagatgtcgaagcgaggacgtggtgggtcctctggtgcgaaattccggatttccttgggtcttccggtaggagctgtaatcaattgtgctgacaacacaggagccaaaaacctgtatatcatctccgtgaaggggatcaagggacggctgaacagacttcccgctgctggtgtgggtgacatggtgatggccacagtcaagaaaggcaaaccagagctcagaaaaaaggtacatccagcagtggtcattcgacaacgaaagtcataccgtagaaaagatggcgtgtttctttattttgaagataatgcaggagtcatagtgaacaataaaggcgagatgaaaggttctgccattacaggaccagtagcaaaggagtgtgcagacttgtggccccggattgcatccaatgctggcagcattgcatgattctccagtatatttgtaaaaaataaaaaaaaactaaacccattaaaaaaaaaaaaaaaaaaaaagatcgggggatttaatgggggggggggaaaagggggtaggaaatgtggcacatgtggccacgaggttcccggaacccgagtgtcttgctaccagggggaaaatcggcgggatccccaaagaggagaacgcgatataaatgcggaaagagcagggttaacccgggttaagaagcgggcacaactagagagaaagagagagagaaagcaacgacaaagcacgcagcgagaacaaacgagcaagagggacgcaacgacaacagtagaaaacaacaacaggaagagagaaaggagaaagacacaaaacgaatagacaacaacaaagaaagaaacaggagacgcgcaaagaaagaagaaagaagaagacgaaagaaaagagaagaagggggaggaaagaaaaagggaagggggaaaacagagggaagagaaaaggcggagaagagcggagt

SEQ ID NO: 456132 - DNA, 796 bp, Homo sapiens
agcgggctcgggccacgtgaggagggtgggcggggcgttaaagttcatatcccagtgtcctttgaatcgacttccttttttcttttttccggcgttcaagatgtcgaagcgaggacgtggtgggtcctctggtgcgaaattccggatttccttgggtcttccggtaggagctgtaatcaattgtgctgacaacacaggagccaaaaacctgtatatcatctccgtgaaggggatcaagggacggctgaacagacttcccgctgctggtgtgggtgacatggtgatggccacagtcaagaaaggcaaaccagagctcagaaaaaaggtacatccagcagtggtcattcgacaacgaaagtcataccgtagaaaagatggcgtgtttctttattttgaagataatgcaggagtcatagtgaacaataaaggcgagatgaaaggttctgccattacaggaccagtagcaaaggagtgtgcagacttgtggccccggattgcatccaatgctggcagcattgcatgattctccagtatatttgtaaaaaataaaaaaaaactaaacccattaaaaaaaaaaaaaaaaaaaaaaaaaaaaaaaaaaaaaaaaaaaaaaaaaaaaaaaaaaaaaaaaaaaaaaaaaaaaaaaactctaggaggggccctttccccaattccccttatagggggtggttaaatttacctggccgcggtttaaaacgtgcgattgggaaacctctgcgttcccaacttgaacgctcttggagaaatcccccttttggcagtgtggcgaataaca

SEQ ID NO: 456133 - DNA, 914 bp, Homo sapiens
  misc_feature (611)..(611): n is a, c, g, or t
  misc_feature (629)..(629): n is a, c, g, or t
  misc_feature (648)..(648): n is a, c, g, or t
  misc_feature (650)..(650): n is a, c, g, or t
  misc_feature (654)..(654): n is a, c, g, or t
  misc_feature (660)..(660): n is a, c, g, or t
  misc_feature (665)..(665): n is a, c, g, or t
  misc_feature (667)..(667): n is a, c, g, or t
  misc_feature (675)..(676): n is a, c, g, or t
  misc_feature (679)..(679): n is a, c, g, or t
  misc_feature (684)..(684): n is a, c, g, or t
  misc_feature (697)..(697): n is a, c, g, or t
  misc_feature (700)..(700): n is a, c, g, or t
agcgggctcgggccacgtgaggagggtgggcggggcgttaaagttcatatcccagtgtcctttgaatcgacttccttttttcttttttccggcgttcaagatgtcgaagcgaggacgtggtgggtcctctggtgcgaaattccggatttccttgggtcttccggtaggagctgtaatcaattgtgctgacaacacaggagccaaaaacctgtatatcatctccgtgaaggggatcaagggacggctgaacagacttcccgctgctggtgtgggtgacatggtgatggccacagtcaagaaaggcaaaccagagctcagaaaaaaggtacatccagcagtggtcattcgacaacgaaagtcataccgtagaaaagatggcgtgtttctttattttgaagataatgcaggagtcatagtgaacaataaaggcgagatgaaaggttctgccattacaggaccagtagcaaaggagtgtgcagacttgtggccccggattgcatccaatgctggcagcattgcatgattctccagtatatttgtaaaaaataaaaaaaaactaaacccattaaaaaaaaaaaaaaaaaaaaaaaaaaaaaaaaaaaaaaaaaaangggggggggggtaaaaantttcccccggggggggccnangttnacgggntaccncnggtttttnnttnacaangggggcccataanggngagcgaggtttattaagagaggacgaggggccgcggtaaaaaagcgtgggtagtgggtacaacgtgctacgttgggcatcttggggaaggaactctacttgggggggtggaccattaggggccacccccaaggaaatttaagggcctagggaatattaacatgacggtatgtggaacacgggatttgtggggaagttggcaggtattttacatt

SEQ ID NO: 456134 - DNA, 863 bp, Homo sapiens
agcgggctcgggccacgtgaggagggtgggcggggcgttaaagttcatatcccagtgtcctttgaatcgacttccttttttcttttttccggcgttcaagatgtcgaagcgaggacgtggtgggtcctctggtgcgaaattccggatttccttgggtcttccggtaggagctgtaatcaattgtgctgacaacacaggagccaaaaacctgtatatcatctccgtgaaggggatcaagggacggctgaacagacttcccgctgctggtgtgggtgacatggtgatggccacagtcaagaaaggcaaaccagagctcagaaaaaaggtacatccagcagtggtcattcgacaacgaaagtcataccgtagaaaagatggcgtgtttctttattttgaagataatgcaggagtcatagtgaacaataaaggcgagatgaaaggttctgccattacaggaccagtagcaaaggagtgtgcagacttgtggccccggattgcatccaatgctggcagcattgcatgattctccagtatatttgtaaaaaataaaaaaaaactaaacccattaaaaaaaaaaaaaacaaaaataatcaaaattaatttaacaccattatttaactatatacttaatattacccttcattattactagactttttagcactaccctgtgctatctttcctcctaaacgacaacaaataaccaaattaattggggggtggcgccgaacccaaattcccttaataagggggtctatatcaaaataagacggccgtgtttaacataccgtttcttgaggaaaacctggagttcaacaaatttatggccagtgggaaaatccacttttgcaatggtgggttat

SEQ ID NO: 456135 - DNA, 1033 bp, Homo sapiens
  misc_feature (583)..(583): n is a, c, g, or t
  misc_feature (587)..(587): n is a, c, g, or t
  misc_feature (591)..(591): n is a, c, g, or t
  misc_feature (597)..(597): n is a, c, g, or t
agcgggctcgggccacgtgaggagggtgggcggggcgttaaagttcatatcccagtgtcctttgaatcgacttccttttttcttttttccggcgttcaagatgtcgaagcgaggacgtggtgggtcctctggtgcgaaattccggatttccttgggtcttccggtaggagctgtaatcaattgtgctgacaacacaggagccaaaaacctgtatatcatctccgtgaaggggatcaagggacggctgaacagacttcccgctgctggtgtgggtgacatggtgatggccacagtcaagaaaggcaaaccagagctcagaaaaaaggtacatccagcagtggtcattcgacaacgaaagtcataccgtagaaaagatggcgtgtttctttattttgaagataatgcaggagtcatagtgaacaataaaggcgagatgaaaggttctgccattacaggaccagtagcaaaggagtgtgcagacttgtggccccggattgcatccaatgctggcagcattgcatgattctccagtatatttgtaaaaaataaaaaaaaactaaacccattaaaaaaaagaaaacanacancaanacacanaaacaccaacaacacacaccaccaccccccccacaccacccacccccccccccctccaccccaccccacacacacccacccccccccccacccaccccccccccaccaccatcaccaccccgacgctccacactccatcccccccacccacactaacacacaaccccacactacccccccacaaccaacacccgcccggccgcgcaacacacccacgtgcgaccaagacaaaccccgctccccctcaaccacacaaaccaccccagcgcacccacagccgcaccgacacgacacccacaccccagcacacaccctcgccctgcgcccagccaataccgcacaatcccacggccccaccaccaccagccgcccgcacccccccaccccacccccaccgacacccccaccaccccccaccccccaccccccgctgcgg

SEQ ID NO: 456136 - DNA, 1226 bp, Homo sapiens
agcgggctcgggccacgtgaggagggtgggcggggcgttaaagttcatatcccagtgtcctttgaatcgacttccttttttcttttttccggcgttcaagatgtcgaagcgaggacgtggtgggtcctctggtgcgaaattccggatttccttgggtcttccggtaggagctgtaatcaattgtgctgacaacacaggagccaaaaacctgtatatcatctccgtgaaggggatcaagggacggctgaacagacttcccgctgctggtgtgggtgacatggtgatggccacagtcaagaaaggcaaaccagagctcagaaaaaaggtacatccagcagtggtcattcgacaacgaaagtcataccgtagaaaagatggcgtgtttctttattttgaagataatgcaggagtcatagtgaacaataaaggcgagatgaaaggttctgccattacaggaccagtagcaaaggagtgtgcagacttgtggccccggattgcatccaatgctggcagcattgcatgattctccagtatatttgtaaaaaataaaaaaaaactaaacccattaaaaaaaaaaacacaaacaaaacaaaaacaaatgtttgggcccccccccgcggcccacaaaacaagacctttaaaaaccacaaatggctttagtgggcccgagcggccccaccatgtgcgggacactaccacaaccagctcggaaccaggcccgcctcgactccacccaaaagaggaaaacccaccgggccgcgcacccaacagcgcgcacgaggacccccaccccacaaaatgaaaacaaccccgccgcggcagagacacccaagacgcaggctccagaaacaaactaaactcccaaatggcaggcacaacagccacggcaccacccagggaaccacaaaccaacccgcgcgcaccacacgcaggccccgcgaatcatccaaataacatcaccgccacggcagggaacacaccacacaaccaccaacgcccccccccacaccggcaccaacgacaaacacaacgccaacacgcccgaagcaggggtaccaacaccgacggggaaccacccgaaaggcaccacaaatccaacgacaccacccccaccacaagacaacaggacgcacagacgcgcaccaaaggcacacactagcgcatccgactacccacataccgaaagaaccaaacgaccagcgcgcacatgcacttgcatagcgtac

SEQ ID NO: 456137 - DNA, 881 bp, Homo sapiens
  misc_feature (27)..(27): n is a, c, g, or t
  misc_feature (31)..(31): n is a, c, g, or t
  misc_feature (33)..(34): n is a, c, g, or t
  misc_feature (38)..(38): n is a, c, g, or t
cgaccacgcgtcgcggacgcgtgggtngacncnngcgnccttccttttttcttttttccggcgttcaagatgtcgaagcgaggtgaggttttgtttctggaggatcctccaccatctgtcgtgcagtggctggcggattcgtcaggagcggtggccctaggcagctggggcgctttgctctccttcaggccggagagagagagccaggccaccgcgagagcactgccagggccctcgaaagtggcagtggggtgctggagagttgagatggcaggatcccgacgtgaatgtagtctggataccgcgagatcgctccgcgaatagggctatcgtaatggggttgaagttagactggattaggccctggtttgcgcgacctctgcggttttatgccttgcaggagtaattgcgttttgcgaaagacgtggtgggtcctctggtgcgaaattccggatttccttgggtcttccggtaggagctgtaatcaattgtgctgacaacacaggagccaaaaacctgtatatcatctccgtgaaggggatcaagggacggctgaacagacttcccgctgctggtgtgggtgacatggtgatggccacagtcaagaaaggcaaaccagagctcagaaaaaaggtacatccagcagtggtcattcgacaacgaaagtcataccgtagaaaagatggcgtgtttctttattttgaagataatgcaggagtcatagtgaacaataaaggcgagatgaaaggttctgccattacaggaccagtagcaaaggagtgtgcagacttgtggccccggattgcatccaatgctggcagcattgcatgattctccagtatatttgtaaaaaataaaaaaaaactaaacccattaaaaaa

SEQ ID NO: 456138 - DNA, 691 bp, Homo sapiens
  misc_feature (140)..(140): n is a, c, g, or t
accccacctcctccgggcttcctcccggaaactcagcgcctgctgcacttgcctgccctgccttgcttggcacccgctccggcgaccctccccgctcccctgtcatttcatcgcggactgtgcggcctggggttgggggncgggactctcacggtgacatgtttacagctgggtgtgactcagtaaagtggatttttttttctttaaaaaaaaaatcaagatgtcgaagcggacgtggtgggtcctctggtgcgaaattccggatttccttgggtcttccggtaggagctgtaatcaattgtgctgacaacacaggagccaaaaacctgtatatcatctccgtgaaggggatcaagggacggctgaacagacttcccgctgctggtgtgggtgacatggtgatggccacagtcaagaaaggcaaaccagagctcagaaaaaaggtacatccagcagtggtcattcgacaacgaaagtcataccgtagaaaagatggcgtgtttctttattttgaagataatgcaggagtcatagtgaacaataaaggcgagatgaaaggttctgccattacaggaccagtagcaaaggagtgtgcagacttgtggccccggattgcatccaatgctggcagcattgcatgattctccagtatatttgtaaaaaataaaaaaaaactaaacccattaaaaaa

SEQ ID NO: 456139 - DNA, 718 bp, Homo sapiens
agcgggctcgggccacgtgaggagggtgggcggggcgttaaagttcatatcccagtgtcctttgaatcgacttccttttttcttttttccggcgttcaagatgtcgaagcgaggacgtggtgggtcctctggtgcgaaattccggatttccttgggtcttccggtaggagctgtaatcaattgtgctgacaacacaggagccaaaaacctgtatatcatctccgtgaaggggatcaagggacggctgaacagacttcccgctgctggtgtgggtgacatggtgatggccacagtcaagaaaggcaaaccagagctcagaaaaaaggtacatccagcagtggtcattcgacaacgaaagtcataccgtagaaaagatggcgtgtttctttattttgaagataatgcaggagtcatagtgaacaataaaggcgagatgaaaggttctgccattacaggaccagtagcaaaggagtgtgcagacttgtggccccggattgcatccaatgctggcagcattgcatgattctccagtatatttgctggagtgcagtaacaccactgaagctcactgtaactttgaactgctggacttggaatcctcctgctgtggccttcaaagggctgcaattacaagtgtgagccactgcatcccacctcacattttattctttggagattttttttgacttggattaaaaaactttatatttacacttca

SEQ ID NO: 456140 - DNA, 559 bp, Homo sapiens
  misc_feature (486)..(486): n is a, c, g, or t
  misc_feature (508)..(508): n is a, c, g, or t
  misc_feature (528)..(528): n is a, c, g, or t
ctgtggccatcaccatgtcacccacaccagcagcgggaagtctgttcagccgttccttttttcttttttccggcgttcaagatgtcgaagcgaggacgtggtgggtcctctggtgcgaaattccggatttccttgggtcttccggtaggagctgtaatcaattgtgctgacaacacaggagccaaaaacctgtatatcatctccgtgaaggggatcaagggacggctgaacagacttcccgctgctggtgtgggtgacatggtgatggccacagtcaagaaaggcaaaccagagctcagaaaaaaggtacatccagcagtggtcattcgacaacgaaagtcataccgtagaaaagatggcgtgtttctttattttgaagataatgcaggagtcatagtgaacaataaaggcgagatgaaaggttctgccattacaggaccagtagcaaaggagtgtgcagacttgtggcacagtcaagaaaggcanaccagagtctcagaaaaaaggnacatccagcagtggtcattngacaacgaaagtatacaatgacgtgcgtgtg

SEQ ID NO: 456141 - DNA, 477 bp, Homo sapiens
ctgtggccatcaccatgtcacccacaccagcagcgggaagtctgttcagccgttccttttttcttttttccggcgttcaagatgtcgaagcgaggacgtggtgggtcctctggtgcgaaattccggatttccttgggtcttccggtaggagctgtaatcaattgtgctgacaacacaggagccaaaaacctgtatatcatctccgtgaaggggatcaagggacggctgaacagacttcccgctgctggtgtgggtgacatggtgatggccacagtcaagaaaggcaaaccagagctcagaaaaaaggtacatccagcagtggtcattcgacaacgaaagtcataccgtagaaaagatggcgtgtttctttattttgaagataatgcaggagtcatagtgaacaataaaggcgagatgaaagtctgccattacaggaccagtagatatagaagagtgcacttttggggtaccgagctc

SEQ ID NO: 456142 - DNA, 2710 bp, Homo sapiens
ctgtggccatcaccatgtcacccacaccagcagcgggaagtctgttcagccgttccttttttcttttttccggcgttcaagatgtcgaagcgaggacgtggtgggtcctctggtgcgaaattccggatttccttgggtcttccggtaggagctgtaatcaattgtgctgacaacacaggagccaaaaacctgtatatcatctccgtgaaggggatcaagggacggctgaacagacttcccgctgctggtgtgggtgacatggtgatggccacagtcaagaaaggcaaaccagagctcagaaaaaaggtacatccagcagtggtcattcgacaacgaaagtcataccgtagaaagttctgccattacaggaccagtagcaaaggagtgtgcagacttgtggccccggattgcatccaatgctggcagcattgcatgattctccagtatatttgtaaaaaataaaaaaaaactaaacccattaaaaaaaaagtatttgtttgcagtgcttgtctccctgttcacttccagggttcaagcgattctcctgcctcagcctcctaagtagctgggattacaggcacctgccgtcatgcctggctagtttttgtatttttggtggagacagggtttcaccatgtttgccaaacgactcaaactcctgatctcaagtgatctgcccacccaggcctctgcagtgtttttgacataccctgaccatcacttttctgaaatggaaactctgggcattttttttttaaagcaatccttgcttttttgtgagtttgcagactttcagcatcttccaattgctgtatttacaattttggcctcaaaaagtattatttgggttttgagtcccaaaaataatagtagatactgctcaatgactggctatacatggtagcttctcctggagtgaggaaggcattcaaatggctgggcgcggtagctggcacctgtaatcccaacactttcggaggccaaggcaggcagatcatgaggtcaggagttcaagaccaggctgaccaacgtggtgaaacctcctcttttctaaaaatacaaaaattagctgggcgtggtggcgcaccgcctgtaatctcagctactgagagaatcgcttgaacctgggaggtggagtttgcagcgagtcgagattgcaccattgtactccatccagcctgggcaacggagcaagattccgttcccgcccccgccccaaaaaaaggcattgaagttaagatagactatatagttagatcctggacacacacatggattttgaggaatgatgtgagtttgtttatgtatgtacattttagcagttaacaggtttggagtaaattgaatatttataaaacaacagtaattgccatgtaggtttactgtcatagtggaagatgattaagttgatggtacctacaggtattttgctatgaaaatgttttgacaaacaggatgatcgtgtaatttatgttccaagctctagtttgagaatggaagaatgtggtaaatttttgccaactgaacaggcataaagcgctgataataagggacttggccttaaggtaggaggttgttagcatttctttctaaacgtgtaagagtttatttaggtgacacccagcgttttggaaaaatgggtgtttgtttagaacaataatttggagggaagtggactaaacagggtttttagattaaggtttgtgtttatgtatctgtatctgcaaatactcagccataaatgtttctacctgtaagttgggtataatacaagctccacttggtatcaaaaaggactacccttagtgtcttccatgactagttatggaatgtaccagacctagagaggagttgttctaacctggagcttttgaaaatgtttccggtccataccctagaccaattaagtcagactgcagaataggactcagacatcagaattgtgaagctcccaggagatgtcaaggtatacccaagactgagaaccagtaccctgtctagactgaaccaggcttggttttagaagtattaaatctcacctgggtacggtggctcacacctataatcccagcactttgggaggctgaggtgggtggatcatctgaggtcaggagagtgagaccagcctgtccaacatgttgaaaccccatctctactatacaaaattagccaggcatggtggtgcatgctgtaatcccagctacttgggaggctgaggcaggagaattgcttgaaccccggagatggaggttgcagtgagctgaggtcgcacgattgtgctccagcctgggcaaccagtgaaactctggggggaaagaaaaaaaatgtattaaatctctagttttagagagttacaccataacatccctgagtatggtcaatttcaagtcagctttagtgtgacaagcccctaggcccaccatttatgtctttatatattatggcaatatatgatccttatatattaaccactaatcgctgctgtttttgaatgttatcttttctgaggcagtcttgctctgtcacacaggctggagtgcagtaacaccactgaagctcactgtaactttgaactgctggacttggaatcctcctgctgtggccttcaaagggctgcaattacaagtgtgagccactgcatcccacctcacattttattctttggagattttttttgacttggattaaaaaactttatatttacacttca

SEQ ID NO: 456143 - DNA, 669 bp, Homo sapiens
ctgtggccatcaccatgtcacccacaccagcagcgggaagtctgttcagccgttccttttttcttttttccggcgttcaagatgtcgaagcgaggacgtggtgggtcctctggtgcgaaattccggatttccttgggtcttccggtaggagctgtaatcaattgtgctgacaacacaggagccaaaaacctgtatatcatctccgtgaaggggatcaagggacggctgaacagacttcccgctgctggtgtgggtgacatggtgatggccacagtcaagaaaggcaaaccagagctcagaaaaaaggtacatcatctccgtgaaggggatcaagggacggctgaacagacttcccgctgctggtgtgggtgacatggtgatggccacagtcaagaaaggcaaaccagagctcagaaaaaaggtacatccagcagtggtcattcgacaacgaaagtcataccgtagaaaagatggcgtgtttctttattttgaagataatgcaggagtcatagtgaacaataaaggcgagatgaaaggttctgccattacaggaccagtagcaaaggagtgtgcagacttgtggccccggattgcatccaatgctggcagcattgcatgattctccagtatatttgtaaaaaataaaaaaaaactaaacccattaaaaaa

SEQ ID NO: 456144 - DNA, 407 bp, Homo sapiens
ctgtggccatcaccatgtcacccacaccagcagcgggaagtctgttcagccgttccttttttcttttttccggcgttcaagatgtcgaagcgaggacgtggtgggtcctctggtgcgaaattccggatttccttgggtcttccggtaggagctgtaatcaattgtgctgacaacacaggagccaaaaacctgtatatcatctccgtgaaggggatcaagggacggctgaacagacttcccgctgctggtgtgggtgacatggtgatggccacagtcaagaaaggcaaaccagagctcagaaaaaaggtacatccagcagtggatctaaaggtacggcatgactatatgtgctgttttcttttttgcatagagacttcctaatgatcctgccgtacattgatctcgat

SEQ ID NO: 456145 - DNA, 913 bp, Homo sapiens
  misc_feature (27)..(27): n is a, c, g, or t
  misc_feature (31)..(31): n is a, c, g, or t
  misc_feature (33)..(34): n is a, c, g, or t
  misc_feature (38)..(38): n is a, c, g, or t
cgaccacgcgtcgcggacgcgtgggtngacncnngcgnccttccttttttcttttttccggcgttcaagatgtcgaagcgaggtgaggttttgtttctggaggatcctccaccatctgtcgtgcagtggctggcggattcgtcaggagcggtggccctaggcagctggggcgctttgctctccttcaggccggagagagagagccaggccaccgcgagagcactgccagggccctcgaaagtggcagtggggtgctggagagttgagatggcaggatcccgacgtgaatgtagtctggataccgcgagatcgctccgcgaatagggctatcgtaatggggttgaagttagactggattaggccctggtttgcgcgacctctgcggttttatgccttgcaggagtaattgcgttttgcgaaagttagagcaagggttgagtcgtctaggtttcttaatttcgatgtcagagtgttaatagtaagaaataggctactttccgtgagaatcgggtggcacatggggacggcataagtaaaatccgagcgagctaatctatagcgtacagtctatcaaagcatgtgcggtgaattacagcttgagtatgagggggaactccgaaccatgtctagattgtgatctctttatcctgtttcccttccctttatatccacagacgtggtgggtcctctggtgcgaaattccggatttccttgggtcttccggtaggagctgtaatcaattgtgctgacaacacaggtgaggtctttgcacgttgctatactcccccttttaaaagcactcaatgggcctgtggctaatgacctattgagccgtcaagaaaggggagagtgaaaacatcgcttttgggtgaagtggcaacatgtgttgtttgcttcaatcggtggtgtgaca

SEQ ID NO: 456146 - DNA, 2667 bp, Homo sapiens
agcgcgcgactctctcctgtacctgggcatccagaaaaatggtggtgatggcgcgactctcgcggcccgagcggccggaccttgtcttcgaggaagaggacctcccctatgaggaggaaatcatgcggaaccaattctctgtcaaatgctggcttcgctacatcgagttcaaacagggcgccccgaagcccaggctcaatcagctatacgagcgggcactcaagctgctgccctgcagctacaaactctggtaccgatacctgaaggcgcgtcgggcacaggtgaagcatcgctgtgtgaccgaccctgcctatgaagatgtcaacaactgtcatgagagggcctttgtgttcatgcacaagatgcctcgtctgtggctagattactgccagttcctcatggaccaggggcgcgtcacacacacccgccgcaccttcgaccgtgccctccgggcactgcccatcacgcagcactctcgaatttggcccctgtatctgcgcttcctgcgctcacacccactgcctgagacagctgtgcgaggctatcggcgcttcctcaagctgagtcctgagagtgcagaggagtacattgagtacctcaagtcaagtgaccggctggatgaggccgcccagcgcctggccaccgtggtgaacgacgagcgtttcgtgtctaaggccggcaagtccaactaccagctgtggcacgagctgtgcgacctcatctcccagaatccggacaaggtacagtccctcaatgtggacgccatcatccgcgggggcctcacccgcttcaccgaccagctgggcaagctctggtgttctctcgccgactactacatccgcagcggccatttcgagaaggctcgggacgtgtacgaggaggccatccggacagtgatgaccgtgcgggacttcacacaggtgtttgacagctacgcccagttcgaggagagcatgatcgctgcaaagatggagaccgcctcggagctggggcgcgaggaggaggatgatgtggacctggagctgcgcctggcccgcttcgagcagctcatcagccggcggcccctgctcctcaacagcgtcttgctgcgccaaaacccacaccacgtgcacgagtggcacaagcgtgtcgccctgcaccagggccgcccccgggagatcatcaacacctacacagaggctgtgcagacggtggaccccttcaaggccacaggcaagccccacactctgtgggtggcgtttgccaagttttatgaggacaacggacagctggacgatgcccgtgtcatcctggagaaggccaccaaggtgaacttcaagcaggtggatgacctggcaagcgtgtggtgtcagtgcggagagctggagctccgacacgagaactacgatgaggccttgcggctgctgcgaaaggccacggcgctgcctgcccgccgggccgagtactttgatggttcagagcccgtgcagaaccgcgtgtacaagtcactgaaggtctggtccatgctcgccgacctggaggagagcctcggcaccttccagtccaccaaggccgtgtacgaccgcatcctggacctgcgtatcgcaacaccccagatcgtcatcaactatgccatgttcctggaggagcacaagtacttcgaggagagcttcaaggcgtacgagcgcggcatctcgctgttcaagtggcccaacgtgtccgacatctggagcacctacctgaccaaattcattgcccgctatgggggccgcaagctggagcgggcacgggacctgtttgaacaggctctggacggctgccccccaaaatatgccaagaccttgtacctgctgtacgcacagctggaggaggagtggggcctggcccggcatgccatggccgtgtacgagcgtgccaccagggccgtggagcccgcccagcagtatgacatgttcaacatctacatcaagcgggcggccgagatctatggggtcacccacacccgcggcatctaccagaaggccattgaggtgctgtcggacgagcacgcgcgtgagatgtgcctgcggtttgcagacatggagtgcaagctcggggagattgaccgcgcccgggccatctacagcttctgctcccagatctgtgacccccggacgaccggcgcgttctggcagacgtggaaggactttgaggtccggcatggcaatgaggacaccatcaaggaaatgctgcgtatccggcgcagcgtgcaggccacgtacaacacgcaggtcaacttcatggcctcgcagatgctcaaggtctcgggcagtgccacgggcaccgtgtctgacctggcccctgggcagagtggcatggacgacatgaagctgctggaacagcgggcagagcagctggcggctgaggcggagcgtgaccagcccttgcgcgcccagagcaagatcctgttcgtgaggagtgacgcctcccgggaggagctggcagagctggcacagcaggtcaaccccgaggagatccagctgggcgaggacgaggacgaggacgagatggacctggagcccaacgaggttcggctggagcagcagagcgtgccagccgcagtgtttgggagcctgaaggaagactgacccgtccctcccccatcccccctccccaccccctccccaatacagctacgtttgtacatca

SEQ ID NO: 456147 - DNA, 399 bp, Homo sapiens
  misc_feature (347)..(347): n is a, c, g, or t
  misc_feature (361)..(361): n is a, c, g, or t
tggcacgaggctggaagaattcgctgccgcaggagaccgcctcggagctggggcgcgaggaggaggatgatgtggacctggagctgcgcctggcccgcttcgagcagctcatcagccggcggcccctgctcctcaacagcgtcttgctgcgccaaaacccacaccacgtgcacgagtggcacaagcgtgtcgccctgcaccagggccgcccccgggagatcatcaacacctacacagaggctgtgcagacggtggaccccttcaaggccacaggcaagccccacactctgtgggtggcgtttgccaagttttatgaggacaacggacagctggacgatgcccgtttnattctggggaaggncaccaaaggtgaactttcaagcaggttgatgacctggg

SEQ ID NO: 456148 - DNA, 2698 bp, Homo sapiens
  misc_feature (85)..(85): n is a, c, g, or t
  misc_feature (89)..(89): n is a, c, g, or t
  misc_feature (99)..(99): n is a, c, g, or t
ggttagcgcggcagtctgcagcgggtgcgggcggtgccgggcagcttggtgtccagtcgagcagacgacgggacccgcgcccctnatgnacggcacggntagacagtctatcggggcatagcgagatgtcctcgtgtcaccagtggcgtgggcatcgcgtgacaatccggagagttccaaagctagggatgcaccgagaagtcccaggggtcgaacttgagggtactacgaatcgcgtcactcaagctgtgtgctctgcgggcgtaggactacaaactctggtaccgatacctgaaggcgcgtcgggcacaggtgaagcatcgctgtgtgaccgaccctgcctatgaagatgtcaacaactgtcatgagagggcctttgtgttcatgcacaagatgcctcgtctgtggctagattactgccagttcctcatggaccaggggcgcgtcacacacacccgccgcaccttcgaccgtgccctccgggcactgcccatcacgcagcactctcgaatttggcccctgtatctgcgcttcctgcgctcacacccactgcctgagacagctgtgcgaggctatcggcgcttcctcaagctgagtcctgagagtgcagaggagtacattgagtacctcaagtcaagtgaccggctggatgaggccgcccagcgcctggccaccgtggtgaacgacgagcgtttcgtgtctaaggccggcaagtccaactaccagctgtggcacgagctgtgcgacctcatctcccagaatccggacaaggtacagtccctcaatgtggacgccatcatccgcgggggcctcacccgcttcaccgaccagctgggcaagctctggtgttctctcgccgactactacatccgcagcggccatttcgagaaggctcgggacgtgtacgaggaggccatccggacagtgatgaccgtgcgggacttcacacaggtgtttgacagctacgcccagttcgaggagagcatgatcgctgcaaagatggagaccgcctcggagctggggcgcgaggaggaggatgatgtggacctggagctgcgcctggcccgcttcgagcagctcatcagccggcggcccctgctcctcaacagcgtcttgctgcgccaaaacccacaccacgtgcacgagtggcacaagcgtgtcgccctgcaccagggccgcccccgggagatcatcaacacctacacagaggctgtgcagacggtggaccccttcaaggccacaggcaagccccacactctgtgggtggcgtttgccaagttttatgaggacaacggacagctggacgatgcccgtgtcatcctggagaaggccaccaaggtgaacttcaagcaggtggatgacctggcaagcgtgtggtgtcagtgcggagagctggagctccgacacgagaactacgatgaggccttgcggctgctgcgaaaggccacggcgctgcctgcccgccgggccgagtactttgatggttcagagcccgtgcagaaccgcgtgtacaagtcactgaaggtctggtccatgctcgccgacctggaggagagcctcggcaccttccagtccaccaaggccgtgtacgaccgcatcctggacctgcgtatcgcaacaccccagatcgtcatcaactatgccatgttcctggaggagcacaagtacttcgaggagagcttcaaggcgtacgagcgcggcatctcgctgttcaagtggcccaacgtgtccgacatctggagcacctacctgaccaaattcattgcccgctatgggggccgcaagctggagcgggcacgggacctgtttgaacaggctctggacggctgccccccaaaatatgccaagaccttgtacctgctgtacgcacagctggaggaggagtggggcctggcccggcatgccatggccgtgtacgagcgtgccaccagggccgtggagcccgcccagcagtatgacatgttcaacatctacatcaagcgggcggccgagatctatggggtcacccacacccgcggcatctaccagaaggccattgaggtgctgtcggacgagcacgcgcgtgagatgtgcctgcggtttgcagacatggagtgcaagctcggggagattgaccgcgcccgggccatctacagcttctgctcccagatctgtgacccccggacgaccggcgcgttctggcagacgtggaaggactttgaggtccggcatggcaatgaggacaccatcaaggaaatgctgcgtatccggcgcagcgtgcaggccacgtacaacacgcaggtcaacttcatggcctcgcagatgctcaaggtctcgggcagtgccacgggcaccgtgtctgacctggcccctgggcagagtggcatggacgacatgaagctgctggaacagcgggcagagcagctggcggctgaggcggagcgtgaccagcccttgcgcgcccagagcaagatcctgttcgtgaggagtgacgcctcccgggaggagctggcagagctggcacagcaggtcaaccccgaggagatccagctgggcgaggacgaggacgaggacgagatggacctggagcccaacgaggttcggctggagcagcagagcgtgccagccgcagtgtttgggagcctgaaggaagactgacccgtccctcccccatcccccctccccaccccctccccaatacagctacgtttgtacatca

SEQ ID NO: 456149 - DNA, 2954 bp, Homo sapiens
agcgcgcgactctctcctgtacctgggcatccagaaaaatggtggtgatggcgcgactctcgcggcccgagcggccggaccttgtcttcgaggaagaggacctcccctatgaggaggaaatcatgcggaaccaattctctgtcaaatgctggcttcgctacatcgagttcaaacagggcgccccgaagcccaggctcaatcagctatacgagcgggcactcaagctgctgccctgcagctacaaactctggtaccgatacctgaaggcgcgtcgggcacaggtgaagcatcgctgtgtgaccgaccctgcctatgaagatgtcaacaactgtcatgagagggcctttgtgttcatgcacaaggtttggggctcggcgaggggatgaatcgggaagtggagctcagtccatggtggtgggtggggcggggacaggggctgggctcagcatgttagggatgggggcttggattcctgttgcttctttgcatgggaagttgggctggactcagtcctggagctgggggtttctgggtcccgccgcatttatgtggtggccccaggtgtggctcagccacaggacatcgagtgtctgtggccaggccatggagtccgtggcttagccccagccgcctctccccacacccccagatgcctcgtctgtggctagattactgccagttcctcatggaccaggggcgcgtcacacacacccgccgcaccttcgaccgtgccctccgggcactgcccatcacgcagcactctcgaatttggcccctgtatctgcgcttcctgcgctcacacccactgcctgagacagctgtgcgaggctatcggcgcttcctcaagctgagtcctgagagtgcagaggagtacattgagtacctcaagtcaagtgaccggctggatgaggccgcccagcgcctggccaccgtggtgaacgacgagcgtttcgtgtctaaggccggcaagtccaactaccagctgtggcacgagctgtgcgacctcatctcccagaatccggacaaggtacagtccctcaatgtggacgccatcatccgcgggggcctcacccgcttcaccgaccagctgggcaagctctggtgttctctcgccgactactacatccgcagcggccatttcgagaaggctcgggacgtgtacgaggaggccatccggacagtgatgaccgtgcgggacttcacacaggtgtttgacagctacgcccagttcgaggagagcatgatcgctgcaaagatggagaccgcctcggagctggggcgcgaggaggaggatgatgtggacctggagctgcgcctggcccgcttcgagcagctcatcagccggcggcccctgctcctcaacagcgtcttgctgcgccaaaacccacaccacgtgcacgagtggcacaagcgtgtcgccctgcaccagggccgcccccgggagatcatcaacacctacacagaggctgtgcagacggtggaccccttcaaggccacaggcaagccccacactctgtgggtggcgtttgccaagttttatgaggacaacggacagctggacgatgcccgtgtcatcctggagaaggccaccaaggtgaacttcaagcaggtggatgacctggcaagcgtgtggtgtcagtgcggagagctggagctccgacacgagaactacgatgaggccttgcggctgctgcgaaaggccacggcgctgcctgcccgccgggccgagtactttgatggttcagagcccgtgcagaaccgcgtgtacaagtcactgaaggtctggtccatgctcgccgacctggaggagagcctcggcaccttccagtccaccaaggccgtgtacgaccgcatcctggacctgcgtatcgcaacaccccagatcgtcatcaactatgccatgttcctggaggagcacaagtacttcgaggagagcttcaaggcgtacgagcgcggcatctcgctgttcaagtggcccaacgtgtccgacatctggagcacctacctgaccaaattcattgcccgctatgggggccgcaagctggagcgggcacgggacctgtttgaacaggctctggacggctgccccccaaaatatgccaagaccttgtacctgctgtacgcacagctggaggaggagtggggcctggcccggcatgccatggccgtgtacgagcgtgccaccagggccgtggagcccgcccagcagtatgacatgttcaacatctacatcaagcgggcggccgagatctatggggtcacccacacccgcggcatctaccagaaggccattgaggtgctgtcggacgagcacgcgcgtgagatgtgcctgcggtttgcagacatggagtgcaagctcggggagattgaccgcgcccgggccatctacagcttctgctcccagatctgtgacccccggacgaccggcgcgttctggcagacgtggaaggactttgaggtccggcatggcaatgaggacaccatcaaggaaatgctgcgtatccggcgcagcgtgcaggccacgtacaacacgcaggtcaacttcatggcctcgcagatgctcaaggtctcgggcagtgccacgggcaccgtgtctgacctggcccctgggcagagtggcatggacgacatgaagctgctggaacagcgggcagagcagctggcggctgaggcggagcgtgaccagcccttgcgcgcccagagcaagatcctgttcgtgaggagtgacgcctcccgggaggagctggcagagctggcacagcaggtcaaccccgaggagatccagctgggcgaggacgaggacgaggacgagatggacctggagcccaacgaggttcggctggagcagcagagcgtgccagccgcagtgtttgggagcctgaaggaagactgacccgtccctcccccatcccccctccccaccccctccccaatacagctacgtttgtacatca

SEQ ID NO: 456150 - DNA, 1149 bp, Homo sapiens
agcgcgcgactctctcctgtacctgggcatccagaaaaatggtggtgatggcgcgactctcgcggcccgagcggccggaccttgtcttcgaggaagaggacctcccctatgaggaggaaatcatgcggaaccaattctctgtcaaatgctggcttcgctacatcgagttcaaacagggcgccccgaagcccaggctcaatcagctatacgagcgggcactcaagctgctgccctgcagctacaaactctggtaccgatacctgaaggcgcgtcgggcacaggtgaagcatcgctgtgtgaccgaccctgcctatgaagatgtcaacaactgtcatgagagggcctttgtgttcatgcacaagatgcctcgtctgtggctagattactgccagttcctcatggaccaggggcgcgtcacacacacccgccgcaccttcgaccgtgccctccgggcactgcccatcacgcagcactctcgaatttggcccctgtatctgcgcttcctgcgctcacacccactgcctgagacagctgtgcgaggctatcggcgcttcctcaagctgagtcctgagagtgcagaggagtacattgagtacctcaagtcaagtgaccggctggatgaggccgcccagcgcctggccaccgtggtgaacgacgagcgtttcgtgtctaaggccggcaagtccaactaccagctgtggcacgagctgtgcgacctcatctcccagaatccggacaaggtacagtccctcaatgtggacgccatcatccgcgggggcctcacccgcttcaccgaccagctgggcaagctctggtgttctctcgccgactactacatccgcagcggccatttcgagaaggctcgggacgtgtacgaggaggccatccggacagtgatgaccgtgcgggacttcacacaggtgtttgacagctacgcccagttcgaggagagcatgatcgctgcaaagatggagaccgcctcggagctggggcgcgaggaggaggtggctcccgccttccccacagaggttcggctggagcagcagagcgtgccagccgcagtgtttgggagcctgaaggaagactgacccgtccctcccccatcccccctccccaccccctccccaatacagctacgtttgtacatca

SEQ ID NO: 456151 - DNA, 1569 bp, Homo sapiens
agcagtggtacctcgaattagggatgtggagccttccaggcggtggaagcgctagagctctgctgggatggccgttgccaagtatttatgaggagcacaccggacaggcatggcatcgactgctccgctgtcactcgctggattgaaggctcaccacaaggctgatacttgaagcgagcgctggaattgagccgttggtcggatacgtcgctgctgagctgtcgaagattgcggagagcatggatgctccgcacgagcggatgtacactacggatgaggctccgtctgcaggagtgcctgcgaatgaggcactggggcgatgccttggtcactgtcgggccgagtactttgatggttcagagcccgtgcagaaccgcgtgtacaagtcactgaaggtctggtccatgctcgccgacctggaggagagcctcggcaccttccagtccaccaaggccgtgtacgaccgcatcctggacctgcgtatcgcaacaccccagatcgtcatcaactatgccatgttcctggaggagcacaagtacttcgaggagagcttcaaggcgtacgagcgcggcatctcgctgttcaagtggcccaacgtgtccgacatctggagcacctacctgaccaaattcattgcccgctatgggggccgcaagctggagcgggcacgggacctgtttgaacaggctctggacggctgccccccaaaatatgccaagaccttgtacctgctgtacgcacagctggaggaggagtggggcctggcccggcatgccatggccgtgtacgagcgtgccaccagggccgtggagcccgcccagcagtatgacatgttcaacatctacatcaagcgggcggccgagatctatggggtcacccacacccgcggcatctaccagaaggccattgaggtgctgtcggacgagcacgcgcgtgagatgtgcctgcggtttgcagacatggagtgcaagctcggggagattgaccgcgcccgggccatctacagcttctgctcccagatctgtgacccccggacgaccggcgcgttctggcagacgtggaaggactttgaggtccggcatggcaatgaggacaccatcaaggaaatgctgcgtatccggcgcagcgtgcaggccacgtacaacacgcaggtcaacttcatggcctcgcagatgctcaaggtctcgggcagtgccacgggcaccgtgtctgacctggcccctgggcagagtggcatggacgacatgaagctgctggaacagcgggcagagcagctggcggctgaggcggagcgtgaccagcccttgcgcgcccagagcaagatcctgttcgtgaggagtgacgcctcccgggaggagctggcagagctggcacagcaggtcaaccccgaggagatccagctgggcgaggacgaggacgaggacgagatggacctggagcccaacgaggttcggctggagcagcagagcgtgccagccgcagtgtttgggagcctgaaggaagactgacccgtccctcccccatcccccctccccaccccctccccaatacagctacgtttgtacatca

SEQ ID NO: 456152 - DNA, 1262 bp, Homo sapiens
atgtcacctcctatggggccagactgtgcttagcaggtcccattgcacccctgttcttggggttctcacagagggagacagtgcagaggacagacccccacaactgccattagggacagggaggcgtggacagggaagggccccaagggagttcctggcaggctccctacagacgccacccaaggacatcccgggtgcctggtggtctctatctgcagactctcacatgtgactctccctctggtaacaggcgtacgagcgcggcatctcgctgttcaagtggcccaacgtgtccgacatctggagcacctacctgaccaaattcattgcccgctatgggggccgcaagctggagcgggcacgggacctgtttgaacaggctctggacggctgccccccaaaatatgccaagaccttgtacctgctgtacgcacagctggaggaggagtggggcctggcccggcatgccatggccgtgtacgagcgtgccaccagggccgtggagcccgcccagcagtatgacatgttcaacatctacatcaagcgggcggccgagatctatggggtcacccacacccgcggcatctaccagaaggccattgaggtgctgtcggacgagcacgcgcgtgagatgtgcctgcggtttgcagacatggagtgcaagctcggggagattgaccgcgcccgggccatctacagcttctgctcccagatctgtgacccccggacgaccggcgcgttctggcagacgtggaaggactttgaggtccggcatggcaatgaggacaccatcaaggaaatgctgcgtatccggcgcagcgtgcaggccacgtacaacacgcaggtcaacttcatggcctcgcagatgctcaaggtctcgggcagtgccacgggcaccgtgtctgacctggcccctgggcagagtggcatggacgacatgaagctgctggaacagcgggcagagcagctggcggctgaggcggagcgtgaccagcccttgcgcgcccagagcaagatcctgttcgtgaggagtgacgcctcccgggaggagctggcagagctggcacagcaggtcaaccccgaggagatccagctgggcgaggacgaggacgaggacgagatggacctggagcccaacgaggttcggctggagcagcagagcgtgccagccgcagtgtttgggagcctgaaggaagactgacccgtccctcccccatcccccctccccaccccctccccaatacagctacgtttgtacatca

SEQ ID NO: 456153 - DNA, 1144 bp, Homo sapiens
cccacgcgtccgcggacgcgtggggcttcaaggcgtacgagcgcggcatctcgctgttcaagtggcccaacgtgtccgacatctggagcacctacctgaccaaattcattgcccgctatgggggccgcaagctggagcgggcacgggacctgtttgaacaggctctggacggctgccccccaaaatatgccaagaccttgtacctgctgtacgcacagctggaggaggagtggggcctggcccggcatgccatggccgtgtacgagcgtgccaccagggccgtggagcccgcccagcagtatgacatgttcaacatctacatcaagcgggcggccgagatctatggggtcacccacacccgcggcatctaccagaaggccattgaggtgctgtcggacgagcacgcgcgtgagatgtgcctgcggtttgcagacatggagtgcaagctcggggagattgaccgcgcccgggccatctacagcttctgctcccagatctgtgacccccgggtagggctgtggggagggacgggtatcagggttgggggctgcggcggagtcagccagctcacgggcacacacacccacccctgccctgccccccacgcagacgaccggcgcgttctggcagacgtggaaggactttgaggtccggcatggcaatgaggacaccatcaaggaaatgctgcgtatccggcgcagcgtgcaggccacgtacaacacgcaggtcaacttcatggcctcgcagatgctcaaggtctcgggcagtgccacgggcaccgtgtctgacctggcccctgggcagagtggcatggacgacatgaagctgctggaacagcgggcagagcagctggcggctgaggcggagcgtgaccagcccttgcgcgcccagagcaagatcctgttcgtgaggagtgacgcctcccgggaggagctggcagagctggcacagcaggtcaaccccgaggagatccagctgggcgaggacgaggacgaggacgagatggacctggagcccaacgaggttcggctggagcagcagagcgtgccagccgcagtgtttgggagcctgaaggaagactgacccgtccctcccccatcccccctccccaccccctccccaatacagctacgtttgtacatca

SEQ ID NO: 456154 - DNA, 2734 bp, Homo sapiens
agcgcgcgactctctcctgtacctgggcatccagaaaaatggtggtgatggcgcgactctcgcggcccgagcggccggaccttgtcttcgaggaagaggacctcccctatgaggaggaaatcatgcggaaccaattctctgtcaaatgctggcttcgctacatcgagttcaaacagggcgccccgaagcccaggctcaatcagctatacgagcgggcactcaagctgctgccctgcagctacaaactctggtaccgatacctgaaggcgcgtcgggcacaggtgaagcatcgctgtgtgaccgaccctgcctatgaagatgtcaacaactgtcatgagagggcctttgtgttcatgcacaagatgcctcgtctgtggctagattactgccagttcctcatggaccaggggcgcgtcacacacacccgccgcaccttcgaccgtgccctccgggcactgcccatcacgcagcactctcgaatttggcccctgtatctgcgcttcctgcgctcacacccactgcctgagacagctgtgcgaggctatcggcgcttcctcaagctgagtcctgagagtgcagaggagtacattgagtacctcaagtcaagtgaccggctggatgaggccgcccagcgcctggccaccgtggtgaacgacgagcgtttcgtgtctaaggccggcaagtccaactaccagctgtggcacgagctgtgcgacctcatctcccagaatccggacaaggtacagtccctcaatgtggacgccatcatccgcgggggcctcacccgcttcaccgaccagctgggcaagctctggtgttctctcgccgactactacatccgcagcggccatttcgagaaggctcgggacgtgtacgaggaggccatccggacagtgatgaccgtgcgggacttcacacaggtgtttgacagctacgcccagttcgaggagagcatgatcgctgcaaagatggagaccgcctcggagctggggcgcgaggaggaggatgatgtggacctggagctgcgcctggcccgcttcgagcagctcatcagccggcggcccctgctcctcaacagcgtcttgctgcgccaaaacccacaccacgtgcacgagtggcacaagcgtgtcgccctgcaccagggccgcccccgggagatcatcaacacctacacagaggctgtgcagacggtggaccccttcaaggccacaggcaagccccacactctgtgggtggcgtttgccaagttttatgaggacaacggacagctggacgatgcccgtgtcatcctggagaaggccaccaaggtgaacttcaagcaggtggatgacctggcaagcgtgtggtgtcagtgcggagagctggagctccgacacgagaactacgatgaggccttgcggctgctgcgaaaggccacggcgctgcctgcccgccgggccgagtactttgatggttcagagcccgtgcagaaccgcgtgtacaagtcactgaaggtctggtccatgctcgccgacctggaggagagcctcggcaccttccagtccaccaaggccgtgtacgaccgcatcctggacctgcgtatcgcaacaccccagatcgtcatcaactatgccatgttcctggaggagcacaagtacttcgaggagagcttcaaggcgtacgagcgcggcatctcgctgttcaagtggcccaacgtgtccgacatctggagcacctacctgaccaaattcattgcccgctatgggggccgcaagctggagcgggcacgggacctgtttgaacaggctctggacggctgccccccaaaatatgccaagaccttgtacctgctgtacgcacagctggaggaggagtggggcctggcccggcatgccatggccgtgtacgagcgtgccaccagggccgtggagcccgcccagcagtatgacatgttcaacatctacatcaagcgggcggccgagatctatggggtcacccacacccgcggcatctaccagaaggccattgaggtgctgtcggacgagcacgcgcgtgagatgtgcctgcggtttgcagacatggagtgcaagctcggggagattgaccgcgcccgggccatctacagcttctgctcccagatctgtgacccccggacgaccggcgcgttctggcagacgtggaaggactttgaggtccggcatggcaatgaggacaccatcaaggaaatgctgcgtatccggcgcagcgtgcaggccacgtacaacacgcaggtcaacttcatggcctcgcagatgctcaaggtctcgggcagtgccacgggcaccgtgtctgacctggcccctgggcagagtggcatggacgacatgaagctgctggaacagcgggcagagcagctggcggctgaggcggagcgtgaccagcccttgcgcgcccagagcaagatcctgttcgtgaggagtgacgcctcccgggaggagctggcagagctggcacagcaggtcaaccccgaggagatccagctgggcgaggacgaggacgaggacgagatggacctggagcccaacgaggttcggctggagcagcagagcgtgccagccgcagtgtttgggagcctgaaggaagactgacccgtccctcccccatcccccctccccaccccctccccaatacagctacgtttgtacatcaaaaaaaaaaaataaaaatcctgggggattttattgatggggtggggaaaaagaagaggcaatagagg

SEQ ID NO: 456155 - DNA, 2588 bp, Homo sapiens
  misc_feature (541)..(541): n is a, c, g, or t
  misc_feature (545)..(545): n is a, c, g, or t
  misc_feature (547)..(547): n is a, c, g, or t
agcgcgcgactctctcctgtacctgggcatccagaaaaatggtggtgatggcgcgactctcgcggcccgagcggccggaccttgtcttcgaggaagaggacctcccctatgaggaggaaatcatgcggaaccaattctctgtcaaatgctggcttcgctacatcgagttcaaacagggcgccccgaagcccaggctcaatcagctatacgagcgggcactcaagctgctgccctgcagctacaaactctggtaccgatacctgaaggcgcgtcgggcacaggtgaagcatcgctgtgtgaccgaccctgcctatgaagatgtcaacaactgtcatgagagggcctttgtgttcatgcacaagatgcctcgtctgtggctagattactgccagttcctcatggaccaggggcgcgtcacacacacccgccgcaccttcgaccgtgccctccgggcactgcccatcacgcagcactctcgaatttggcccctgtatctgcgcttcctgcgctcacacccactgcctgagacagctgctgtcantgcnancgcgccgccttcctaaagcctgagctcctgagcagtgcagaggcagtacattgcagtacctcaagctcactgtggcacgagctgtgcgacctcatctcccagaatccggacaaggtacagtccctcaatgtggacgccatcatccgcgggggcctcacccgcttcaccgaccagctgggcaagctctggtgttctctcgccgactactacatccgcagcggccatttcgagaaggctcgggacgtgtacgaggaggccatccggacagtgatgaccgtgcgggacttcacacaggtgtttgacagctacgcccagttcgaggagagcatgatcgctgcaaagatggagaccgcctcggagctggggcgcgaggaggaggatgatgtggacctggagctgcgcctggcccgcttcgagcagctcatcagccggcggcccctgctcctcaacagcgtcttgctgcgccaaaacccacaccacgtgcacgagtggcacaagcgtgtcgccctgcaccagggccgcccccgggagatcatcaacacctacacagaggctgtgcagacggtggaccccttcaaggccacaggcaagccccacactctgtgggtggcgtttgccaagttttatgaggacaacggacagctggacgatgcccgtgtcatcctggagaaggccaccaaggtgaacttcaagcaggtggatgacctggcaagcgtgtggtgtcagtgcggagagctggagctccgacacgagaactacgatgaggccttgcggctgctgcgaaaggccacggcgctgcctgcccgccgggccgagtactttgatggttcagagcccgtgcagaaccgcgtgtacaagtcactgaaggtctggtccatgctcgccgacctggaggagagcctcggcaccttccagtccaccaaggccgtgtacgaccgcatcctggacctgcgtatcgcaacaccccagatcgtcatcaactatgccatgttcctggaggagcacaagtacttcgaggagagcttcaaggcgtacgagcgcggcatctcgctgttcaagtggcccaacgtgtccgacatctggagcacctacctgaccaaattcattgcccgctatgggggccgcaagctggagcgggcacgggacctgtttgaacaggctctggacggctgccccccaaaatatgccaagaccttgtacctgctgtacgcacagctggaggaggagtggggcctggcccggcatgccatggccgtgtacgagcgtgccaccagggccgtggagcccgcccagcagtatgacatgttcaacatctacatcaagcgggcggccgagatctatggggtcacccacacccgcggcatctaccagaaggccattgaggtgctgtcggacgagcacgcgcgtgagatgtgcctgcggtttgcagacatggagtgcaagctcggggagattgaccgcgcccgggccatctacagcttctgctcccagatctgtgacccccggacgaccggcgcgttctggcagacgtggaaggactttgaggtccggcatggcaatgaggacaccatcaaggaaatgctgcgtatccggcgcagcgtgcaggccacgtacaacacgcaggtcaacttcatggcctcgcagatgctcaaggtctcgggcagtgccacgggcaccgtgtctgacctggcccctgggcagagtggcatggacgacatgaagctgctggaacagcgggcagagcagctggcggctgaggcggagcgtgaccagcccttgcgcgcccagagcaagatcctgttcgtgaggagtgacgcctcccgggaggagctggcagagctggcacagcaggtcaaccccgaggagatccagctgggcgaggacgaggacgaggacgagatggacctggagcccaacgaggttcggctggagcagcagagcgtgccagccgcagtgtttgggagcctgaaggaagactgacccgtccctcccccatcccccctccccaccccctccccaatacagctacgtttgtacatca

SEQ ID NO: 456156 - DNA, 1062 bp, Homo sapiens
agcgcgcgactctctcctgtacctgggcatccagaaaaatggtggtgatggcgcgactctcgcggcccgagcggccggaccttgtcttcgaggaagaggacctcccctatgaggaggaaatcatgcggaaccaattctctgtcaaatgctggcttcgctacatcgagttcaaacagggcgccccgaagcccaggctcaatcagctatacgagcgggcactcaagctgctgccctgcagctacaaactctggtaccgatacctgaaggcgcgtcgggcacaggtgaagcatcgctgtgtgaccgaccctgcctatgaagatgtcaacaactgtcatgagagggcctttgtgttcatgcacaagatgcctcgtctgtggctagattactgccagttcctcatggaccaggggcgcgtcacacacacccgccgcaccttcgaccgtgccctccgggcactgcccatcacgcagcactctcgaatttggcccctgtatctgcgcttcctgcgctcacacccactgcctgagacagctgtgcgaggctatcggcgcttcctcaagctgagtcctgagagtgcagaggagtacattgagtacctcaagtcaagtgaccggctggatgaggccgcccagcgcctggccaccgtggtgaacgacgagcgtttcgtgtctaaggccggcaagtccaactaccagctgtggcacgagctgtgcgacctcatctcccagaatccggacaaggtacagtccctcaatgtggacgccatcatccgcgggggcctcacccgcttcaccgaccagctgggcaagctctggtgttctctcgccgactactacatccgcagcggccatttcgagaaggctcgggacgtgtacgaggaggccatccggacagtgatgaccgtgcgggacttcacacaggtgtttgacagctacgcccagttcgaggagagcatgatcgctgcaaagatggagaccgcctcggagctggggcgcgaggaggaggtgtggacctggagctgcgcctggcccgctgaagatgatgtggggatcctatagagtg

SEQ ID NO: 456157 - DNA, 941 bp, Homo sapiens
  misc_feature (11)..(11): n is a, c, g, or t
  misc_feature (22)..(22): n is a, c, g, or t
gacggcagtantctcgggttanggtagcgaggctgggtggcgggacctgtttgaacaggctctggacggctgccccccaaaatatgccaagaccttgtacctgctgtacgcacagctggaggaggagtggggcctggcccggcatgccatggccgtgtacgagcgtgccaccagggccgtggagcccgcccagcagtatgacatgttcaacatctacatcaagcgggcggccgagatctatggggtcacccacacccgcggcatctaccagaaggccattgaggtgctgtcggacgagcacgcgcgtgagatgtgcctgcggtttgcagacatggagtgcaagctcggggagattgaccgcgcccgggccatctacagcttctgctcccagatctgtgacccccggacgaccggcgcgttctggcagacgtggaaggactttgaggtccggcatggcaatgaggacaccatcaaggaaatgctgcgtatccggcgcagcgtgcaggccacgtacaacacgcaggtcaacttcatggcctcgcagatgctcaaggtctcgggcagtgccacgggcaccgtgtctgacctggcccctgggcagagtggcatggacgacatgaagctgctggaacagcgggcagagcagctggcggctgaggcggagcgtgaccagcccttgcgcgcccagagcaagatcctgttcgtgaggagtgacgcctcccgggaggagctggcagagctggcacagcaggtcaaccccgaggagatccagctgggcgaggacgaggacgaggacgagatggacctggagcccaacgaggttcggctggagcagcagagcgtgccagccgcagtgtttgggagcctgaaggaagactgacccgtccctcccccatcccccctccccaccccctccccaatacagctacgtttgtacatca

SEQ ID NO: 456158 - DNA, 736 bp, Homo sapiens
  misc_feature (46)..(46): n is a, c, g, or t
gctccccaaagggtacctgcttctgctggcttaatgcctcagaacnttggtgtcattggtctcagacaccactttgccatccactatccggcgggtggtggtctttgggatggtttgcatggagttgctgctgtccaaggcatcaccaagattaaagtcctcgccatctacagcttctgctcccagatctgtgacccccggacgaccggcgcgttctggcagacgtggaaggactttgaggtccggcatggcaatgaggacaccatcaaggaaatgctgcgtatccggcgcagcgtgcaggccacgtacaacacgcaggtcaacttcatggcctcgcagatgctcaaggtctcgggcagtgccacgggcaccgtgtctgacctggcccctgggcagagtggcatggacgacatgaagctgctggaacagcgggcagagcagctggcggctgaggcggagcgtgaccagcccttgcgcgcccagagcaagatcctgttcgtgaggagtgacgcctcccgggaggagctggcagagctggcacagcaggtcaaccccgaggagatccagctgggcgaggacgaggacgaggacgagatggacctggagcccaacgaggttcggctggagcagcagagcgtgccagccgcagtgtttgggagcctgaaggaagactgacccgtccctcccccatcccccctccccaccccctccccaatacagctacgtttgtacatca

SEQ ID NO: 456159 - DNA, 2370 bp, Homo sapiens
agtcatcttcccagttccccaactcacctctggcatggcttgcacagggtggaccagcccccttcctctatgtgtgtgtctgctgctgacctgtggctttgccgaggcagggaagctactggtagtgcccatggatgggagccactggttcaccatgaggtcggtggtggagaaactcattctcagggggcatgaggtggttgtagtcatgccagaggtgagttggcaactgggaagatcactgaattgcacagtgaagacttattcaacttcatatactctggaggatctggaccgggagttcaaggcttttgcccatgctcaatggaaagcacaagtacgaagtatatattctctattaatgggttcatacaatgacatttttgacttatttttttcaaattgcaggagtttgtttaatgaccgaaaattagtagaatacttaaaggagagttcttttgatgcagtgtttctggatccttttgatacctgtggcttaattgttgccaaatatttctccctcccctctgtggtcttcgccaggggaatattttgccactatcttgaagaaggtgcacagtgccctgctcctctttcctatgtccccagaatgatctcttagggttctcagatgccatgactttcaaggagagagtacggaaccacatcatgcacttggaggaacatttattatgccacgttttttcagaaatgccctagaaatagcctctgaaattctccaaacacctgttacggcagtatgatctctacagccacacatcaatttggttgttgcgaacggactttgttttggactatcccaaacccgtgatgcccaacatgatcttcattggtggtatcaactgccatcagggaaagccgttgcctatggaatttgaagcctacattaatgcttctggagaacatggaattgtggttttctctttgggatcaatggtctcagaaattccagagaagaaagctatggcaattgctgatgctttgggcaaaatccctcagacagtcctgtggcggtacactggaacccgaccatcgaatcttgcgaacaacacgatacttgttaagtggctaccccaaaacgatctgcttggtcacccgatgacccgtgcctttatcacccatgctggttcccatggtgtttatgaaagcatatgcaatggcgttcccatggtgatgatgcccttgtttggtgatcagatggacaatgcaaagcgcatggagactaagggagctggagtgaccctgaatgttctggaaatgacttctgaagatttagaaaatgctctaaaagcagtcatcaatgacaaaagttacaaggagaacatcatgcgcctctccagccttcacaaggaccgcccggtggagccgctggacctggccgtgttctgggtggagtttgtgatgaggcacaagggcgcgccacacctgcgccccgcagcccacgacctcacctggtaccagtaccattccttggacgtgattggtttcctcttggccgtcgtgctgacagtggccttcatcacctttaaatgttgtgcttatggctaccggaaatgcttggggaaaaaagggcgagttaagaaagcccacaaatccaagacccattgagaagtgggtgggaaataaggtaaaattttgaaccattccctagtcatttccaaacttgaaaacagaatcagtgttaaattcattttattcttattaaggaaatactttgcataaattaatcagccccagagtgctttaaaaaattctcttaaataaaaataatagactcgctagtcagtaaagatatttgaatatgtatcgtgccccctccggtgtctttgatcaggatgacatgtgccatttttcagaggacgtgcagacaggctggcattctagattacttttcttactctgaaacatggcctgtttgggagtgcgggattcaaaggtggtcccaccgctgcccctactgcaaatggcagttttaatcttatcttttggcttctgcagatggttgcaattgatccttaaccaataatggtcagtcctcatctctgtcctgcttcataggtgccaccttgtgtgtttaaagaagggaagctttgtacctttagagtgtaggtgaaatgaatgaatggcttggagtgcactgagaacagcatatgatttcttgctttggggaaaaagaatgatgctatgaaattggtgggtggtgtatttgagaagataatcattgcttatgtcaaatggagctgaatttgataaaaacccaaaatacagctatgaagtgctgggcaagtttactttttttctgatgtttcctacaactaaaaataaattaataaatttatataaattcta

SEQ ID NO: 456160 - DNA, 2426 bp, Homo sapiens
taaagtaacaacggtaataaagagttttcactctccaaatcacagggctcctaggtattttccctaaactaaccactctttccaggatggcctgcctccttcgctcatttcagagaatttctgcaggggttttcttcttagcactttggggcatggttgtaggtgacaagctgctggtggtccctcaggacggaagccactggcttagtatgaaggatatagttgaggttctcagtgaccggggtcatgagattgtagtggtggtgcctgaagttaatttgcttttgaaagaatccaaatactacacaagaaaaatctatccagtgccgtatgaccaagaagagctgaagaaccgttaccaatcatttggaaacaatcactttgctgagcgatcattcctaactgctcctcagacagagtacaggaataacatgattgttattggcctgtacttcatcaactgccagagcctcctgcaggacagggacaccctgaacttctttaaggagagcaagtttgatgctcttttcacagacccagccttaccctgtggggtgatcctggctgagtatttgggcctaccatctgtgtacctcttcaggggttttccgtgttccctggagcatacattcagcagaagcccagaccctgtgtcctacattcccaggtgctacacaaagttttcagaccacatgactttttcccaacgagtggccaacttccttgttaatttgttggagccctatctattttattgtctgttttcaaagtatgaagaactcgcatcagctgtcctcaagagagatgtggatataatcaccttatatcagaaggtctctgtttggctgttaagatatgactttgtgcttgaatatcctaggccggtcatgcccaacatggtcttcattggaggtatcaactgtaagaagaggaaagacttgtctcaggaatttgaagcctacattaatgcttctggagaacatggaattgtggttttctctttgggatcaatggtctcagaaattccagagaagaaagctatggcaattgctgatgctttgggcaaaatccctcagacagtcctgtggcggtacactggaacccgaccatcgaatcttgcgaacaacacgatacttgttaagtggctaccccaaaacgatctgcttggtcacccgatgacccgtgcctttatcacccatgctggttcccatggtgtttatgaaagcatatgcaatggcgttcccatggtgatgatgcccttgtttggtgatcagatggacaatgcaaagcgcatggagactaagggagctggagtgaccctgaatgttctggaaatgacttctgaagatttagaaaatgctctaaaagcagtcatcaatgacaaaagttacaaggagaacatcatgcgcctctccagccttcacaaggaccgcccggtggagccgctggacctggccgtgttctgggtggagtttgtgatgaggcacaagggcgcgccacacctgcgccccgcagcccacgacctcacctggtaccagtaccattccttggacgtgattggtttcctcttggccgtcgtgctgacagtggccttcatcacctttaaatgttgtgcttatggctaccggaaatgcttggggaaaaaagggcgagttaagaaagcccacaaatccaagacccattgagaagtgggtgggaaataaggtaaaattttgaaccattccctagtcatttccaaacttgaaaacagaatcagtgttaaattcattttattcttattaaggaaatactttgcataaattaatcagccccagagtgctttaaaaaattctcttaaataaaaataatagactcgctagtcagtaaagatatttgaatatgtatcgtgccccctccggtgtctttgatcaggatgacatgtgccatttttcagaggacgtgcagacaggctggcattctagattacttttcttactctgaaacatggcctgtttgggagtgcgggattcaaaggtggtcccaccgctgcccctactgcaaatggcagttttaatcttatcttttggcttctgcagatggttgcaattgatccttaaccaataatggtcagtcctcatctctgtcctgcttcataggtgccaccttgtgtgtttaaagaagggaagctttgtacctttagagtgtaggtgaaatgaatgaatggcttggagtgcactgagaacagcatatgatttcttgctttggggaaaaagaatgatgctatgaaattggtgggtggtgtatttgagaagataatcattgcttatgtcaaatggagctgaatttgataaaaacccaaaatacagctatgaagtgctgggcaagtttactttttttctgatgtttcctacaactaaaaataaattaataaatttatataaattcta

SEQ ID NO: 456161 - DNA, 2358 bp, Homo sapiens
aggagcaaaggcgccatggctgtggagtcccagggcggacgcccacttgtcctgggcctgctgctgtgtgtgctgggcccagtggtgtcccatgctgggaagatactgttgatcccagtggatggcagccactggctgagcatgcttggggccatccagcagctgcagcagaggggacatgaaatagttgtcctagcacctgacgcctcgttgtacatcagagacggagcattttacaccttgaagacgtaccctgtgccattccaaagggaggatgtgaaagagtcttttgttagtctcgggcataatgtttttgagaatgattctttcctgcagcgtgtgatcaaaacatacaagaaaataaaaaaggactctgctatgcttttgtctggctgttcccacttactgcacaacaaggagctcatggcctccctggcagaaagcagctttgatgtcatgctgacggaccctttccttccttgcagccccatcgtggcccagtacctgtctctgcccactgtattcttcttgcatgcactgccatgcagcctggaatttgaggctacccagtgccccaacccattctcctacgtgcccaggcctctctcctctcattcagatcacatgaccttcctgcagcgggtgaagaacatgctcattgccttttcacagaactttctgtgcgacgtggtttattccccgtatgcaacccttgcctcagaattccttcagagagaggtgactgtccaggacctattgagctctgcatctgtctggctgtttagaagtgactttgtgaaggattaccctaggcccatcatgcccaatatggtttttgttggtggaatcaactgccttcaccaaaatccactatcccaggaatttgaagcctacattaatgcttctggagaacatggaattgtggttttctctttgggatcaatggtctcagaaattccagagaagaaagctatggcaattgctgatgctttgggcaaaatccctcagacagtcctgtggcggtacactggaacccgaccatcgaatcttgcgaacaacacgatacttgttaagtggctaccccaaaacgatctgcttggtcacccgatgacccgtgcctttatcacccatgctggttcccatggtgtttatgaaagcatatgcaatggcgttcccatggtgatgatgcccttgtttggtgatcagatggacaatgcaaagcgcatggagactaagggagctggagtgaccctgaatgttctggaaatgacttctgaagatttagaaaatgctctaaaagcagtcatcaatgacaaaagttacaaggagaacatcatgcgcctctccagccttcacaaggaccgcccggtggagccgctggacctggccgtgttctgggtggagtttgtgatgaggcacaagggcgcgccacacctgcgccccgcagcccacgacctcacctggtaccagtaccattccttggacgtgattggtttcctcttggccgtcgtgctgacagtggccttcatcacctttaaatgttgtgcttatggctaccggaaatgcttggggaaaaaagggcgagttaagaaagcccacaaatccaagacccattgagaagtgggtgggaaataaggtaaaattttgaaccattccctagtcatttccaaacttgaaaacagaatcagtgttaaattcattttattcttattaaggaaatactttgcataaattaatcagccccagagtgctttaaaaaattctcttaaataaaaataatagactcgctagtcagtaaagatatttgaatatgtatcgtgccccctccggtgtctttgatcaggatgacatgtgccatttttcagaggacgtgcagacaggctggcattctagattacttttcttactctgaaacatggcctgtttgggagtgcgggattcaaaggtggtcccaccgctgcccctactgcaaatggcagttttaatcttatcttttggcttctgcagatggttgcaattgatccttaaccaataatggtcagtcctcatctctgtcctgcttcataggtgccaccttgtgtgtttaaagaagggaagctttgtacctttagagtgtaggtgaaatgaatgaatggcttggagtgcactgagaacagcatatgatttcttgctttggggaaaaagaatgatgctatgaaattggtgggtggtgtatttgagaagataatcattgcttatgtcaaatggagctgaatttgataaaaacccaaaatacagctatgaagtgctgggcaagtttactttttttctgatgtttcctacaactaaaaataaattaataaatttatataaattcta

SEQ ID NO: 456162 - DNA, 1017 bp, Homo sapiens
  misc_feature (718)..(718): n is a, c, g, or t
  misc_feature (1012)..(1012): n is a, c, g, or t
ggttttgtgctggtatttctcccacctactgtatcatagcagcttagattcccagctgctggctctgggctgcagttctctcatggctcgcgcagggtggaccagccccgttcctttatgtgtgtgtctactgctgacctgtggctttgccgaggcagggaagctgctggtagtgcccatggatgggagtcactggttcaccatgcagtcggtggtggagaaacttatcctcagggggcatgaggtggttgtagtcatgccagaggtgagttggcaactggaaagatcactgaattgcacagtgaagacttactcaacctcgtacactctggaagatcagaaccgggaattcatggttttcgcccatgctcaatggaaagcacaggcacaaagtatattttctctattaatgagttcatccagtggttttcttgacttatttttttcgcattgcaggagtttgtttaatgaccgaaaattagtagaatacttaaaggagagttcttttgatgcagtgtttctggatccttttgatacctgtggcttaattgttgctaaatatttctccctcccctctgtggtcttcaccaggggaatactttgccaccatcttgaagaaggtgcacagtgccctgctcctctttcctatgtccccagaatgatctcttagggttctcagatgccatgactttcaaggagagagtacggaaccacatcntgcacttggaggaacatttattatgccagtatcttttcaaaaatgccctagaaatagctctgaaattctccaaacacctgttcacggcatatgatctctacagtcacacatcaatttggttgttgcgaacggactttgttttggactatcccaaacccgtgatgcccaacatgatcttcattggtggtatcaactgccatcagggaaagccattgcctatggtaagtcacctctcctttagcacattaagaataatcttggctttggaaattaaaaaaggattccttactgaantgtga

SEQ ID NO: 456163 - DNA, 1220 bp, Homo sapiens
tcccagctgctggctcgggctgcagttctctcatggctcgcacagggtggaccagccccattcccctatgtgtttctctgctgctgacctgtggctttgctgaggcagggaagctgctggtagtgcccatggatgggagtcactggttcaccatgcagtcggtggtggagaaacttatcctcagggggcatgaggtggttgtagtcatgccagaggtgagttggcaactgggaaaatcactgaattgcacagtgaagacttactcaacctcatacactctggaggatctggaccgggaattcatggatttcgccgatgctcaatggaaagcacaagtacgaagtttgttttctctatttctgagttcatccaatggtttttttaacttatttttttcgcattgcaggagtttgtttaatgaccgaaaattagtagaatacttaaaggagagttcttttgatgcggtgtttcttgatccttttgatgcctgtggcttaattgttgccaaatatttctccctcccctctgtggtcttcgccaggggaatagtttgccactatcttgaagaaggtgcacagtgccctgctcctctttcctatgtccccagaattctcttagggttctcagatgccatgactttcaaggagagagtacggaaccacatcatgcacttggaggaacatttattttgccagtatttttccaaaaatgtcctagaaatagcctctgaaattctccaaacccctgtcacggcatatgatctctacagccacacatcaatttggttgttgcgaactgactttgttttggagtatcccaaacccgtgatgcccaatatgatcttcattggtggtatcaactgtcatcagggaaagccagtgcctatggccaggatctacttctttcaccccactggaatatgtcccaagcctgagtcattcagcctgcagcaatccctgagaaaaaaaaaaaaatcggccttggcctgggaacactcaaagtgatcacctgaggacacctgtgactacctacagaaccaaaccaggtcaggccgggggtctccagacggaggcatacctctaggggatcgcatcatgaacgaacagacatgccagaatccctcggctagatgtcccagggcagaaataacaaacaaacaaatatacacacacacacaaagaccaaccccattcttaacagacaagcccaggaaagaaacg

SEQ ID NO: 456164 - DNA, 2452 bp, Homo sapiens
agtcatcttcccagttccccaactcacctctggcatggcttgcacagggtggaccagcccccttcctctatgtgtgtgtctgctgctgacctgtggctttgccgaggcagggaagctactggtagtgcccatggatgggagccactggttcaccatgaggtcggtggtggagaaactcattctcagggggcatgaggtggttgtagtcatgccagaggtgagttggcaactgggaagatcactgaattgcacagtgaagacttattcaacttcatatactctggaggatctggaccgggagttcaaggcttttgcccatgctcaatggaaagcacaagtacgaagtatatattctctattaatgggttcatacaatgacatttttgacttatttttttcaaattgcaggagtttgtttaatgaccgaaaattagtagaatacttaaaggagagttcttttgatgcagtgtttctggatccttttgatacctgtggcttaattgttgccaaatatttctccctcccctctgtggtcttcgccaggggaatattttgccactatcttgaagaaggtgcacagtgccctgctcctctttcctatgtccccagaatgatctcttagggttctcagatgccatgactttcaaggagagagtacggaaccacatcatgcacttggaggaacatttattatgccacgttttttcagaaatgccctagaaatagcctctgaaattctccaaacacctgttacggcagtatgatctctacagccacacatcaatttggttgttgcgaacggactttgttttggactatcccaaacccgtgatgcccaacatgatcttcattggtggtatcaactgccatcagggaaagccgttgcctatggaatttgaagcctacattaatgcttctggagaacatggaattgtggttttctctttgggatcaatggtctcagaaattccagagaagaaagctatggcaattgctgatgctttgggcaaaatccctcagacagtcctgtggcggtacactggaacccgaccatcgaatcttgcgaacaacacgatacttgttaagtggctaccccaaaacgatctgcttggtcacccgatgacccgtgcctttatcacccatgctggttcccatggtgtttatgaaagcatatgcaatggcgttcccatggtgatgatgcccttgtttggtgatcagatggacaatgcaaagcgcatggagactaagggagctggagtgaccctgaatgttctggaaatgacttctgaagatttagaaaatgctctaaaagcagtcatcaatgacaaaagttacaaggagaacatcatgcgcctctccagccttcacaaggaccgcccggtggagccgctggacctggccgtgttctgggtggagtttgtgatgaggcacaagggcgcgccacacctgcgccccgcagcccacgacctcacctggtaccagtaccattccttggacgtgattggtttcctcttggccgtcgtgctgacagtggccttcatcacctttaaatgttgtgcttatggctaccggaaatgcttggggaaaaaagggcgagttaagaaagcccacaaatccaagacccattgagaagtgggtgggaaataaggtaaaattttgaaccattccctagtcatttccaaacttgaaaacagaatcagtgttaaattcattttattcttattaaggaaatactttgcataaattaatcagccccagagtgctttaaaaaattctcttaaataaaaataatagactcgctagtcagtaaagatatttgaatatgtatcgtgccccctccggtgtctttgatcaggatgacatgtgccatttttcagaggacgtgcagacaggctggcattctagattacttttcttactctgaaacatggcctgtttgggagtgcgggattcaaaggtggtcccaccgctgcccctactgcaaatggcagttttaatcttatcttttggcttctgcagatggttgcaattgatccttaaccaataatggtcagtcctcatctctgtcctgcttcataggtgccaccttgtgtgtttaaagaagggaagctttgtacctttagagtgtaggtgaaatgaatgaatggcttggagtgcactgagaacagcatatgatttcttgctttggggaaaaagaatgatgctatgaaattggtgggtggtgtatttgagaagataatcattgcttatgtcaaatggagctgaatttgataaaaacccaaaatacagctatgaagtgctgggcaagtttactttttttctgatgtttcctacaactaaaaataaattaataaatttatataaattctactctcatttcttttcaacaaacaaaaagggggggggctaaaataccgggggcaattcaccgaccttgttaagggccataagg

SEQ ID NO: 456165 - DNA, 2316 bp, Homo sapiens
agtcatcttcccagttccccaactcacctctggcatggcttgcacagggtggaccagcccccttcctctatgtgtgtgtctgctgctgacctgtggctttgccgaggcagggaagctactggtagtgcccatggatgggagccactggttcaccatgaggtcggtggtggagaaactcattctcagggggcatgaggtggttgtagtcatgccagaggtgagttggcaactgggaagatcactgaattgcacagtgaagacttattcaacttcatatactctggaggatctggaccgggagttcaaggcttttgcccatgctcaatggaaagcacaagtacgaagtatatattctctattaatgggttcatacaatgacatttttgacttatttttttcaaattgcaggagtttgtttaatgaccgaaaattagtagaatacttaaaggagagttcttttgatgcagtgtttctggatccttttgatacctgtggcttaattgttgccaaatatttctccctcccctctgtggtcttcgccaggggaatattttgccactatcttgaagaaggtgcacagtgccctgctcctctttcctatgtccccagaatgatctcttagggttctcagatgccatgactttcaaggagagagtacggaaccacatcatgcacttggaggaacatttattatgccacgttttttcagaaatgccctagaaatagcctctgaaattctccaaacacctgttacggcagtatgatctctacagccacacatcaatttggttgttgcgaacggactttgttttggactatcccaaacccgtgatgcccaacatgatcttcattggtggtatcaactgccatcagggaaagccgttgcctatggaatttgaagcctacattaatgcttctggagaacatggaattgtggttttctctttgggatcaatggtctcagaaattccagagaagaaagctatggcaattgctgatgctttgggcaaaatccctcagacagtcctgtggcggtacactggaacccgaccatcgaatcttgcgaacaacacgatacttgttaagtggctaccccaaaacgatctgcttggtcacccgatgacccgtgcctttatcacccatgctggttcccatggtgtttatgaaagcatatgcaatggcgttcccatggtgatgatgcccttgtttggtgatcagatggacaatgcaaagcgcatggagactaagggagctggagtgaccctgaatgttctggaaatgacttctgaagatttagaaaatgctctaaaagcagtcatcaatgacaaaagttacaaggagaacatcatgcgcctctccagccttcacaaggaccgcccggtggagccgctggacctggccgtgttctgggtggagtttgtgatgaggcacaagggcgcgccacacctgcgccccgcagcccacgacctcacctggtaccagtaccattccttggacgtgattggtttcctcttggccgtcgtgctgacagtggccttcatcacctttaaatgttgtgcttatggctaccggaaatgcttggggaaaaaagggcgagttaagaaagcccacaaatccaagacccattgagaagtgggtgggaaataaggtaaaattttgaaccattccctagtcatttccaaacttgaaaacagaatcagtgttaaattcattttattcttattaaggaaatactttgcataaattaatcagccccagagtgctttaaaaaattctcttaaataccggtgtctttgatcaggatgacatgtgccatttttcagaggacgtgcagacaggctggcattctagattacttttcttactctgaaacatggcctgtttgggagtgcgggattcaaaggtggtcccaccgctgcccctactgcaaatggcagttttaatcttatcttttggcttctgcagatggttgcaattgatccttaaccaataatggtcagtcctcatctctgtcctgcttcataggtgccaccttgtgtgtttaaagaagggaagctttgtacctttagagtgtaggtgaaatgaatgaatggcttggagtgcactgagaacagcatatgatttcttgctttggggaaaaagaatgatgctatgaaattggtgggtggtgtatttgagaagataatcattgcttatgtcaaatggagctgaatttgataaaaacccaaaatacagctatgaagtgctgggcaagtttactttttttctgatgtttcctacaactaaaaataaattaataaatttatataaattcta

SEQ ID NO: 456166 - DNA, 1690 bp, Homo sapiens
aaacctgaagctcaggagaggagtcactcccctggcagatgggtggctgggccagaagcagataccaggctttctgactcctgctctaggattctcaccacgtactggctagacttatacttctcaaatcttaatttcctaaaggccgatcatgcccaacatggtcttcattgggggcatcaactgtgccaacaggaagccactatctcaggaatttgaagcctacattaatgcttctggagaacatggaattgtggttttctctttgggatcaatggtctcagaaattccagagaagaaagctatggcaattgctgatgctttgggcaaaatccctcagacagtcctgtggcggtacactggaacccgaccatcgaatcttgcgaacaacacgatacttgttaagtggctaccccaaaacgatctgcttggtcacccgatgacccgtgcctttatcacccatgctggttcccatggtgtttatgaaagcatatgcaatggcgttcccatggtgatgatgcccttgtttggtgatcagatggacaatgcaaagcgcatggagactaagggagctggagtgaccctgaatgttctggaaatgacttctgaagatttagaaaatgctctaaaagcagtcatcaatgacaaaagttacaaggagaacatcatgcgcctctccagccttcacaaggaccgcccggtggagccgctggacctggccgtgttctgggtggagtttgtgatgaggcacaagggcgcgccacacctgcgccccgcagcccacgacctcacctggtaccagtaccattccttggacgtgattggtttcctcttggccgtcgtgctgacagtggccttcatcacctttaaatgttgtgcttatggctaccggaaatgcttggggaaaaaagggcgagttaagaaagcccacaaatccaagacccattgagaagtgggtgggaaataaggtaaaattttgaaccattccctagtcatttccaaacttgaaaacagaatcagtgttaaattcattttattcttattaaggaaatactttgcataaattaatcagccccagagtgctttaaaaaattctcttaaataaaaataatagactcgctagtcagtaaagatatttgaatatgtatcgtgccccctccggtgtctttgatcaggatgacatgtgccatttttcagaggacgtgcagacaggctggcattctagattacttttcttactctgaaacatggcctgtttgggagtgcgggattcaaaggtggtcccaccgctgcccctactgcaaatggcagttttaatcttatcttttggcttctgcagatggttgcaattgatccttaaccaataatggtcagtcctcatctctgtcctgcttcataggtgccaccttgtgtgtttaaagaagggaagctttgtacctttagagtgtaggtgaaatgaatgaatggcttggagtgcactgagaacagcatatgatttcttgctttggggaaaaagaatgatgctatgaaattggtgggtggtgtatttgagaagataatcattgcttatgtcaaatggagctgaatttgataaaaacccaaaatacagctatgaagtgctgggcaagtttactttttttctgatgtttcctacaactaaaaataaattaataaatttatataaattcta

SEQ ID NO: 456167 - DNA, 1231 bp, Homo sapiens
  misc_feature (1226)..(1226): n is a, c, g, or t
aaagggtaaaattcagagcaagggagaggtagacaggacctgtgaaaagcagtggttagtttagggaaaatacctaggagccctgtgatttggagagtgaaaactctttattaccgttgttactttaactctttccaggatggcctgcctccttcgctcatttcagagaatttctgcaggggttttcttcttagcactttggggcatggttgtaggtgacaagctgctggtggtccctcaggacggaagccactggcttagtatgaaggatatagttgaggttctcagtgaccggggtcatgagattgtagtggtggtgcctgaagttaatttgcttttgaaagaatccaaatactacacaagaaaaatctatccagtgccgtatgaccaagaagagctgaagaaccgttaccaatcatttggaaacaatcactttgctgagcgatcattcctaactgctcctcagacagagtacaggaataacatgattgttattggcctgtacttcatcaactgccagagcctcctgcaggacagggacaccctgaacttctttaaggagagcaagtttgatgctcttttcacagacccagccttaccctgtggggtgatcctggctgagtatttgggcctaccatctgtgtacctcttcaggggttttccgtgttccctggagcatacattcagcagaagcccagaccctgtgtcctacattcccaggtgctacacaaagttttcagaccacatgactttttcccaacgagtggccaacttccttgttaatttgttggagccctatctattttattgtctgttttcaaagtatgaagaactcgcatcagctgtcctcaagagagatgtggatataatcaccttatatcagaaggtctctgtttggctgttaagatatgactttgtgcttgaatatcctaggccggtcatgcccaacatggtcttcattggaggtatcaacttctgcatttaatagaattgatgcaactggctgagcgtggtggctcatgcttataatcccagcactttgcggggccgaagcaggaggatagcttgagcccaggagtttgagaccagcctaggcagcatagtgagattccttcactacagaaagtaaaaacctagctggacatggtagcgtgtgcctgtagacctaactactcggaaggctgaggtgggaggattatttgagcccaggagttcaaggttccagnccgct

SEQ ID NO: 456168 - DNA, 890 bp, Homo sapiens
aaagggtaaaattcagagcaagggagaggtagacaggacctgtgaaaagcagtggttagtttagggaaaatacctaggagccctgtgatttggagagtgaaaactctttattaccgttgttactttaactctttccaggatggcctgcctccttcgctcatttcagagaatttctgcaggggttttcttcttagcactttggggcatggttgtaggtgacaagctgctggtggtccctcaggacggaagccactggcttagtatgaaggatatagttgaggttctcagtgaccggggtcatgagattgtagtggtggtgcctgaagttaatttgcttttgaaagaatccaaatactacacaagaaaaatctatccagtgccgtatgaccaagaagagctgaagaaccgttaccaatcatttggaaacaatcactttgctgagcgatcattcctaactgctcctcagacagagtacaggaataacatgattgttattggcctgtacttcatcaactgccagagcctcctgcaggacagggacaccctgaacttctttaaggagagcaagtttgatgctcttttcacagacccagccttaccctgtggggtgatcctggctgagtatttgggcctaccatctgtgtacctcttcaggggttttccgtgttccctggagcatacattcagcagaagcccagaccctgtgtcctacatacgcccaggtatgcacatacgcccaggtacgcatgcttacctgggcgtatggcgtacggtcagagaagccatcacctcagatggcagcttttaaaagattttttgtttatctctcaacaccatgattcctttaacaacatgtttccagaatacgcccaggtacgcaggggatcctc

SEQ ID NO: 456169 - DNA, 2375 bp, Homo sapiens
acagtcagctgtcggtggcttctgctgagatggccagaggactccaggttcccctgccgcggctggccacaggactgctgctcctcctcagtgtccagccctgggctgagagtggaaaggtgttggtggtgcccactgatggcagcccctggctcagcatgcgggaggccttgcgggagctccatgccagaggccaccaggcggtggtcctcaccccagaggtgaatatgcacatcaaagaagagaaatttttcaccctgacagcctatgctgttccatggacccagaaggaatttgatcgcgttacgctgggctacactcaagggttctttgaaacagaacatcttctgaagagatattctagaagtatggcaattatgaacaatgtatctttggcccttcataggtgttgtgtggagctactgcataatgaggccctgatcaggcacctgaatgctacttcctttgatgtggttttaacagaccccgttaacctctgcggggcggtgctggctaagtacctgtcgattcctgctgtgtttttttggaggtacattccatgtgacttagactttaagggcacacagtgtccaaatccttcctcctatattcctaagttactaacgaccaattcagaccacatgacattcctgcaaagggtcaagaacatgctctaccctctggccctgtcctacatttgccatactttttctgccccttatgcaagtcttgcctctgagctttttcagagagaggtgtcagtggtggatcttgtcagctatgcatccgtgtggctgttccgaggggactttgtgatggactaccccaggccgatcatgcccaacatggtcttcattgggggcatcaactgtgccaacaggaagccactatctcaggaatttgaagcctacattaatgcttctggagaacatggaattgtggttttctctttgggatcaatggtctcagaaattccagagaagaaagctatggcaattgctgatgctttgggcaaaatccctcagacagtcctgtggcggtacactggaacccgaccatcgaatcttgcgaacaacacgatacttgttaagtggctaccccaaaacgatctgcttggtcacccgatgacccgtgcctttatcacccatgctggttcccatggtgtttatgaaagcatatgcaatggcgttcccatggtgatgatgcccttgtttggtgatcagatggacaatgcaaagcgcatggagactaagggagctggagtgaccctgaatgttctggaaatgacttctgaagatttagaaaatgctctaaaagcagtcatcaatgacaaaagttacaaggagaacatcatgcgcctctccagccttcacaaggaccgcccggtggagccgctggacctggccgtgttctgggtggagtttgtgatgaggcacaagggcgcgccacacctgcgccccgcagcccacgacctcacctggtaccagtaccattccttggacgtgattggtttcctcttggccgtcgtgctgacagtggccttcatcacctttaaatgttgtgcttatggctaccggaaatgcttggggaaaaaagggcgagttaagaaagcccacaaatccaagacccattgagaagtgggtgggaaataaggtaaaattttgaaccattccctagtcatttccaaacttgaaaacagaatcagtgttaaattcattttattcttattaaggaaatactttgcataaattaatcagccccagagtgctttaaaaaattctcttaaataaaaataatagactcgctagtcagtaaagatatttgaatatgtatcgtgccccctccggtgtctttgatcaggatgacatgtgccatttttcagaggacgtgcagacaggctggcattctagattacttttcttactctgaaacatggcctgtttgggagtgcgggattcaaaggtggtcccaccgctgcccctactgcaaatggcagttttaatcttatcttttggcttctgcagatggttgcaattgatccttaaccaataatggtcagtcctcatctctgtcctgcttcataggtgccaccttgtgtgtttaaagaagggaagctttgtacctttagagtgtaggtgaaatgaatgaatggcttggagtgcactgagaacagcatatgatttcttgctttggggaaaaagaatgatgctatgaaattggtgggtggtgtatttgagaagataatcattgcttatgtcaaatggagctgaatttgataaaaacccaaaatacagctatgaagtgctgggcaagtttactttttttctgatgtttcctacaactaaaaataaattaataaatttatataaattcta

SEQ ID NO: 456170 - DNA, 2479 bp, Homo sapiens
aaagggtaaaattcagagcaagggagaggtagacaggacctgtgaaaagcagtggttagtttagggaaaatacctaggagccctgtgatttggagagtgaaaactctttattaccgttgttactttaactctttccaggatggcctgcctccttcgctcatttcagagaatttctgcaggggttttcttcttagcactttggggcatggttgtaggtgacaagctgctggtggtccctcaggacggaagccactggcttagtatgaaggatatagttgaggttctcagtgaccggggtcatgagattgtagtggtggtgcctgaagttaatttgcttttgaaagaatccaaatactacacaagaaaaatctatccagtgccgtatgaccaagaagagctgaagaaccgttaccaatcatttggaaacaatcactttgctgagcgatcattcctaactgctcctcagacagagtacaggaataacatgattgttattggcctgtacttcatcaactgccagagcctcctgcaggacagggacaccctgaacttctttaaggagagcaagtttgatgctcttttcacagacccagccttaccctgtggggtgatcctggctgagtatttgggcctaccatctgtgtacctcttcaggggttttccgtgttccctggagcatacattcagcagaagcccagaccctgtgtcctacattcccaggtgctacacaaagttttcagaccacatgactttttcccaacgagtggccaacttccttgttaatttgttggagccctatctattttattgtctgttttcaaagtatgaagaactcgcatcagctgtcctcaagagagatgtggatataatcaccttatatcagaaggtctctgtttggctgttaagatatgactttgtgcttgaatatcctaggccggtcatgcccaacatggtcttcattggaggtatcaactgtaagaagaggaaagacttgtctcaggaatttgaagcctacattaatgcttctggagaacatggaattgtggttttctctttgggatcaatggtctcagaaattccagagaagaaagctatggcaattgctgatgctttgggcaaaatccctcagacagtcctgtggcggtacactggaacccgaccatcgaatcttgcgaacaacacgatacttgttaagtggctaccccaaaacgatctgcttggtcacccgatgacccgtgcctttatcacccatgctggttcccatggtgtttatgaaagcatatgcaatggcgttcccatggtgatgatgcccttgtttggtgatcagatggacaatgcaaagcgcatggagactaagggagctggagtgaccctgaatgttctggaaatgacttctgaagatttagaaaatgctctaaaagcagtcatcaatgacaaaagttacaaggagaacatcatgcgcctctccagccttcacaaggaccgcccggtggagccgctggacctggccgtgttctgggtggagtttgtgatgaggcacaagggcgcgccacacctgcgccccgcagcccacgacctcacctggtaccagtaccattccttggacgtgattggtttcctcttggccgtcgtgctgacagtggccttcatcacctttaaatgttgtgcttatggctaccggaaatgcttggggaaaaaagggcgagttaagaaagcccacaaatccaagacccattgagaagtgggtgggaaataaggtaaaattttgaaccattccctagtcatttccaaacttgaaaacagaatcagtgttaaattcattttattcttattaaggaaatactttgcataaattaatcagccccagagtgctttaaaaaattctcttaaataaaaataatagactcgctagtcagtaaagatatttgaatatgtatcgtgccccctccggtgtctttgatcaggatgacatgtgccatttttcagaggacgtgcagacaggctggcattctagattacttttcttactctgaaacatggcctgtttgggagtgcgggattcaaaggtggtcccaccgctgcccctactgcaaatggcagttttaatcttatcttttggcttctgcagatggttgcaattgatccttaaccaataatggtcagtcctcatctctgtcctgcttcataggtgccaccttgtgtgtttaaagaagggaagctttgtacctttagagtgtaggtgaaatgaatgaatggcttggagtgcactgagaacagcatatgatttcttgctttggggaaaaagaatgatgctatgaaattggtgggtggtgtatttgagaagataatcattgcttatgtcaaatggagctgaatttgataaaaacccaaaatacagctatgaagtgctgggcaagtttactttttttctgatgtttcctacaactaaaaataaattaataaatttatataaattcta

SEQ ID NO: 456171 - DNA, 532 bp, Homo sapiens
ggctcggtacctgcttactgggcgtatgaccaagaagagctgaagaaccgttaccaatcatttggaaacaatcactttgctgagcgatcattcctaactgctcctcagacagagtacaggaataacatgattgttattggcctgtacttcatcaactgccagagcctcctgcaggacagggacaccctgaacttctttaaggagagcaagtttgatgctcttttcacagacccagccttaccctgtggggtgatcctggctgagtatttgggcctaccatctgtgtacctcttcaggggttttccgtgttccctggagcatacattcagcagaagcccagaccctgtgtcctacatacgcccaggtatgcacatacgcccaggtacgcatgcttacctgggcgtatggcgtacggtcagagaagccatcacctcagatggcagcttttaaaagattttttgtttatctctcaacaccatgattcctttaacaacatgtttccagaatacgcccaggtacgcaggggatcctc

SEQ ID NO: 456172 - DNA, 856 bp, Homo sapiens
  misc_feature (661)..(661): n is a, c, g, or t
aaacctgaagctcaggagaggagtcactcccctggcagatgggtggctgggccagaagcagataccaggctttctgactcctgctctaggattctcaccacgtactggctagacttatacttctcaaatcttaatttcctaaaggccgatcatgcccaacatggtcttcattgggggcatcaactgtgccaacaggaagccactatctcaggaatttgaagcctacattaatgcttctggagaacatggaattgtggttttctctttgggatcaatggtctcagaaattccagagaagaaagctatggcaattgctgatgctttgggcaaaatccctcagacagtcctgtggcggtacactggaacccgaccatcgaatcttgcgaacaacacgatacttgttaagtggctaccccaaaacgatctgcttggtcacccgatgacccgtgcctttatcacccatgctggttcccatggtgtttatgaaagcatatgcaatggcgttcccatggtgatgatgcccttgtttggtgatcagatggacaatgcaaagcgcatggagactaagggagctggagtgaccctgaatgttctggaaatgacttctgaagatttagaaaatgctctaaaagcagtcatcaatgacaaaaggttcaggggnactttctgcgccctccagccttacaggacgccggggggcgtggacggcggtcttgcggggttggcagcgccacgggcccacactggcggacacgactcccggccgcacaccgcggcgggcctgagccgacagccacaccaaggtcgcccgaagggacgcgggaccacaccccaggggggaggaactcgcaccgac

SEQ ID NO: 456173 - DNA, 2366 bp, Homo sapiens
tcccagctgctggctcgggctgcagttctctcatggctcgcacagggtggaccagccccattcccctatgtgtttctctgctgctgacctgtggctttgctgaggcagggaagctgctggtagtgcccatggatgggagtcactggttcaccatgcagtcggtggtggagaaacttatcctcagggggcatgaggtggttgtagtcatgccagaggtgagttggcaactgggaaaatcactgaattgcacagtgaagacttactcaacctcatacactctggaggatctggaccgggaattcatggatttcgccgatgctcaatggaaagcacaagtacgaagtttgttttctctatttctgagttcatccaatggtttttttaacttatttttttcgcattgcaggagtttgtttaatgaccgaaaattagtagaatacttaaaggagagttcttttgatgcggtgtttcttgatccttttgatgcctgtggcttaattgttgccaaatatttctccctcccctctgtggtcttcgccaggggaatagtttgccactatcttgaagaaggtgcacagtgccctgctcctctttcctatgtccccagaattctcttagggttctcagatgccatgactttcaaggagagagtacggaaccacatcatgcacttggaggaacatttattttgccagtatttttccaaaaatgtcctagaaatagcctctgaaattctccaaacccctgtcacggcatatgatctctacagccacacatcaatttggttgttgcgaactgactttgttttggagtatcccaaacccgtgatgcccaatatgatcttcattggtggtatcaactgtcatcagggaaagccagtgcctatggaatttgaagcctacattaatgcttctggagaacatggaattgtggttttctctttgggatcaatggtctcagaaattccagagaagaaagctatggcaattgctgatgctttgggcaaaatccctcagacagtcctgtggcggtacactggaacccgaccatcgaatcttgcgaacaacacgatacttgttaagtggctaccccaaaacgatctgcttggtcacccgatgacccgtgcctttatcacccatgctggttcccatggtgtttatgaaagcatatgcaatggcgttcccatggtgatgatgcccttgtttggtgatcagatggacaatgcaaagcgcatggagactaagggagctggagtgaccctgaatgttctggaaatgacttctgaagatttagaaaatgctctaaaagcagtcatcaatgacaaaagttacaaggagaacatcatgcgcctctccagccttcacaaggaccgcccggtggagccgctggacctggccgtgttctgggtggagtttgtgatgaggcacaagggcgcgccacacctgcgccccgcagcccacgacctcacctggtaccagtaccattccttggacgtgattggtttcctcttggccgtcgtgctgacagtggccttcatcacctttaaatgttgtgcttatggctaccggaaatgcttggggaaaaaagggcgagttaagaaagcccacaaatccaagacccattgagaagtgggtgggaaataaggtaaaattttgaaccattccctagtcatttccaaacttgaaaacagaatcagtgttaaattcattttattcttattaaggaaatactttgcataaattaatcagccccagagtgctttaaaaaattctcttaaataaaaataatagactcgctagtcagtaaagatatttgaatatgtatcgtgccccctccggtgtctttgatcaggatgacatgtgccatttttcagaggacgtgcagacaggctggcattctagattacttttcttactctgaaacatggcctgtttgggagtgcgggattcaaaggtggtcccaccgctgcccctactgcaaatggcagttttaatcttatcttttggcttctgcagatggttgcaattgatccttaaccaataatggtcagtcctcatctctgtcctgcttcataggtgccaccttgtgtgtttaaagaagggaagctttgtacctttagagtgtaggtgaaatgaatgaatggcttggagtgcactgagaacagcatatgatttcttgctttggggaaaaagaatgatgctatgaaattggtgggtggtgtatttgagaagataatcattgcttatgtcaaatggagctgaatttgataaaaacccaaaatacagctatgaagtgctgggcaagtttactttttttctgatgtttcctacaactaaaaataaattaataaatttatataaattcta

SEQ ID NO: 456174 - DNA, 2189 bp, Homo sapiens
aaagggtaaaattcagagcaagggagaggtagacaggacctgtgaaaagcagtggttagtttagggaaaatacctaggagccctgtgatttggagagtgaaaactctttattaccgttgttactttaactctttccaggatggcctgcctccttcgctcatttcagagaatttctgcaggggttttcttcttagcactttggggcatggttgtaggtgacaagctgctggtggtccctcaggacggaagccactggcttagtatgaaggatatagttgaggttctcagtgaccggggtcatgagattgtagtggtggtgcctgaagttaatttgcttttgaaagaatccaaatactacacaagaaaaatctatccagtgccgtatgaccaagaagagctgaagaaccgttaccaatcatttggaaacaatcactttgctgagcgatcattcctaactgctcctcagacagagtacaggaataacatgattgttattggcctgtacttcatcaactgccagagcctcctgcaggacagggacaccctgaacttctttaaggagagcaagtttgatgctcttttcacagacccagccttaccctgtggggtgatcctggctgagtatttgggcctaccatctgtgtacctcttcaggggttttccgtgttccctggagcatacattcagcagaagcccagaccctgtgtcctacattcccaggtgctacacaaagttttcagaccacatgactttttcccaacgagtggccaacttccttgttaatttgttggagccctatctattttattgtctgttttcaaagtatgaagaactcgcatcagctgtcctcaagagagatgtggatataatcaccttatatcagaaggtctctgtttggctgttaagatatgactttgtgcttgaatatcctaggccggtcatgcccaacatggtcttcattggaggtatcaactgtaagaagaggaaagacttgtctcaggaatttgaagcctacattaatgcttctggagaacatggaattgtggttttctctttgggatcaatggtctcagaaattccagagaagaaagctatggcaattgctgatgctttgggcaaaatccctcagacagtcctgtggcggtacactggaacccgaccatcgaatcttgcgaacaacacgatacttgttaagtggctaccccaaaacgatctgcttggtcacccgatgacccgtgcctttatcacccatgctggttcccatggtgtttatgaaagcatatgcaatggcgttcccatggtgatgatgcccttgtttggtgatcagatggacaatgcaaagcgcatggagactaagggagctggagtgaccctgaatgttctggaaatgacttctgaagatttagaaaatgctctaaaagcagtcatcaatgacaaaagaaagaagcagcagtcaggaagacagatgtgaagagctggagcatgttcagatgagaggagacggaacacggggacacaccagcttgagcaagggacaacaggggaggactgatgactgacttcccacctttgaggtgctaatgtgtgtgtggtggcactggataaaagatcaatgttggctaggcaccatggcacacgcctgtagtcccagccactctggaggctaaggcgggaggattgcttgagcccagaagttggaggctgctatgagccgtgatcatgccactgcactccagcaacctgggcaacagagtgagaccctgtctcaaaaaaaaaaaaaaaaatgaaaagtccacataacctgagcatcatgtgcccagagcgttgggtggtgtggtcccattccttccttccagcggcttcttctggccacctcaatgtcaggatgtcctgctcacatatcaataccattaaaacctgacttctttccctgcactgttgaagctccttcttgaggctcacattatggatataattttgattctttcttcagtggtatagataactacttgtaacctaagaacaacttggtgaaagtcctctaatacattattttttaaaaaaacacaaatcaatgagctcaacttattaactaactttcatctattcatttttgagccatccctgtctgattgtgaatctccatgattccaacactctgagctggggatagtgcctacacaaaataa

SEQ ID NO: 456175 - DNA, 1462 bp, Homo sapiens
aaagggtaaaattcagagcaagggagaggtagacaggacctgtgaaaagcagtggttagtttagggaaaatacctaggagccctgtgatttggagagtgaaaactctttattaccgttgttactttaactctttccaggatggcctgcctccttcgctcatttcagagaatttctgcaggggttttcttcttagcactttggggcatggttgtaggtgacaagctgctggtggtccctcaggacggaagccactggcttagtatgaaggatatagttgaggttctcagtgaccggggtcatgagattgtagtggtggtgcctgaagttaatttgcttttgaaagaatccaaatactacacaagaaaaatctatccagtgccgtatgaccaagaagagctgaagaaccgttaccaatcatttggaaacaatcactttgctgagcgatcattcctaactgctcctcagacagagtacaggaataacatgattgttattggcctgtacttcatcaactgccagagcctcctgcaggacagggacaccctgaacttctttaaggagagcaagtttgatgctcttttcacagacccagccttaccctgtggggtgatcctggctgagtatttgggcctaccatctgtgtacctcttcaggggttttccgtgttccctggagcatacattcagcagaagcccagaccctgtgtcctacattcccaggtgctacacaaagttttcagaccacatgactttttcccaacgagtggccaacttccttgttaatttgttggagccctatctattttattgtctgttttcaaagtatgaagaactcgcatcagctgtcctcaagagagatgtggatataatcaccttatatcagaaggtctctgtttggctgttaagatatgactttgtgcttgaatatcctaggccggtcatgcccaacatggtcttcattggaggtatcaactgtaagaagaggaaagacttgtctcaggtcttgtgtggagctactacataatgaggccctgatcaggcacctgaatgctacttcctttgatgtggttttaacagaccccgttaacctctgcgcggcagtgctggctaagtacctgtcgattcctactgtgttttttttgaggaacattccatgtgatttagactttaagggcacacagtgtccaaacccttcctcctatattcctagattactaacaacccaattcagaccacatgacattcatgcaaagggtcaagaacatgctctaccctctggccctgtcctacatttgccatgctttttctgctccttatgcaagccttgcctctgagctttttcagagagaggtgtcagtggtggatattctcagtcatgcatctgtgtggctgttccgaggggactttgtgatggactaccccaggccaatcatgcccaacatggtcttcattgggggcatca

SEQ ID NO: 456176 - DNA, 1136 bp, Homo sapiens
ggatcttaatgagaagcactaaagagatttaaatagagaatgacaacatgtaatttggcttttaaacaaagttatgttttttaatgcagaaaataaattggaatgaagcccatgtgaatgcatggagacaaggtgaaaaggtagatgagaaaaaagttggaaatatttgcaggtacatttgacaggaccaggagatgtcttgggcattcatgatgatggaagagtggtcaataatgactctattttctagcttgtatcatgagatgaatggagacccgtagaagaataagttttgtgagtgactgggtcatgtaatatattttggatttgttaaatgtgaactacttttaagaaactgtggggaaaaacttcgttttgtttacatccatgaatcatttgaagcacgaaaaataattctcagctgaagatacaaatatgagggccctgggtgtataactgaaggcacgagtataaatgggattatttagggagggcttaaaagtggatagagagtaaattcacagactataggtacaaaataatcaccaatgacaatatattatgcagcttaagaccaattgtatgtattttcctgacaatgtcttttagagcctgtgactagttttctcctgaagatgtggtgatcttcttatcaatttttaagagtacttaaatgttttaacaattatatttaactcaaaattagtttccaacttgttttcctttaattataatttaaagtgtatattttatgtgtacgaatattaaaaatttatgaagtcatatctattgcctttgtctcttattactttaccaatgcttacaaaaactttcctcattaatgcttatataaattttttttttttttgcaaatttttccattcttctggtttgtaaaatgcctaaagtaaaatgtgtatctgaattaattaatcgttaaatatcttttcaattttctcaacccaatatattggacaattcacctcttactcccagagttttatctctacatattattcctatgaagcttttacacatgctgagactaaatggtctgttctatgtcattgattctatttgcctagttgtctatttaccttgtagttttgaggtaataaatggtcctttaaactgtg

SEQ ID NO: 456177 - DNA, 958 bp, Homo sapiens
  misc_feature (883)..(883): n is a, c, g, or t
  misc_feature (887)..(887): n is a, c, g, or t
  misc_feature (910)..(910): n is a, c, g, or t
  misc_feature (919)..(919): n is a, c, g, or t
  misc_feature (934)..(934): n is a, c, g, or t
  misc_feature (950)..(950): n is a, c, g, or t
cacgagggcaaaagatgcctgcctgaaggaagctgttgcccatgaaaataatagggctctttttcatgctgccaaagcttatgagcaagctggaatgatgttgaaggagatgcagaaactaccagaggccgttcagctaattgagaaggccagcatgatgtatctagaaaacggcaccccagacacagcagccatggctttggagcgagctggaaagcttatagaaaatgttgatccagagaaggctgtacagttatatcaacagacagctaatgtgtttgaaaatgaagaacgcttacgacaggcagttgaattactaggaaaagcctccagactactagtacgaggacgtaggtttgatgaggcggcactctctattcagaaagaaaaaaatatttataaggaaattgagaattatccaacttgttataagaaaacaattgctcaagtcttagttcatctacacagaaatgactatgtagctgcagaaagatgtgtccgggagagctatagcatccctgggttcaatggcagtgaagactgtgctgccctggaacagcttcttgaaggttatgaccagcaagaccaagatcaggtgtcagatgtctgcaactcaccgcttttcaagtacatggacaatgattatgctaagctgggcctgagtttggtggttccaggagggggaatcaagaagaaatcacctgcaacaccacaggccaagcctgatggtgtcactgccacggctgctgatgaagaggaagatgaatactcaggaggactatgctagtattttgcttgctgaaaagaaaagggaaacaaaggtaaaatcctgacatgccatttcaaggacttgggaatagattagggatatcctgattcattntaancctatttatcaacacctcccagntttgtgtgngggagttccccttanaactaaacacagctangttgtacg

SEQ ID NO: 456178 - DNA, 3344 bp, Homo sapiens
cacgagggcaaaagatgcctgcctgaaggaagctgttgcccatgaaaataatagggctctttttcatgctgccaaagcttatgagcaagctggaatgatgttgaaggagatgcagaaactaccagaggccgttcagctaattgagaaggccagcatgatgtatctagaaaacggcaccccagacacagcagccatggctttggagcgagctggaaagcttatagaaaatgttgatccagagaaggctgtacagttatatcaacagacagctaatgtgtttgaaaatgaagaacgcttacgacaggcagttgaattactaggaaaagcctccagactactagtacgaggacgtaggtttgatgaggcggcactctctattcagaaagaaaaaaatatttataaggaaattgagaattatccaacttgttataagaaaacaattgctcaagtcttagttcatctacacagaaatgactatgtagctgcagaaagatgtgtccgggagagctatagcatccctgggttcaatggcagtgaagactgtgctgccctggaacagcttcttgaaggttatgaccagcaagaccaagatcaggtgtcagatgtctgcaactcaccgcttttcaagtacatggacaatgattatgctaagctgggcctgagtttggtggttccaggagggggaatcaagaagaaatcacctgcaacaccacaggccaagcctgatggtgtcactgccacggctgctgatgaagaggaagatgaatactcaggaggactatgctagtattttgcttgctgaaaagaaaagggaaacaaaggtaaaatcctgacatgccatttcaaggacttgggaatagattagggatatccgtacttcattacagtcatgattttggatcctaataaagactagtttttagttaccatcttcccaaatcactcattgtatccattacctgtgaagcatatctttttctttccataagagcttttctaagacaccagcaggaattaacagaaaatgtactgtcatgttttaatacattgattaaaaaatttgcaagccaaattatacataaattatgttctaaacaaaaggggtaataagcataggtattctctcttggacacttgtaagttactgttagtgaattgttttttacgtttcatttaataattgctgctaaaggtgatgtttactgataaatcattttaaaatttttttgttttgaaaagtaaatttatcccccatgatgttagatacatttaaattattaagtcttttcagagatgagatggggacaggaagttattttgagccttacaatattatttagcccaataaaagatgcattgaagctcttatatattatgagtttgaaaaattttgaaggtagcatattgaagtgatctataaatatcttcagtcctctctgaagtgtgggtatttcttctatctaaaaaatacatacagtgactgtcttcaaatctacttggttcttgaccaaataggagctaatgggtaatgaatacctttttgtttgtttgtttgtttgttttgttttttgtttttttttttaagggtctcactcttttgcccaggctggagtgcagtggcacaatcacggctcccaggctaatgtttttatttttaatttgtaatttttttttttattttttttgttgagatggagttgctccatgttgcacaggctgttctcaaactcctaagctcaagccatctgcctgccttggcctcccaaagtgctgggattgtagacataagccacctcacccagcctatgaatatctttctaacattgtaagaatgaggtaatgtttccatcagtctaatacagatatatttcttccctccaaaacagtttattttgattgtttattttattttgattgtaactccgtcataacttgacatggaaaatgctatatactatgaaaacttagctgaaagggaagaattgttttagaaagacaatatttaaaacaccgcactgccaatatattgatcctttatagttatttcctaaaatgctgttttcgaaacattcctttttcaccctgttgtgtggcttagacccatctcgtaatctgttaattggaaagaggctacagacaccagcagtgtgcgttctgcaggtacacgctgccaaagtaattcctgctcatccatgccctgtctctgtctcttttagagtcataccttatttgagtataggttgcttaattttgctagacttcctgaaaacactaaggtggagtatcagaagtgattttagtcacagttctgcgggagagcttagaataacatcctcctttgggaggtggtctcgggtgcgtggatgttggtatacagtctttattgtaagtctgatacaaaatgctaataaatttaatgtttttcttccttaatttattggcatagttcttcaggtagcacctcatttttattaatgatattgggattaactatgaacaagctatatgtagacatttgcatttaaggacattgcagtgtttcaaagatcccatcattgcagcttgtatcctttagatccaatcggaaacttctggagtcttacattaatgctcatttgagctaattagtaatctgtttaaacagatttggcaatactttaaagatactgtagactatttatgtatagatagatcatattacccattaaagtctgggggaaaaaattttttaattttactcttcttatgtactgaaaactttttttaaaaaaggtgatgatgaagtgcattctgtagcagcagcgcagctatgctttaaaccacacaaaaggctgtgtccaggtgcagcctccttcacccttcctgcccacggtgaggattgaataaccaggacttggggatattgtttgttgtcagggttattctgtgtggtaaggaatatttgtttcacatttatacattttctttttccactcacgtaagtttctatcttgagagcatagtccaaagtgcaaaacttggtgtttacaaggaaaattgtcttccagaactccactgtcatcactttcaccaaagtggaagtttgcatgaatatgctcagaatctaatattcaatgttctgttacattgtaagtgaagtccagctacaaaatagatttaatatattgaatttatttgtacatatgcagagtacggtatttctgtatggaatctgctttattcctatttttcccaactctgatgagtagaatattaaatgtgttgttatggaaatacagattattgcttctataggaagataattatgaaaataaaacctgaaactatataaatataattgttct

SEQ ID NO: 456179 - DNA, 3479 bp, Homo sapiens
ctcccctctgctgcccttttaggcacctcagagcttgctagggccactggggcagcagcggagtatgtgatggagggacacagtcgggggaaggcaccgagtgccttgggtgtctggatgttctttcagtcgggaggaaagaaatcttgggtgatttaatcgaagatcgtctcaagtacgtatcacgaagaagtcgtgacactcgctattggacagtccttactaagcttaaaactccccgtttgacctaacccatccttgagttcttttgctttttctgtcagcgtgcagcctgaaagtggggagtcagacatttgaaaggtaagccagatgagcagagcatgtggaaacctgggtcctggggcagctgctaataatacctgtcctcctggtgtctctacaatctatgatgtcaagtacatttcacaggggacctctgctatagatcatttagacctgctttttttacatttctgtgttttgttttaggtttgatgaggcggcactctctattcagaaagaaaaaaatatttataaggaaattgagaattatccaacttgttataagaaaacaattgctcaagtcttagttcatctacacagaaatgactatgtagctgcagaaagatgtgtccgggagagctatagcatccctgggttcaatggcagtgaagactgtgctgccctggaacagcttcttgaaggttatgaccagcaagaccaagatcaggtgtcagatgtctgcaactcaccgcttttcaagtacatggacaatgattatgctaagctgggcctgagtttggtggttccaggagggggaatcaagaagaaatcacctgcaacaccacaggccaagcctgatggtgtcactgccacggctgctgatgaagaggaagatgaatactcaggaggactatgctagtattttgcttgctgaaaagaaaagggaaacaaaggtaaaatcctgacatgccatttcaaggacttgggaatagattagggatatccgtacttcattacagtcatgattttggatcctaataaagactagtttttagttaccatcttcccaaatcactcattgtatccattacctgtgaagcatatctttttctttccataagagcttttctaagacaccagcaggaattaacagaaaatgtactgtcatgttttaatacattgattaaaaaatttgcaagccaaattatacataaattatgttctaaacaaaaggggtaataagcataggtattctctcttggacacttgtaagttactgttagtgaattgttttttacgtttcatttaataattgctgctaaaggtgatgtttactgataaatcattttaaaatttttttgttttgaaaagtaaatttatcccccatgatgttagatacatttaaattattaagtcttttcagagatgagatggggacaggaagttattttgagccttacaatattatttagcccaataaaagatgcattgaagctcttatatattatgagtttgaaaaattttgaaggtagcatattgaagtgatctataaatatcttcagtcctctctgaagtgtgggtatttcttctatctaaaaaatacatacagtgactgtcttcaaatctacttggttcttgaccaaataggagctaatgggtaatgaatacctttttgtttgtttgtttgtttgttttgttttttgtttttttttttaagggtctcactcttttgcccaggctggagtgcagtggcacaatcacggctcccaggctaatgtttttatttttaatttgtaatttttttttttattttttttgttgagatggagttgctccatgttgcacaggctgttctcaaactcctaagctcaagccatctgcctgccttggcctcccaaagtgctgggattgtagacataagccacctcacccagcctatgaatatctttctaacattgtaagaatgaggtaatgtttccatcagtctaatacagatatatttcttccctccaaaacagtttattttgattgtttattttattttgattgtaactccgtcataacttgacatggaaaatgctatatactatgaaaacttagctgaaagggaagaattgttttagaaagacaatatttaaaacaccgcactgccaatatattgatcctttatagttatttcctaaaatgctgttttcgaaacattcctttttcaccctgttgtgtggcttagacccatctcgtaatctgttaattggaaagaggctacagacaccagcagtgtgcgttctgcaggtacacgctgccaaagtaattcctgctcatccatgccctgtctctgtctcttttagagtcataccttatttgagtataggttgcttaattttgctagacttcctgaaaacactaaggtggagtatcagaagtgattttagtcacagttctgcgggagagcttagaataacatcctcctttgggaggtggtctcgggtgcgtggatgttggtatacagtctttattgtaagtctgatacaaaatgctaataaatttaatgtttttcttccttaatttattggcatagttcttcaggtagcacctcatttttattaatgatattgggattaactatgaacaagctatatgtagacatttgcatttaaggacattgcagtgtttcaaagatcccatcattgcagcttgtatcctttagatccaatcggaaacttctggagtcttacattaatgctcatttgagctaattagtaatctgtttaaacagatttggcaatactttaaagatactgtagactatttatgtatagatagatcatattacccattaaagtctgggggaaaaaattttttaattttactcttcttatgtactgaaaactttttttaaaaaaggtgatgatgaagtgcattctgtagcagcagcgcagctatgctttaaaccacacaaaaggctgtgtccaggtgcagcctccttcacccttcctgcccacggtgaggattgaataaccaggacttggggatattgtttgttgtcagggttattctgtgtggtaaggaatatttgtttcacatttatacattttctttttccactcacgtaagtttctatcttgagagcatagtccaaagtgcaaaacttggtgtttacaaggaaaattgtcttccagaactccactgtcatcactttcaccaaagtggaagtttgcatgaatatgctcagaatctaatattcaatgttctgttacattgtaagtgaagtccagctacaaaatagatttaatatattgaatttatttgtacatatgcagagtacggtatttctgtatggaatctgctttattcctatttttcccaactctgatgagtagaatattaaatgtgttgttatggaaatacagattattgcttctataggaagataattatgaaaataaaacctgaaactatataaatataattgttct

SEQ ID NO: 456180 - DNA, 3416 bp, Homo sapiens
  misc_feature (2334)..(2334): n is a, c, g, or t
cacgagggcaaaagatgcctgcctgaaggaagctgttgcccatgaaaataatagggctctttttcatgctgccaaagcttatgagcaagctggaatgatgttgaaggagatgcagaaactaccagaggccgttcagctaattgagaaggccagcatgatgtatctagaaaacggcaccccagacacagcagccatggctttggagcgagctggaaagcttatagaaaatgttgatccagagaaggctgtacagttatatcaacagacagctaatgtgtttgaaaatgaagaacgcttacgacaggcagttgaattactaggaaaagcctccagactactagtacgaggacgtaggtttgatgaggcggcactctctattcagaaagaaaaaaatatttataaggaaattgagaattatccaacttgttataagaaaacaattgctcaagtcttagttcatctacacagaaatgactatgtagctgcagaaagatgtgtccgggagagctatagcatccctgggttcaatggcagtgaagactgtgctgccctggaacagcttcttgaaggttatgaccagcaagaccaagatcaggtgtcagatgtctgcaactcaccgcttttcaagtacatggacaatgattatgctaagctgggcctgagtttggtggttccaggagggggaatcaagaagaaatcacctgcaacaccacaggccaagcctgatggtgtcactgccacggctgctgatgaagaggaagatgaatactcaggaggactatgctagtattttgcttgctgaaaagaaaagggaaacaaaggtaaaatcctgacatgccatttcaaggacttgggaatagattagggatatccgtacttcattacagtcatgattttggatcctaataaagactagtttttagttaccatcttcccaaatcactcattgtatccattacctgtgaagcatatctttttctttccataagagcttttctaagacaccagcaggaattaacagaaaatgtactgtcatgttttaatacattgattaaaaaatttgcaagccaaattatacataaattatgttctaaacaaaaggggtaataagcataggtattctctcttggacacttgtaagttactgttagtgaattgttttttacgtttcatttaataattgctgctaaaggtgatgtttactgataaatcattttaaaatttttttgttttgaaaagtaaatttatcccccatgatgttagatacatttaaattattaagtcttttcagagatgagatggggacaggaagttattttgagccttacaatattatttagcccaataaaagatgcattgaagctcttatatattatgagtttgaaaaattttgaaggtagcatattgaagtgatctataaatatcttcagtcctctctgaagtgtgggtatttcttctatctaaaaaatacatacagtgactgtcttcaaatctacttggttcttgaccaaataggagctaatgggtaatgaatacctttttgtttgtttgtttgtttgttttgttttttgtttttttttttaagggtctcactcttttgcccaggctggagtgcagtggcacaatcacggctcccaggctaatgtttttatttttaatttgtaatttttttttttattttttttgttgagatggagttgctccatgttgcacaggctgttctcaaactcctaagctcaagccatctgcctgccttggcctcccaaagtgctgggattgtagacataagccacctcacccagcctatgaatatctttctaacattgtaagaatgaggtaatgtttccatcagtctaatacagatatatttcttccctccaaaacagtttattttgattgtttattttattttgattgtaactccgtcataacttgacatggaaaatgctatatactatgaaaacttagctgaaagggaagaattgttttagaaagacaatatttaaaacaccgcactgccaatatattgatcctttatagttatttcctaaaatgctgttttcgaaacattcctttttcaccctgttgtgtggcttagacccatctcgtaatctgttaattggaaagaggctacagacaccagcagtgtgcgttctgcaggtacacgctgccaaagtaattcctgctcatccatgccctgtctctgtctcttttagagtcataccttatttgagtataggttgcttaattttgctagacttcctgaaaacactaaggtggagtatcagaagtgattttagtcacagttctgcgggagagcttagaataacatcntcctttgggaggtggtctcgggtgcgtggatgttggtatacagtctttattgtaagtctgataccaacatcctcctttgggaggtggtctcgggtgcgtggatgttggtatacagtctttattgtaagtctgatacaaaatgctaataaatttaatgtttttcttccttaatttattggcatagttcttcaggtagcacctcatttttattaatgatattgggattaactatgaacaagctatatgtagacatttgcatttaaggacattgcagtgtttcaaagatcccatcattgcagcttgtatcctttagatccaatcggaaacttctggagtcttacattaatgctcatttgagctaattagtaatctgtttaaacagatttggcaatactttaaagatactgtagactatttatgtatagatagatcatattacccattaaagtctgggggaaaaaattttttaattttactcttcttatgtactgaaaactttttttaaaaaaggtgatgatgaagtgcattctgtagcagcagcgcagctatgctttaaaccacacaaaaggctgtgtccaggtgcagcctccttcacccttcctgcccacggtgaggattgaataaccaggacttggggatattgtttgttgtcagggttattctgtgtggtaaggaatatttgtttcacatttatacattttctttttccactcacgtaagtttctatcttgagagcatagtccaaagtgcaaaacttggtgtttacaaggaaaattgtcttccagaactccactgtcatcactttcaccaaagtggaagtttgcatgaatatgctcagaatctaatattcaatgttctgttacattgtaagtgaagtccagctacaaaatagatttaatatattgaatttatttgtacatatgcagagtacggtatttctgtatggaatctgctttattcctatttttcccaactctgatgagtagaatattaaatgtgttgttatggaaatacagattattgcttctataggaagataattatgaaaataaaacctgaaactatataaatataattgttct

SEQ ID NO: 456181 - DNA, 1469 bp, Homo sapiens
cacgagggcaaaagatgcctgcctgaaggaagctgttgcccatgaaaataatagggctctttttcatgctgccaaagcttatgagcaagctggaatgatgttgaaggagatgcagaaactaccagaggccgttcagctaattgagaaggccagcatgatgtatctagaaaacggcaccccagacacagcagccatggctttggagcgagctggaaagcttatagaaaatgttgatccagagaaggctgtacagttatatcaacagacagctaatgtgtttgaaaatgaagaacgcttacgacaggcagttgaattactaggaaaagcctccagactactagtacgaggacgtaggtttgatgaggcggcactctctattcagaaagaaaaaaatatttataaggaaattgagaattatccaacttgttataagaaaacaattgctcaagtcttagttcatctacacagaaatgactatgtagctgcagaaagatgtgtccgggagagctatagcatccctgggttcaatggcagtgaagactgtgctgccctggaacagcttcttgaaggttatgaccagcaagaccaagatcaggtgtcagatgtctgcaactcaccgcttttcaagtacatggacaatgattatgctaagctgggcctgagtttggtggttccaggagggggaatcaagaagaaatcacctgcaacaccacaggccaagcctgatggtgtcactgccacggctgctgatgaagaggaagatgaatactcaggaggactatgctagtattttgcttgctgaaaagaaaagggaaacaaaggtaaaatcctgacatgccatttcaaggacttgggaatagattagggatatccgtacttcattacagtcatgattttggatcctaataaagactagtttttagttaccatcttcccaaatcactcattgtatccattacctgtgaagcatatctttttctttccataagagcttttctaagacaccagcaggaattaacagaaaatgtactgtcatgttttaatacattgattaaaaaatttgcaagccaaattatacataaattatgttctaaacaaaaggggtaataagcataggtattctctcttggacacttgtaagttactgttagtgaattgttttttacgtttcatttaataattgctgctaaaggtgatgtttactgataaatcattttaaaatttttttgttttgaaaagtaaatttatcccccatgatgttagatacatttaaattattaagtcttttcagagatgagatggggacaggaagttattttgagccttacaatattatttagcccaataaaagatgcattgaagctcttatatattatgagtttgaaaaattttgaaggtagcatattgaagtgatctataaatatcttcagtcctctctgaagtgtagccaaatgaccgggatcctctag

SEQ ID NO: 456182 - DNA, 1479 bp, Homo sapiens
cacgagggcaaaagatgcctgcctgaaggaagctgttgcccatgaaaataatagggctctttttcatgctgccaaagcttatgagcaagctggaatgatgttgaaggagatgcagaaactaccagaggccgttcagctaattgagaaggccagcatgatgtatctagaaaacggcaccccagacacagcagccatggctttggagcgagctggaaagcttatagaaaatgttgatccagagaaggctgtacagttatatcaacagacagctaatgtgtttgaaaatgaagaacgcttacgacaggcagttgaattactaggaaaagcctccagactactagtacgaggacgtaggtttgatgaggcggcactctctattcagaaagaaaaaaatatttataaggaaattgagaattatccaacttgttataagaaaacaattgctcaagtcttagttcatctacacagaaatgactatgtagctgcagaaagatgtgtccgggagagctatagcatccctgggttcaatggcagtgaagactgtgctgccctggaacagcttcttgaaggttatgaccagcaagaccaagatcaggtgtcagatgtctgcaactcaccgcttttcaagtacatggacaatgattatgctaagctgggcctgagtttggtggttccaggagggggaatcaagaagaaatcacctgcaacaccacaggccaagcctgatggtgtcactgccacggctgctgatgaagaggaagatgaatactcaggaggactatgctagtattttgcttgctgaaaagaaaagggaaacaaaggtaaaatcctgacatgccatttcaaggacttgggaatagattagggatatccgtacttcattacagtcatgattttggatcctaataaagactagtttttagttaccatcttcccaaatcactcattgtatccattacctgtgaagcatatctttttctttccataagagcttttctaagacaccagcaggaattaacagaaaatgtactgtcatgttttaatacattgattaaaaaatttgcaagccaaaaaaaaaaaaaaaaaaaaaaaaaaaaaaaaaaaaaaaaaaaaaaaaaaaaaaaaaaaaaaaaaaaaaaaaaaaaaaaagaaaggaaagaaacagaacactgatatcgaccaacgatacgaacacataagagtagagtgcgccggttgcctataattatctacagacgcgccgcgacatactagatttcctaatacctgtgtttaagaggctactgatcataggagattagacattaaaaaagcaacgggcaaggcggatagactacgaatgacggaatacaacatattcgcgtgttgagtagaaaagaaccatctgtgtgggataaatagaaaaacagaactaagatagcacacgaaatctcacttattgttgtgacaagaaacactgatggaaacgcctgattgtaa

SEQ ID NO: 456183 - DNA, 461 bp, Homo sapiens
ccaagaattcggcacgagggcagaaagatgtgtccgggagagctatagcatccctgggttcaatggcagtgaagactgtgctgccctggaacagcttcttgaaggttatgaccagcaagaccaagatcaggtgtcagatgtctgcaactcaccgcttttcaagtacatggacaatgattatgctaagctgggcctgagtttggtggttccaggagggggaatcaagaagaaatcacctgcaacaccacaggccaagcctgatggtgtcactgccacggctgctgatgaagaggaagatgaatactcaggaggactatgctagtattttgcttgctgaaaagaaaagggaaacaaaggtaaaatcctgacatgccatttcaaggacttgggaatagattagggatatccgtacttcattacagtcatgattttggatcctaataaagactagtttttagtta

SEQ ID NO: 456184 - DNA, 3512 bp, Homo sapiens
cacgagggcaaaagatgcctgcctgaaggaagctgttgcccatgaaaataatagggctctttttcatgctgccaaagcttatgagcaagctggaatgatgttgattccttgtagaaaaagaagacatacagccaagaaacatgaaaaacagctcatcatcattgatcattagagaaatgcaaatcaaaaccacaatgagatctcacgccagtcagaatggtgatgattaagaagtcaggaaacaatagatgctggccaggctgtggagaaataggagatgcagaaactaccagaggccgttcagctaattgagaaggccagcatgatgtatctagaaaacggcaccccagacacagcagccatggctttggagcgagctggaaagcttatagaaaatgttgatccagagaaggctgtacagttatatcaacagacagctaatgtgtttgaaaatgaagaacgcttacgacaggcagttgaattactaggaaaagcctccagactactagtacgaggacgtaggtttgatgaggcggcactctctattcagaaagaaaaaaatatttataaggaaattgagaattatccaacttgttataagaaaacaattgctcaagtcttagttcatctacacagaaatgactatgtagctgcagaaagatgtgtccgggagagctatagcatccctgggttcaatggcagtgaagactgtgctgccctggaacagcttcttgaaggttatgaccagcaagaccaagatcaggtgtcagatgtctgcaactcaccgcttttcaagtacatggacaatgattatgctaagctgggcctgagtttggtggttccaggagggggaatcaagaagaaatcacctgcaacaccacaggccaagcctgatggtgtcactgccacggctgctgatgaagaggaagatgaatactcaggaggactatgctagtattttgcttgctgaaaagaaaagggaaacaaaggtaaaatcctgacatgccatttcaaggacttgggaatagattagggatatccgtacttcattacagtcatgattttggatcctaataaagactagtttttagttaccatcttcccaaatcactcattgtatccattacctgtgaagcatatctttttctttccataagagcttttctaagacaccagcaggaattaacagaaaatgtactgtcatgttttaatacattgattaaaaaatttgcaagccaaattatacataaattatgttctaaacaaaaggggtaataagcataggtattctctcttggacacttgtaagttactgttagtgaattgttttttacgtttcatttaataattgctgctaaaggtgatgtttactgataaatcattttaaaatttttttgttttgaaaagtaaatttatcccccatgatgttagatacatttaaattattaagtcttttcagagatgagatggggacaggaagttattttgagccttacaatattatttagcccaataaaagatgcattgaagctcttatatattatgagtttgaaaaattttgaaggtagcatattgaagtgatctataaatatcttcagtcctctctgaagtgtgggtatttcttctatctaaaaaatacatacagtgactgtcttcaaatctacttggttcttgaccaaataggagctaatgggtaatgaatacctttttgtttgtttgtttgtttgttttgttttttgtttttttttttaagggtctcactcttttgcccaggctggagtgcagtggcacaatcacggctcccaggctaatgtttttatttttaatttgtaatttttttttttattttttttgttgagatggagttgctccatgttgcacaggctgttctcaaactcctaagctcaagccatctgcctgccttggcctcccaaagtgctgggattgtagacataagccacctcacccagcctatgaatatctttctaacattgtaagaatgaggtaatgtttccatcagtctaatacagatatatttcttccctccaaaacagtttattttgattgtttattttattttgattgtaactccgtcataacttgacatggaaaatgctatatactatgaaaacttagctgaaagggaagaattgttttagaaagacaatatttaaaacaccgcactgccaatatattgatcctttatagttatttcctaaaatgctgttttcgaaacattcctttttcaccctgttgtgtggcttagacccatctcgtaatctgttaattggaaagaggctacagacaccagcagtgtgcgttctgcaggtacacgctgccaaagtaattcctgctcatccatgccctgtctctgtctcttttagagtcataccttatttgagtataggttgcttaattttgctagacttcctgaaaacactaaggtggagtatcagaagtgattttagtcacagttctgcgggagagcttagaataacatcctcctttgggaggtggtctcgggtgcgtggatgttggtatacagtctttattgtaagtctgatacaaaatgctaataaatttaatgtttttcttccttaatttattggcatagttcttcaggtagcacctcatttttattaatgatattgggattaactatgaacaagctatatgtagacatttgcatttaaggacattgcagtgtttcaaagatcccatcattgcagcttgtatcctttagatccaatcggaaacttctggagtcttacattaatgctcatttgagctaattagtaatctgtttaaacagatttggcaatactttaaagatactgtagactatttatgtatagatagatcatattacccattaaagtctgggggaaaaaattttttaattttactcttcttatgtactgaaaactttttttaaaaaaggtgatgatgaagtgcattctgtagcagcagcgcagctatgctttaaaccacacaaaaggctgtgtccaggtgcagcctccttcacccttcctgcccacggtgaggattgaataaccaggacttggggatattgtttgttgtcagggttattctgtgtggtaaggaatatttgtttcacatttatacattttctttttccactcacgtaagtttctatcttgagagcatagtccaaagtgcaaaacttggtgtttacaaggaaaattgtcttccagaactccactgtcatcactttcaccaaagtggaagtttgcatgaatatgctcagaatctaatattcaatgttctgttacattgtaagtgaagtccagctacaaaatagatttaatatattgaatttatttgtacatatgcagagtacggtatttctgtatggaatctgctttattcctatttttcccaactctgatgagtagaatattaaatgtgttgttatggaaatacagattattgcttctataggaagataattatgaaaataaaacctgaaactatataaatataattgttct

SEQ ID NO: 456185 - DNA, 2431 bp, Homo sapiens
cacgagggcaaaagatgcctgcctgaaggaagctgttgcccatgaaaataatagggctctttttcatgctgccaaagcttatgagcaagctggaatgatgttgaaggagatgcagaaactaccagaggccgttcagctaattgagaaggccagcatgatgtatctagaaaacggcaccccagacacagcagccatggctttggagcgagctggaaagcttatagaaaatgttgatccagagaaggctgtacagttatatcaacagacagctaatgtgtttgaaaatgaagaacgcttacgacaggcagttgaattactaggaaaagcctccagactactagtacgaggacgtaggtttgatgaggcggcactctctattcagaaagaaaaaaatatttataaggaaattgagaattatccaacttgttataagaaaacaattgctcaagtcttagttcatctacacagaaatgactatgtagctgcagaaagatgtgtccgggagagctatagcatccctgggttcaatggcagtgaagactgtgctgccctggaacagcttcttgaaggttatgaccagcaagaccaagatcaggtgtcagatgtctgcaactcaccgcttttcaagtacatggacaatgattatgctaagctgggcctgagtttggtggttccaggagggggaatcaagaagaaatcacctgcaacaccacaggccaagcctgatggtgtcactgccacggctgctgatgaagaggaagatgaatactcaggaggactatgctagtattttgcttgctgaaaagaaaagggaaacaaaggtaaaatcctgacatgccatttcaaggacttgggaatagattagggatatccgtacttcattacagtcatgattttggatcctaataaagactagtttttagttaccatcttcccaaatcactcattgtatccattacctgtgaagcatatctttttctttccataagagcttttctaagacaccagcaggaattaacagaaaatgtactgtcatgttttaatacattgattaaaaaatttgcaagccaaattatacataaattatgttctaaacaaaaggggtaataagcataggtattctctcttggacacttgtaagttactgttagtgaattgttttttacgtttcatttaataattgctgctaaaggtgatgtttactgataaatcattttaaaatttttttgttttgaaaagtaaatttatcccccatgatgttagatacatttaaattattaagtcttttcagagatgagatggggacaggaagttattttgagccttacaatattatttagcccaataaaagatgcattgaagctcttatatattatgagtttgaaaaattttgaaggtagcatattgaagtgatctataaatatcttcagtcctctctgaagtgtgggtatttcttctatctaaaaaatacatacagtgactgtcttcaaatctacttggttcttgaccaaataggagctaatgggtaatgaatacctttttgtttgtttgtttgtttgttttgttttttgtttttttttttaagggtctcactcttttgcccaggctggagtgcagtggcacaatcacggctcccaggctaatgtttttatttttaatttgtaatttttttttttattttttttgttgagatggagttgctccatgttgcacaggctgttctcaaactcctaagctcaagccatctgcctgccttggcctcccaaagtgctgggattgtagacataagccacctcacccagcctatgaatatctttctaacattgtaagaatgaggtaatgtttccatcagtctaatacagatatatttcttccctccaaaacagtttattttgattgtttattttattttgattgtaactccgtcataacttgacatggaaaatgctatatactatgaaaacttagctgaaagggaagaattgttttagaaagacaatatttaaaacaccgcactgccaatatattgatcctttatagttatttcctaaaatgctgttttcgaaacattcctttttcaccctgttgtgtggcttagacccatctcgtaatctgttaattggaaagaggctacagacaccagcagtgtgcgttctgcaggtacacgctgccaaagtaattcctgctcatccatgccctgtctctgtctcttttagagtcataccttatttgagtataggttgcttaattttgctagacttcctgaaaacactaaggtggagtatcagaagtgattttagtcacagttctgcgggagagcttagaataacatcctcctttgggaggtggtctcgggtgcgtggatgttggtatacagtctttattgtaagtctgatacaaaatgctaataaatttaatgtttttcttcctt

SEQ ID NO: 456186 - DNA, 926 bp, Homo sapiens
cacgagggcaaaagatgcctgcctgaaggaagctgttgcccatgaaaataatagggctctttttcatgctgccaaagcttatgagcaagctggaatgatgttgaaggagatgcagaaactaccagaggccgttcagctaattgagaaggccagcatgatgtatctagaaaacggcaccccagacacagcagccatggctttggagcgagctggaaagcttatagaaaatgttgatccagagaaggctgtacagttatatcaacagacagctaatgtgtttgaaaatgaagaacgcttacgacaggcagttgaattactaggaaaagcctccagactactagtacgaggacgtaggtttgatgaggcggcactctctattcagaaagaaaaaaatatttataaggaaattgagaattatccaacttgttataagaaaacaattgctcaagtcttagttcatctacacagaaatgactatgtagctgcagaaagatgtgtccgggagagctatagcatccctgggttcaatggcagtgaagactgtgctgccctggaacagcttcttgaaggttatgaccagcaagaccaagatcaggtgtcagatgtctgcaactcaccgcttttcaagtacatggacaatgattatgctaagctgggcctgagtttggtggttccaggagggggaatcaagaagaaatcacctgcaacaccacaggccaagcctgatggtgtcactgccacggctgctgatgaagaggaagatgaatactcaggaggactatgctagtattttgcttgctgaaaagaaaagggaaacaaaggtaaaatcctgacatgccatttcaaggacttgggaatagattagggatatccgtacttcattacagtcatgattttggatcctaataaagactagtttttagtta

SEQ ID NO: 456187 - DNA, 1491 bp, Homo sapiens
tttttttttccagccaagcagcagctttattagtggtgctgggttcttcccataccctacagcgtgctcggaagcattccgcgccgggcctgccagacacctgcgcccttctgcagccgcccgccgcatccgccgccgcagcccccagcatgtcgggcccagacgtcgagacgccgtccgccatccagatctgccggatcatgcggccagatgatgccaacgtggccggcaatgtccacggggggaccatcctgaagatgatcgaggaggcaggcgccatcatcagcacccggcattgcaacagccagaacggggagcgctgtgtggccgccctggctcgtgtcgagcgcaccgacttcctgtctcccatgtgcatcggtgaggtggcgcatgtcagcgcggagatcacctacacctccaagcactctgtggaggtgcaggtcaacgtgatgtccgaaaacatcctcacaggtgccaaaaagctgaccaataaggccaccctgtggtatgtgcccctgtcgctgaagaatgtggacaaggtcctcgaggtgcctcctgttgtgtattcccggcaggagcaggaggaggagggccggaagcggtatgaagcccagaagctggagcgcatggagaccaagtggaggaacggggacatcgtccagccagtcctcaacccagagccgaacactgtcagctacagccagtccagcttgatccacctggtggggccttcagactgcaccctgcacggctttgtgcacggaggtgtgaccatgaagctcatggatgaggtcgccgggatcgtggctgcacgccactgcaagaccaacatcgtcacagcttccgtggacgccattaattttcatgacaagatcagaaaaggctgcgtcatcaccatctcgggacgcatgaccttcacgagcaataagtccatggagatcgaggtgttggtggacgccgaccctgttgtggacagctctcagaagcgctaccgggccgccagtgccttcttcacctacgtgtcgctgagccaggaaggcaggtcgctgcctgtgccccagctggtgcccgagaccgaggacgagaagaagcgctttgaggaaggcaaagggcggtacctgcagatgaaggcgaagcgacagggccacgcggagcctcagccctagactccctcctcctgccactggtgcctcgagtagccatggcaacgggcccagtgtccagtcacttagaagttccccccttggccaaaaacccaattcacattgagagctggtgttgtctgaagttttcgtatcacagtgttaacctgtactctctcctgcaaacctacacaccaaagctttatttatatcattccagtatcaatgctacacagtgttgtcccgagcgccgggaggcgttgggcagaaaccctcgggaatgcttccgagcacgctgtagggtatgggaagaacccagcaccactaataaagctgctgcttggctgga

SEQ ID NO: 456188 - DNA, 2436 bp, Homo sapiens
tttttttcggagttgcgtgggttttaatttaaagatgtaagtacaaatctatgtgcattgtagaaaattcggaaaaggtccaactgcctagcaagtaaaaagctgtcattccagcacgtggggggtgaccgcttctcccttcttgggtgttttttggtggattttttttggtgaccccgactggcctagactccattcaagggcacatcttgtgcagtaaaacacgcatgtttcagggctcctcactgcaacacgtgcacctccaggctggcgctcagcgctcccagtaaaagctgcaggcggcggtgtagatagtcgccggcctttcctcctccccacctcgtgacgctttgtgctgcggaagcaaaggcccgttccattccccgtgtcttcccagcagccgccaccaatgctcctttctaggaaacagccttccattctctcttagggccgatcttagcgagagccgcgatgcgggcgactggtgccggggtgggttgggggcgggggtgggaatcaggccccactgccaggagcccgggccgcgccttccgctctgacctcatccggccgcccaggcactgggcgcggcagcgaatcggcggcgcgggcggccgggaacgcccagcacaaatatttaccgccgcgcggagagtgagggcccaagtccgccctgctccgccacttaggccgccccagacgcttccctcggggctgccaccgggtcgggcgcggctgccgcggctagcgggccttccccgcaccggcgcggcccaaccgccaccgaaccttctggaagcggcggctgcctgggcccccacgccgccagaatcgtacgcccgcgcgagctctctgcagccttggcggcctgggaggcggggctcggggtggggccggcgcgggggcggggtcggcgcggggaggccgcgttcgattcgcccccggcgcgcaggccccgcctcaccagccccatcgctccacctctgccctccccctttatggcgcggcccgggctcattcattccgcgccgggcctgccagacacctgcgcccttctgcagccgcccgccgcatccgccgccgcagcccccagcatgtcgggcccagacgtcgagacgccgtccgccatccagatctgccggatcatgcggccagatgatgccaacgtggccggcaatgtccacggggggaccatcctgaagatgatcgaggaggcaggcgccatcatcagcacccggcattgcaacagccagaacggggagcgctgtgtggccgccctggctcgtgtcgagcgcaccgacttcctgtctcccatgtgcatcggtgaggtggcgcatgtcagcgcggagatcacctacacctccaagcactctgtggaggtgcaggtcaacgtgatgtccgaaaacatcctcacaggtgccaaaaagctgaccaataaggccaccctgtggtatgtgcccctgtcgctgaagaatgtggacaaggtcctcgaggtgcctcctgttgtgtattcccggcaggagcaggaggaggagggccggaagcggtatgaagcccagaagctggagcgcatggagaccaagtggaggaacggggacatcgtccagccagtcctcaacccagagccgaacactgtcagctacagccagtccagcttgatccacctggtggggccttcagactgcaccctgcacggctttgtgcacggaggtgtgaccatgaagctcatggatgaggtcgccgggatcgtggctgcacgccactgcaagaccaacatcgtcacagcttccgtggacgccattaattttcatgacaagatcagaaaaggctgcgtcatcaccatctcgggacgcatgaccttcacgagcaataagtccatggagatcgaggtgttggtggacgccgaccctgttgtggacagctctcagaagcgctaccgggccgccagtgccttcttcacctacgtgtcgctgagccaggaaggcaggtcgctgcctgtgccccagctggtgcccgagaccgaggacgagaagaagcgctttgaggaaggcaaagggcggtacctgcagatgaaggcgaagcgacagggccacgcggagcctcagccctagactccctcctcctgccactggtgcctcgagtagccatggcaacgggcccagtgtccagtcacttagaagttccccccttggccaaaaacccaattcacattgagagctggtgttgtctgaagttttcgtatcacagtgttaacctgtactctctcctgcaaacctacacaccaaagctttatttatatcattccagtatcaatgctacacagtgttgtcccgagcgccgggaggcgttgggcagaaaccctcgggaatgcttccgagcacgctgtagggtatgggaagaacccagcaccactaataaagctgctgcttggctgga

SEQ ID NO: 456189 - DNA, 2651 bp, Homo sapiens
tttttttcggagttgcgtgggttttaatttaaagatgtaagtacaaatctatgtgcattgtagaaaattcggaaaaggtccaactgcctagcaagtaaaaagctgtcattccagcacgtggggggtgaccgcttctcccttcttgggtgttttttggtggattttttttggtgaccccgactggcctagactccattcaagggcacatcttgtgcagtaaaacacgcatgtttcagggctcctcactgcaacacgtgcacctccaggctggcgctcagcgctcccagtaaaagctgcaggcggcggtgtagatagtcgccggcctttcctcctccccacctcgtgacgctttgtgctgcggaagcaaaggcccgttccattccccgtgtcttcccagcagccgccaccaatgctcctttctaggaaacagccttccattctctcttagggccgatcttagcgagagccgcgatgcgggcgactggtgccggggtgggttgggggcgggggtgggaatcaggccccactgccaggagcccgggccgcgccttccgctctgacctcatccggccgcccaggcactgggcgcggcagcgaatcggcggcgcgggcggccgggaacgcccagcacaaatatttaccgccgcgcggagagtgagggcccaagtccgccctgctccgccacttaggccgccccagacgcttccctcggggctgccaccgggtcgggcgcggctgccgcggctagcgggccttccccgcaccggcgcggcccaaccgccaccgaaccttctggaagcggcggctgcctgggcccccacgccgccagaatcgtacgcccgcgcgagctctctgcagccttggcggcctgggaggcggggctcggggtggggccggcgcgggggcggggtcggcgcggggaggccgcgttcgattcgcccccggcgcgcaggccccgcctcaccagccccatcgctccacctctgccctccccctttatggcgcggcccgggctcattcattccgcgccgggcctgccagacacctgcgcccttctgcagccgcccgccgcatccgccgccgcagcccccagcatgtcgggcccagacgtcgagacgccgtccgccatccagatctgccggatcatgcggccagatgatgccaacgtggccggcaatgtccacggggggaccatcctgaagatgatcgaggaggcaggcgccatcatcagcacccggcattgcaacagccagaacggggagcgctgtgtggccgccctggctcgtgtcgagcgcaccgacttcctgtctcccatgtgcatcggtgaggtggcgcatgtcagcgcggagatcacctacacctccaagcactctgtggaggtgcaggtcaacgtgatgtccgaaaacatcctcacaggtgccaaaaagctgaccaataaggccaccctgtggtatgtgcccctgtcgctgaagaatgtggacaaggtcctcgaggtgcctcctgttgtgtattcccggcaggagcaggaggaggagggccggaagcggtatgaagcccagaagctggagcgcatggagaccaagtggaggaacggggacatcgtccagccagtcctcaacccagagccgaacactgtcagctacagccagtccagcttgatccacctggtggggccttcagactgcaccctgcacggctttgtgcacggaggtgtgaccatgaagctcatggatgaggtcgccgggatcgtggctgcacgccactgcaagaccaacatcgtcacagcttccgtggacgccattaattttcatgacaagatcagaaaaggctgcgtcatcaccatctcgggacgcatgaccttcacgagcaataagtccatggagatcgaggtgttggtggacgccgaccctgttgtggacagctctcagaagcgctaccgggccgccagtgccttcttcacctacgtgtcgctgagccaggaaggcaggtcgctgcctgtgccccagctggtgcccgagaccgaggacgagaagaagcgctttgaggaaggcaaagggcggtacctgcagatgaaggcgaagcgacagggccacgcggagcctcagccctagactccctcctcctgccactggtgcctcgagtagccatggcaacgggcccagtgtccagtcacttagaagttccccccttggccaaaaacccaattcacattgagagctggtgttgtctgaagttttcgtatcacagtgttaacctgtactctctcctgcaaacctacacaccaaagctttatttatatcattccagtatcaatgctacacagtgttgtcccgagcgccgggaggcgttgggcagaaaccctcgggaatgcttccgagcacgctgtagggtatgggaagaacccagcaccactaataaagctgctgcttggctggaaaagcggtgaatatataattagaaccatatacacacaaaaaatacagtggagaccgtttcccttaaattgtagcggattaatatacgagaactgggattaaaattaacggcgaagtttccgctaagtatatttgtttagtagatagcgaagtgtgttagcgaaaataatttggggcactttgagggaaaacgccatctgggttgaatcgatttgg

SEQ ID NO: 456190 - DNA, 2323 bp, Homo sapiens
tttttttcggagttgcgtgggttttaatttaaagatgtaagtacaaatctatgtgcattgtagaaaattcggaaaaggtccaactgcctagcaagtaaaaagctgtcattccagcacgtggggggtgaccgcttctcccttcttgggtgttttttggtggattttttttggtgaccccgactggcctagactccattcaagggcacatcttgtgcagtaaaacacgcatgtttcagggctcctcactgcaacacgtgcacctccaggctggcgctcagcgctcccagtaaaagctgcaggcggcggtgtagatagtcgccggcctttcctcctccccacctcgtgacgctttgtgctgcggaagcaaaggcccgttccattccccgtgtcttcccagcagccgccaccaatgctcctttctaggaaacagccttccattctctcttagggccgatcttagcgagagccgcgatgcgggcgactggtgccggggtgggttgggggcgggggtgggaatcaggccccactgccaggagcccgggccgcgccttccgctctgacctcatccggccgcccaggcactgggcgcggcagcgaatcggcggcgcgggcggccgggaacgcccagcacaaatatttaccgccgcgcggagagtgagggcccaagtccgccctgctccgccacttaggccgccccagacgcttccctcggggctgccaccgggtcgggcgcggctgccgcggctagcgggccttccccgcaccggcgcggcccaaccgccaccgaaccttctggaagcggcggctgcctgggcccccacgccgccagaatcgtacgcccgcgcgagctctctgcagccttggcggcctgggaggcggggctcggggtggggccggcgcgggggcggggtcggcgcggggaggccgcgttcgattcgcccccggcgcgcaggccccgcctcaccagccccatcgctccacctctgccctccccctttatggcgcggcccgggctcattcattccgcgccgggcctgccagacacctgcgcccttctgcagccgcccgccgcatccgccgccgcagcccccagcatgtcgggcccagacgtcgagacgccgtccgccatccagatctgccggatcatgcggccagatgatgccaacgtggccggcaatgtccacggggggaccatcctgaagatgatcgaggaggcaggcgccatcatcagcacccggcattgcaacagccagaacggggagcgctgtgtggccgccctggctcgtgtcgagcgcaccgacttcctgtctcccatgtgcatcggtgaggtggcgcatgtcagcgcggagatcacctacacctccaagcactctgtggaggtgcaggtcaacgtgatgtccgaaaacatcctcacaggtgccaaaaagctgaccaataaggccaccctgtggtatgtgcccctgtcgctgaagaatgtggacaaggtcctcgaggtgcctcctgttgtgtattcccggcaggagcaggaggaggagggccggaagcggtatgaagcccagaagctggagcgcatggagaccaagtggaggaacggggacatcgtccagccagtcctcaacccagagccgaacactgtcagctacagccagtccagcttgatccacctggtggggccttcagactgcaccctgcacggctttgtgcacggaggtgtgaccatgaagctcatggatgaggtcgccgggatcgtggctgcacgccactgcaagaccaacatcgtcacagcttccgtggacgccattaattttcatgacaagatcagaaaaggctgcgtcatcaccatctcgggacgcatgaccttcacgagcaataagtccatggagatcgaggtgttggtggacgccgaccctgttgtggacagctctcagaagcgctaccgggccgccagtgccttcttcacctacgtgtcgctgagccaggaaggcaggtcgctgcctgtgccccagctggtgccactggtgcctcgagtagccatggcaacgggcccagtgtccagtcacttagaagttccccccttggccaaaaacccaattcacattgagagctggtgttgtctgaagttttcgtatcacagtgttaacctgtactctctcctgcaaacctacacaccaaagctttatttatatcattccagtatcaatgctacacagtgttgtcccgagcgccgggaggcgttgggcagaaaccctcgggaatgcttccgagcacgctgtagggtatgggaagaacccagcaccactaataaagctgctgcttggctgga

SEQ ID NO: 456191 - DNA, 1320 bp, Homo sapiens
tctgatttggggaaagggagaaggggatcatgcggccagatgatgccaacgtggccggcaatgtccacggggggaccatcctgaagatgatcgaggaggcaggcgccatcatcagcacccggcattgcaacagccagaacggggagcgctgtgtggccgccctggctcgtgtcgagcgcaccgacttcctgtctcccatgtgcatcggtgaggtggcgcatgtcagcgcggagatcacctacacctccaagcactctgtggaggtgcaggtcaacgtgatgtccgaaaacatcctcacaggtgccaaaaagctgaccaataaggccaccctgtggtatgtgcccctgtcgctgaagaatgtggacaaggtcctcgaggtgcctcctgttgtgtattcccggcaggagcaggaggaggagggccggaagcggtatgaagcccagaagctggagcgcatggagaccaagtggaggaacggggacatcgtccagccagtcctcaacccagagccgaacactgtcagctacagccagtccagcttgatccacctggtggggccttcagactgcaccctgcacggctttgtgcacggaggtgtgaccatgaagctcatggatgaggtcgccgggatcgtggctgcacgccactgcaagaccaacatcgtcacagcttccgtggacgccattaattttcatgacaagatcagaaaaggctgcgtcatcaccatctcgggacgcatgaccttcacgagcaataagtccatggagatcgaggtgttggtggacgccgaccctgttgtggacagctctcagaagcgctaccgggccgccagtgccttcttcacctacgtgtcgctgagccaggaaggcaggtcgctgcctgtgccccagctggtgcccgagaccgaggacgagaagaagcgctttgaggaaggcaaagggcggtacctgcagatgaaggcgaagcgacagggccacgcggagcctcagccctagactccctcctcctgccactggtgcctcgagtagccatggcaacgggcccagtgtccagtcacttagaagttccccccttggccaaaaacccaattcacattgagagctggtgttgtctgaagttttcgtatcacagtgttaacctgtactctctcctgcaaacctacacaccaaagctttatttatatcattccagtatcaatgctacacagtgttgtcccgagcgccgggaggcgttgggcagaaaccctcgggaatgcttccgagcacgctgtagggtatgggaagaacccagcaccactaataaagctgctgcttggctgga

SEQ ID NO: 456192 - DNA, 1429 bp, Homo sapiens
tacaatgctgtttgttatcctcagtggaagaggcacaaaggggtcaccattccctttttcactatgtatcgaattatagcttcccttaaaaaaggcaatactttccaaaattgtggagcctgcattactggaaggatcatgcggccagatgatgccaacgtggccggcaatgtccacggggggaccatcctgaagatgatcgaggaggcaggcgccatcatcagcacccggcattgcaacagccagaacggggagcgctgtgtggccgccctggctcgtgtcgagcgcaccgacttcctgtctcccatgtgcatcggtgaggtggcgcatgtcagcgcggagatcacctacacctccaagcactctgtggaggtgcaggtcaacgtgatgtccgaaaacatcctcacaggtgccaaaaagctgaccaataaggccaccctgtggtatgtgcccctgtcgctgaagaatgtggacaaggtcctcgaggtgcctcctgttgtgtattcccggcaggagcaggaggaggagggccggaagcggtatgaagcccagaagctggagcgcatggagaccaagtggaggaacggggacatcgtccagccagtcctcaacccagagccgaacactgtcagctacagccagtccagcttgatccacctggtggggccttcagactgcaccctgcacggctttgtgcacggaggtgtgaccatgaagctcatggatgaggtcgccgggatcgtggctgcacgccactgcaagaccaacatcgtcacagcttccgtggacgccattaattttcatgacaagatcagaaaaggctgcgtcatcaccatctcgggacgcatgaccttcacgagcaataagtccatggagatcgaggtgttggtggacgccgaccctgttgtggacagctctcagaagcgctaccgggccgccagtgccttcttcacctacgtgtcgctgagccaggaaggcaggtcgctgcctgtgccccagctggtgcccgagaccgaggacgagaagaagcgctttgaggaaggcaaagggcggtacctgcagatgaaggcgaagcgacagggccacgcggagcctcagccctagactccctcctcctgccactggtgcctcgagtagccatggcaacgggcccagtgtccagtcacttagaagttccccccttggccaaaaacccaattcacattgagagctggtgttgtctgaagttttcgtatcacagtgttaacctgtactctctcctgcaaacctacacaccaaagctttatttatatcattccagtatcaatgctacacagtgttgtcccgagcgccgggaggcgttgggcagaaaccctcgggaatgcttccgagcacgctgtagggtatgggaagaacccagcaccactaataaagctgctgcttggctgga

SEQ ID NO: 456193 - DNA, 1392 bp, Homo sapiens
gacgtggggagacgatgctcctgcttcggagaagcttgtcactaaacgtcctcagaaaggaagtcgacagggcctgttttggggagaaggccaaacagatcatgcggccagatgatgccaacgtggccggcaatgtccacggggggaccatcctgaagatgatcgaggaggcaggcgccatcatcagcacccggcattgcaacagccagaacggggagcgctgtgtggccgccctggctcgtgtcgagcgcaccgacttcctgtctcccatgtgcatcggtgaggtggcgcatgtcagcgcggagatcacctacacctccaagcactctgtggaggtgcaggtcaacgtgatgtccgaaaacatcctcacaggtgccaaaaagctgaccaataaggccaccctgtggtatgtgcccctgtcgctgaagaatgtggacaaggtcctcgaggtgcctcctgttgtgtattcccggcaggagcaggaggaggagggccggaagcggtatgaagcccagaagctggagcgcatggagaccaagtggaggaacggggacatcgtccagccagtcctcaacccagagccgaacactgtcagctacagccagtccagcttgatccacctggtggggccttcagactgcaccctgcacggctttgtgcacggaggtgtgaccatgaagctcatggatgaggtcgccgggatcgtggctgcacgccactgcaagaccaacatcgtcacagcttccgtggacgccattaattttcatgacaagatcagaaaaggctgcgtcatcaccatctcgggacgcatgaccttcacgagcaataagtccatggagatcgaggtgttggtggacgccgaccctgttgtggacagctctcagaagcgctaccgggccgccagtgccttcttcacctacgtgtcgctgagccaggaaggcaggtcgctgcctgtgccccagctggtgcccgagaccgaggacgagaagaagcgctttgaggaaggcaaagggcggtacctgcagatgaaggcgaagcgacagggccacgcggagcctcagccctagactccctcctcctgccactggtgcctcgagtagccatggcaacgggcccagtgtccagtcacttagaagttccccccttggccaaaaacccaattcacattgagagctggtgttgtctgaagttttcgtatcacagtgttaacctgtactctctcctgcaaacctacacaccaaagctttatttatatcattccagtatcaatgctacacagtgttgtcccgagcgccgggaggcgttgggcagaaaccctcgggaatgcttccgagcacgctgtagggtatgggaagaacccagcaccactaataaagctgctgcttggctgga

SEQ ID NO: 456194 - DNA, 2402 bp, Homo sapiens
tttttttcggagttgcgtgggttttaatttaaagatgtaagtacaaatctatgtgcattgtagaaaattcggaaaaggtccaactgcctagcaagtaaaaagctgtcattccagcacgtggggggtgaccgcttctcccttcttgggtgttttttggtggattttttttggtgaccccgactggcctagactccattcaagggcacatcttgtgcagtaaaacacgcatgtttcagggctcctcactgcaacacgtgcacctccaggctggcgctcagcgctcccagtaaaagctgcaggcggcggtgtagatagtcgccggcctttcctcctccccacctcgtgacgctttgtgctgcggaagcaaaggcccgttccattccccgtgtcttcccagcagccgccaccaatgctcctttctaggaaacagccttccattctctcttagggccgatcttagcgagagccgcgatgcgggcgactggtgccggggtgggttgggggcgggggtgggaatcaggccccactgccaggagcccgggccgcgccttccgctctgacctcatccggccgcccaggcactgggcgcggcagcgaatcggcggcgcgggcggccgggaacgcccagcacaaatatttaccgccgcgcggagagtgagggcccaagtccgccctgctccgccacttaggccgccccagacgcttccctcggggctgccaccgggtcgggcgcggctgccgcggctagcgggccttccccgcaccggcgcggcccaaccgccaccgaaccttctggaagcggcggctgcctgggcccccacgccgccagaatcgtacgcccgcgcgagctctctgcagccttggcggcctgggaggcggggctcggggtggggccggcgcgggggcggggtcggcgcggggaggccgcgttcgattcgcccccggcgcgcaggccccgcctcaccagccccatcgctccacctctgccctccccctttatggcgcggcccgggctcattcattccgcgccgggcctgccagacacctgcgcccttctgcagccgcccgccgcatccgccgccgcagcccccagcatgtcgggcccagacgtcgagacgccgtccgccatccagatctgccggatcatgcggccagatgatgccaacgtggccggcaatgtccacggggggaccatcctgaagatgatcgaggaggcaggcgccatcatcagcacccggcattgcaacagccagaacggggagcgctgtgtggccgccctggctcgtgtcgagcgcaccgacttcctgtctcccatgtgcatcggtgaggtggcgcatgtcagcgcggagatcacctacacctccaagcactctgtggaggtgcaggtcaacgtgatgtccgaaaacatcctcacaggtgccaaaaagctgaccaataaggccaccctgtggtatgtgcccctgtcgctgaagaatgtggacaaggtcctcgaggtgcctcctgttgtgtattcccggcaggagcaggaggaggagggccggaagcggtatgaagcccagaagctggagcgcatggagaccaagtggaggaacggggacatcgtccagccagtcctcaacccagagccgaacactgtcagctacagccagtccagcttgatccacctggtggggccttcagactgcaccctgcacggctttgtgcacggaggtgtgaccatgaagctcatggatgaggtcgccgggatcgtggctgcacgccactgcaagaccaacatcggccattaattttcatgacaagatcagaaaaggctgcgtcatcaccatctcgggacgcatgaccttcacgagcaataagtccatggagagccgaccctgttgtggacagctctcagaagcgctaccgggccgccagtgccttcttcacctacgtgtcgctgagccaggaaggcaggtcgctgcctgtgccccagctggtgcccgagaccgaggacgagaagaagcgctttgaggaaggcaaagggcggtacctgcagatgaaggcgaagcgacagggccacgcggagcctcagccctagactccctcctcctgccactggtgcctcgagtagccatggcaacgggcccagtgtccagtcacttagaagttccccccttggccaaaaacccaattcacattgagagctggtgttgtctgaagttttcgtatcacagtgttaacctgtactctctcctgcaaacctacacaccaaagctttatttatatcattccagtatcaatgctacacagtgttgtcccgagcgccgggaggcgttgggcagaaaccctcgggaatgcttccgagcacgctgtagggtatgggaagaacccagcaccactaataaagctgctgcttggctgga

SEQ ID NO: 456195 - DNA, 1099 bp, Homo sapiens
  misc_feature (66)..(66): n is a, c, g, or t
gaatcgagctcgtacccctgactctgaacttaggctgtggcagtgtgcgggtcaacgtgatgtcgnaaacatctcacaggtgccaaaaagctgaccaataaggccaccctgtggtatgtgcccctgtcgctgaagaatgtggacaaggtcctcgaggtgcctcctgttgtgtattcccggcaggagcaggaggaggagggccggaagcggtatgaagcccagaagctggagcgcatggagaccaagtggaggaacggggacatcgtccagccagtcctcaacccagagccgaacactgtcagctacagccagtccagcttgatccacctggtggggccttcagactgcaccctgcacggctttgtgcacggaggtgtgaccatgaagctcatggatgaggtcgccgggatcgtggctgcacgccactgcaagaccaacatcgtcacagcttccgtggacgccattaattttcatgacaagatcagaaaaggctgcgtcatcaccatctcgggacgcatgaccttcacgagcaataagtccatggagatcgaggtgttggtggacgccgaccctgttgtggacagctctcagaagcgctaccgggccgccagtgccttcttcacctacgtgtcgctgagccaggaaggcaggtcgctgcctgtgccccagctggtgcccgagaccgaggacgagaagaagcgctttgaggaaggcaaagggcggtacctgcagatgaaggcgaagcgacagggccacgcggagcctcagccctagactccctcctcctgccactggtgcctcgagtagccatggcaacgggcccagtgtccagtcacttagaagttccccccttggccaaaaacccaattcacattgagagctggtgttgtctgaagttttcgtatcacagtgttaacctgtactctctcctgcaaacctacacaccaaagctttatttatatcattccagtatcaatgctacacagtgttgtcccgagcgccgggaggcgttgggcagaaaccctcgggaatgcttccgagcacgctgtagggtatgggaagaacccagcaccactaataaagctgctgcttggctgga

SEQ ID NO: 456196 - DNA, 1250 bp, Homo sapiens
gctctgtacaagtttctgttgaacatgtatttcttctgggtatctgcctaggagtggaattgctaggttatacggtccctctgtgtttatcctcttgcgaaacttcaaactgtttccaaagtacctgcacctttggctcccactggcagtggaggagggttccagtttcccccacatcctcgccagcacgtgctgttctgtgacttcaggattgcagccatcccagttgatattgtaacaaaacttgcccagcagggtgagatatctgtagaggacaggaaaagggctgttttgttagtggcttggcatatcagccatggtcgtttttttcaaaatctcctgaggaagccccatgtagcgcgtgagccacagcacgtgcggccgagcaccctgcacccctgctggctgcggcccttgctggtggctagtgggaggggagggctcgagttgtaacttgtttccagggtgtgaaataatctcctctgcctccgtgtctcatctgccgcatgtccctttctccgcaggtgtgaccatgaagctcatggatgaggtcgccgggatcgtggctgcacgccactgcaagaccaacatcgtcacagcttccgtggacgccattaattttcatgacaagatcagaaaaggctgcgtcatcaccatctcgggacgcatgaccttcacgagcaataagtccatggagatcgaggtgttggtggacgccgaccctgttgtggacagctctcagaagcgctaccgggccgccagtgccttcttcacctacgtgtcgctgagccaggaaggcaggtcgctgcctgtgccccagctggtgcccgagaccgaggacgagaagaagcgctttgaggaaggcaaagggcggtacctgcagatgaaggcgaagcgacagggccacgcggagcctcagccctagactccctcctcctgccactggtgcctcgagtagccatggcaacgggcccagtgtccagtcacttagaagttccccccttggccaaaaacccaattcacattgagagctggtgttgtctgaagttttcgtatcacagtgttaacctgtactctctcctgcaaacctacacaccaaagctttatttatatcattccagtatcaatgctacacagtgttgtcccgagcgccgggaggcgttgggcagaaaccctcgggaatgcttccgagcacgctgtagggtatgggaagaacccagcaccactaataaagctgctgcttggctgga

SEQ ID NO: 456197 - DNA, 1323 bp, Homo sapiens
gctctgtacaagtttctgttgaacatgtatttcttctgggtatctgcctaggagtggaattgctaggttatacggtccctctgtgtttatcctcttgcgaaacttcaaactgtttccaaagtacctgcacctttggctcccactggcagtggaggagggttccagtttcccccacatcctcgccagcacgtgctgttctgtgacttcaggattgcagccatcccagttgatattgtaacaaaacttgcccagcagggtgagatatctgtagaggacaggaaaagggctgttttgttagtggcttggcatatcagccatggtcgtttttttcaaaatctcctgaggaagccccatgtagcgcgtgagccacagcacgtgcggccgagcaccctgcacccctgctggctgcggcccttgctggtggctagtgggaggggagggctcgagttgtaacttgtttccagggtgtgaaataatctcctctgcctccgtgtctcatctgccgcatgtccctttctccgcaggtgtgaccatgaagctcatggatgaggtcgccgggatcgtggctgcacgccactgcaagaccaacatcgtcacagcttccgtggacgccattaattttcatgacaagatcagaaaagctcacgtaatgcctgctggcgctgaccacacagctccttcctcctctcccagcactggcacgaagtgctccctgctgcgtcatcaccatctcgggacgcatgaccttcacgagcaataagtccatggagatcgaggtgttggtggacgccgaccctgttgtggacagctctcagaagcgctaccgggccgccagtgccttcttcacctacgtgtcgctgagccaggaaggcaggtcgctgcctgtgccccagctggtgcccgagaccgaggacgagaagaagcgctttgaggaaggcaaagggcggtacctgcagatgaaggcgaagcgacagggccacgcggagcctcagccctagactccctcctcctgccactggtgcctcgagtagccatggcaacgggcccagtgtccagtcacttagaagttccccccttggccaaaaacccaattcacattgagagctggtgttgtctgaagttttcgtatcacagtgttaacctgtactctctcctgcaaacctacacaccaaagctttatttatatcattccagtatcaatgctacacagtgttgtcccgagcgccgggaggcgttgggcagaaaccctcgggaatgcttccgagcacgctgtagggtatgggaagaacccagcaccactaataaagctgctgcttggctgga

SEQ ID NO: 456198 - DNA, 1819 bp, Homo sapiens
tttttttcggagttgcgtgggttttaatttaaagatgtaagtacaaatctatgtgcattgtagaaaattcggaaaaggtccaactgcctagcaagtaaaaagctgtcattccagcacgtggggggtgaccgcttctcccttcttgggtgttttttggtggattttttttggtgaccccgactggcctagactccattcaagggcacatcttgtgcagtaaaacacgcatgtttcagggctcctcactgcaacacgtgcacctccaggctggcgctcagcgctcccagtaaaagctgcaggcggcggtgtagatagtcgccggcctttcctcctccccacctcgtgacgctttgtgctgcggaagcaaaggcccgttccattccccgtgtcttcccagcagccgccaccaatgctcctttctaggaaacagccttccattctctcttagggccgatcttagcgagagccgcgatgcgggcgactggtgccggggtgggttgggggcgggggtgggaatcaggccccactgccaggagcccgggccgcgccttccgctctgacctcatccggccgcccaggcactgggcgcggcagcgaatcggcggcgcgggcggccgggaacgcccagcacaaatatttaccgccgcgcggagagtgagggcccaagtccgccctgctccgccacttaggccgccccagacgcttccctcggggctgccaccgggtcgggcgcggctgccgcggctagcgggccttccccgcaccggcgcggcccaaccgccaccgaaccttctggaagcggcggctgcctgggcccccacgccgccagaatcgtacgcccgcgcgagctctctgcagccttggcggcctgggaggcggggctcggggtggggccggcgcgggggcggggtcggcgcggggaggccgcgttcgattcgcccccggcgcgcaggccccgcctcaccagccccatcgctccacctctgccctccccctttatggcgcggcccgggctcattcattccgcgccgggcctgccagacacctgcgcccttctgcagccgcccgccgcatccgccgccgcagcccccagcatgtcgggcccagacgtcgagacgccgtccgccatccagatctgccggatcatgcggccagatgatgccaacgtggccggcaatgtccacggggggaccatcctgaagatgatcgaggaggcaggcgccatcatcagcacccggcattgcaacagccagaacggggagcgctgtgtggccgccctggctcgtgtcgagcgcaccgacttcctgtctcccatgtgcatcggtgaggtggcgcatgtcagcgcggagatcacctacacctccaagcactctgtggaggtgcaggtcaacgtgatgtccgaaaacatcctcacaggtgccaaaaagctgaccaataaggccaccctgtggtatgtgcccctgtcgctgaagaatgtggacaaggtcctcgaggtgcctcctgttgtgccactggtgcctcgagtagccatggcaacgggcccagtgtccagtcacttagaagttccccccttggccaaaaacccaattcacattgagagctggtgttgtctgaagttttcgtatcacagtgttaacctgtactctctcctgcaaacctacacaccaaagctttatttatatcattccagtatcaatgctacacagtgttgtcccgagcgccgggaggcgttgggcagaaaccctcgggaatgcttccgagcacgctgtagggtatgggaagaacccagcaccactaataaagctgctgcttggctgga

SEQ ID NO: 456199 - DNA, 446 bp, Homo sapiens
tgcaaacctacacaccaaagctttatttatatcattccagtatcaatgctacacagtgttgtcccgagcgccgggaggcgttgggcagaaaccctcgggaatgcttccgagcacgctgtagggtatgggaagaacccagcaccactaataaagctgctgcttggctggacccacgtgtcctgggtggtcatttgtcttgggggggctgctttcccagggggtgtgggacattggggctcccgtggacagtctcagccctcccagcaccagcacctgcatgtaccctagaacctcaggcacagccacaccgattggtgtccggctggtgacttgctggctatgaatgcccatttcccgtgggtccctggtttggtgtcctggccccagacaccctggctccctggacctcataggcagcccagatgctgggaggatgtgggctcagg

SEQ ID NO: 456200 - DNA, 2558 bp, Homo sapiens
  misc_feature (2450)..(2450): n is a, c, g, or t
tttttttcggagttgcgtgggttttaatttaaagatgtaagtacaaatctatgtgcattgtagaaaattcggaaaaggtccaactgcctagcaagtaaaaagctgtcattccagcacgtggggggtgaccgcttctcccttcttgggtgttttttggtggattttttttggtgaccccgactggcctagactccattcaagggcacatcttgtgcagtaaaacacgcatgtttcagggctcctcactgcaacacgtgcacctccaggctggcgctcagcgctcccagtaaaagctgcaggcggcggtgtagatagtcgccggcctttcctcctccccacctcgtgacgctttgtgctgcggaagcaaaggcccgttccattccccgtgtcttcccagcagccgccaccaatgctcctttctaggaaacagccttccattctctcttagggccgatcttagcgagagccgcgatgcgggcgactggtgccggggtgggttgggggcgggggtgggaatcaggccccactgccaggagcccgggccgcgccttccgctctgacctcatccggccgcccaggcactgggcgcggcagcgaatcggcggcgcgggcggccgggaacgcccagcacaaatatttaccgccgcgcggagagtgagggcccaagtccgccctgctccgccacttaggccgccccagacgcttccctcggggctgccaccgggtcgggcgcggctgccgcggctagcgggccttccccgcaccggcgcggcccaaccgccaccgaaccttctggaagcggcggctgcctgggcccccacgccgccagaatcgtacgcccgcgcgagctctctgcagccttggcggcctgggaggcggggctcggggtggggccggcgcgggggcggggtcggcgcggggaggccgcgttcgattcgcccccggcgcgcaggccccgcctcaccagccccatcgctccacctctgccctccccctttatggcgcggcccgggctcattcattccgcgccgggcctgccagacacctgcgcccttctgcagccgcccgccgcatccgccgccgcagcccccagcatgtcgggcccagacgtcgagacgccgtccgccatccagatctgccggatcatgcggccagatgatgccaacgtggccggcaatgtccacggggggaccatcctgaagatgatcgaggaggcaggcgccatcatcagcacccggcattgcaacagccagaacggggagcgctgtgtggccgccctggctcgtgtcgagcgcaccgacttcctgtctcccatgtgcatcggtgaggtggcgcatgtcagcgcggagatcacctacacctccaagcactctgtggaggtgcaggtcaacgtgatgtccgaaaacatcctcacaggtgccaaaaagctgaccaataaggccaccctgtggtatgtgcccctgtcgctgaagaatgtggacaaggtcctcgaggtgcctcctgttgtgtattcccggcaggagcaggaggaggagggccggaagcggtatgaagcccagaagctggagcgcatggagaccaagtggaggaacggggacatcgtccagccagtcctcaacccagagccgaacactgtcagctacagccagtccagcttgatccacctggtggggccttcagactgcaccctgcacggctttgtgcacggaggtgtgaccatgaagctcatggatgaggtcgccgggatcgtggctgcacgccactgcaagaccaacatcgtcacagcttccgtggacgccattaattttcatgacaagatcagaaaaggctgcgtcatcaccatctcgggacgcatgaccttcacgagcaataagtccatggagatcgaggtgttggtggacgccgaccctgttgtggacagctctcagaagcgctaccgggccgccagtgccttcttcacctacgtgtcgctgagccaggaaggcaggtcgctgcctgtgccccagctggtgcccgagaccgaggacgagaagaagcgctttgaggaaggcaaagggcggtacctgcagatgaaggcgaagcgacagggccacgcggagcctcagccctagactccctcctcctgccactggtgcctcgagtagccatggcaacgggcccagtgtccagtcacttagaagttccccccttggccaaaaacccaattcacattgagagctggtgttgtctgaagttttcgtatcacagtgttaacctgtactctctcctgcaaacctacacaccaaagctttatttatatcattccagtatcaatgctacacagtgttgtcccgagcgccgggaggcgttgggcagaaaccctcgggaatgcttccgagcacgctgtagggtatgggaagaacccagcaccactaataaagctgctgcttggctggaaacaacaaaaaaanaaaaactcggggtctttttggggggggaaaggtttaaaggccggctctctggttccgccccgctttggaaagggaatgcggcccatagggtatcgacgtgctcacaag

SEQ ID NO: 456201 - DNA, 1616 bp, Homo sapiens
gcggtcctaggaggagcaggagcctggtgctttctatcagggagggatcacaccggctcactgctgagccggccaggcagacacaggcttgggctctgctgggcatcatacttgtcactgggtaaacagtttgcccacttaccgcaggatgaagctgcttgccagggctctccggctctgtgagtttgggaggcaggcatcttccaggaggctggtggctggccagggatgtgtggggccccggcgagggtgctgcgctcccgtccaggtggttgggcccagggctgatctcccaccctgtggagcctgcattactggaaggatcatgcggccagatgatgccaacgtggccggcaatgtccacggggggaccatcctgaagatgatcgaggaggcaggcgccatcatcagcacccggcattgcaacagccagaacggggagcgctgtgtggccgccctggctcgtgtcgagcgcaccgacttcctgtctcccatgtgcatcggtgaggtggcgcatgtcagcgcggagatcacctacacctccaagcactctgtggaggtgcaggtcaacgtgatgtccgaaaacatcctcacaggtgccaaaaagctgaccaataaggccaccctgtggtatgtgcccctgtcgctgaagaatgtggacaaggtcctcgaggtgcctcctgttgtgtattcccggcaggagcaggaggaggagggccggaagcggtatgaagcccagaagctggagcgcatggagaccaagtggaggaacggggacatcgtccagccagtcctcaacccagagccgaacactgtcagctacagccagtccagcttgatccacctggtggggccttcagactgcaccctgcacggctttgtgcacggaggtgtgaccatgaagctcatggatgaggtcgccgggatcgtggctgcacgccactgcaagaccaacatcgtcacagcttccgtggacgccattaattttcatgacaagatcagaaaaggctgcgtcatcaccatctcgggacgcatgaccttcacgagcaataagtccatggagatcgaggtgttggtggacgccgaccctgttgtggacagctctcagaagcgctaccgggccgccagtgccttcttcacctacgtgtcgctgagccaggaaggcaggtcgctgcctgtgccccagctggtgcccgagaccgaggacgagaagaagcgctttgaggaaggcaaagggcggtacctgcagatgaaggcgaagcgacagggccacgcggagcctcagccctagactccctcctcctgccactggtgcctcgagtagccatggcaacgggcccagtgtccagtcacttagaagttccccccttggccaaaaacccaattcacattgagagctggtgttgtctgaagttttcgtatcacagtgttaacctgtactctctcctgcaaacctacacaccaaagctttatttatatcattccagtatcaatgctacacagtgttgtcccgagcgccgggaggcgttgggcagaaaccctcgggaatgcttccgagcacgctgtagggtatgggaagaacccagcaccactaataaagctgctgcttggctgga

SEQ ID NO: 456202 - DNA, 1414 bp, Homo sapiens
gcagggagctgggacagtcctgggtcaggcaaggactctgtgatgcttccctgctccctcgcctttctctgcatctgatcctgggatgtcctagccaccatggctttccagctgagcaggatcatgcggccagatgatgccaacgtggccggcaatgtccacggggggaccatcctgaagatgatcgaggaggcaggcgccatcatcagcacccggcattgcaacagccagaacggggagcgctgtgtggccgccctggctcgtgtcgagcgcaccgacttcctgtctcccatgtgcatcggtgaggtggcgcatgtcagcgcggagatcacctacacctccaagcactctgtggaggtgcaggtcaacgtgatgtccgaaaacatcctcacaggtgccaaaaagctgaccaataaggccaccctgtggtatgtgcccctgtcgctgaagaatgtggacaaggtcctcgaggtgcctcctgttgtgtattcccggcaggagcaggaggaggagggccggaagcggtatgaagcccagaagctggagcgcatggagaccaagtggaggaacggggacatcgtccagccagtcctcaacccagagccgaacactgtcagctacagccagtccagcttgatccacctggtggggccttcagactgcaccctgcacggctttgtgcacggaggtgtgaccatgaagctcatggatgaggtcgccgggatcgtggctgcacgccactgcaagaccaacatcgtcacagcttccgtggacgccattaattttcatgacaagatcagaaaaggctgcgtcatcaccatctcgggacgcatgaccttcacgagcaataagtccatggagatcgaggtgttggtggacgccgaccctgttgtggacagctctcagaagcgctaccgggccgccagtgccttcttcacctacgtgtcgctgagccaggaaggcaggtcgctgcctgtgccccagctggtgcccgagaccgaggacgagaagaagcgctttgaggaaggcaaagggcggtacctgcagatgaaggcgaagcgacagggccacgcggagcctcagccctagactccctcctcctgccactggtgcctcgagtagccatggcaacgggcccagtgtccagtcacttagaagttccccccttggccaaaaacccaattcacattgagagctggtgttgtctgaagttttcgtatcacagtgttaacctgtactctctcctgcaaacctacacaccaaagctttatttatatcattccagtatcaatgctacacagtgttgtcccgagcgccgggaggcgttgggcagaaaccctcgggaatgcttccgagcacgctgtagggtatgggaagaacccagcaccactaataaagctgctgcttggctgga

SEQ ID NO: 456203 - DNA, 1685 bp, Homo sapiens
gcggtcctaggaggagcaggagcctggtgctttctatcagggagggatcacaccggctcactgctgagccggccaggcagacacaggcttgggctctgctgggcatcatacttgtcactgggtaaacagtttgcccacttaccgcaggatgaagctgcttgccagggctctccggctctgtgagtttgggaggcaggcatcttccaggaggctggtggctggccagggatgtgtggggccccggcgagggtgctgcgctcccgtccaggtggttgggtgcccgagggtcgtgtatcttcgaccacttcctagtcggaagcctcttcagtgtactcggtaacgcgagtcactgtctggccagaactgcagtgccatatgcgtggtgccggccaagtgctgccatcgtgcggtggaccatccgtgaagactgattgcgacggagtgccgggtcgcccatcactcagcctgcccggcatttgtcaaggcagtgcctgacacggcggtacgtgagcgctgtgtggccgccctggctcgtgtcgagcgcaccgacttcctgtctcccatgtgcatcggtgaggtggcgcatgtcagcgcggagatcacctacacctccaagcactctgtggaggtgcaggtcaacgtgatgtccgaaaacatcctcacaggtgccaaaaagctgaccaataaggccaccctgtggtatgtgcccctgtcgctgaagaatgtggacaaggtcctcgaggtgcctcctgttgtgtattcccggcaggagcaggaggaggagggccggaagcggtatgaagcccagaagctggagcgcatggagaccaagtggaggaacggggacatcgtccagccagtcctcaacccagagccgaacactgtcagctacagccagtccagcttgatccacctggtggggccttcagactgcaccctgcacggctttgtgcacggaggtgtgaccatgaagctcatggatgaggtcgccgggatcgtggctgcacgccactgcaagaccaacatcgtcacagcttccgtggacgccattaattttcatgacaagatcagaaaaggctgcgtcatcaccatctcgggacgcatgaccttcacgagcaataagtccatggagatcgaggtgttggtggacgccgaccctgttgtggacagctctcagaagcgctaccgggccgccagtgccttcttcacctacgtgtcgctgagccaggaaggcaggtcgctgcctgtgccccagctggtgcccgagaccgaggacgagaagaagcgctttgaggaaggcaaagggcggtacctgcagatgaaggcgaagcgacagggccacgcggagcctcagccctagactccctcctcctgccactggtgcctcgagtagccatggcaacgggcccagtgtccagtcacttagaagttccccccttggccaaaaacccaattcacattgagagctggtgttgtctgaagttttcgtatcacagtgttaacctgtactctctcctgcaaacctacacaccaaagctttatttatatcattccagtatcaatgctacacagtgttgtcccgagcgccgggaggcgttgggcagaaaccctcgggaatgcttccgagcacgctgtagggtatgggaagaacccagcaccactaataaagctgctgcttggctgga

SEQ ID NO: 456204 - DNA, 2251 bp, Homo sapiens
tttttttcggagttgcgtgggttttaatttaaagatgtaagtacaaatctatgtgcattgtagaaaattcggaaaaggtccaactgcctagcaagtaaaaagctgtcattccagcacgtggggggtgaccgcttctcccttcttgggtgttttttggtggattttttttggtgaccccgactggcctagactccattcaagggcacatcttgtgcagtaaaacacgcatgtttcagggctcctcactgcaacacgtgcacctccaggctggcgctcagcgctcccagtaaaagctgcaggcggcggtgtagatagtcgccggcctttcctcctccccacctcgtgacgctttgtgctgcggaagcaaaggcccgttccattccccgtgtcttcccagcagccgccaccaatgctcctttctaggaaacagccttccattctctcttagggccgatcttagcgagagccgcgatgcgggcgactggtgccggggtgggttgggggcgggggtgggaatcaggccccactgccaggagcccgggccgcgccttccgctctgacctcatccggccgcccaggcactgggcgcggcagcgaatcggcggcgcgggcggccgggaacgcccagcacaaatatttaccgccgcgcggagagtgagggcccaagtccgccctgctccgccacttaggccgccccagacgcttccctcggggctgccaccgggtcgggcgcggctgccgcggctagcgggccttccccgcaccggcgcggcccaaccgccaccgaaccttctggaagcggcggctgcctgggcccccacgccgccagaatcgtacgcccgcgcgagctctctgcagccttggcggcctgggaggcggggctcggggtggggccggcgcgggggcggggtcggcgcggggaggccgcgttcgattcgcccccggcgcgcaggccccgcctcaccagccccatcgctccacctctgccctccccctttatggcgcggcccgggctcattcattccgcgccgggcctgccagacacctgcgcccttctgcagccgcccgccgcatccgccgccgcagcccccagcatgtcgggcccagacgtcgagacgccgtccgccatccagatctgccggatcatgcggccagatgatgccaacgtggccggcaatgtccacggggggaccatcctgaagatgatcgaggaggcaggcgccatcatcagcacccggcattgcaacagccagaacggggagcgctgtgtggccgccctggctcgtgtcgagcgcaccgacttcctgtctcccatgtgcatcggtgaggtggcgcatgtcagcgcggagatcacctacacctccaagcactctgtggaggtgcaggtcaacgtgatgtccgaaaacatcctcacaggtgccaaaaagctgaccaataaggccaccctgtggtatgtgcccctgtcgctgaagaatgtggacaaggtcctcgaggtgcctcctgttgtgtattcccggcaggagcaggaggaggagggccggaagcggtatgaagcccagaagctggagcgcatggagaccaagtggaggaacggggacatcgtccagccagtcctcaacccagagccgaacactgtcagctacagccagtccagcttgatccacctggtggggccttcagactgcaccctgcacggctttgtgcacggaggtgtgaccatgaagctcatggatgaggtcgccgggatcgtggctgcacgccactgcaagaccaacatcgtcacagcttccgtggacgccattaattttcatgacaagatcagaaaagcccgagaccgaggacgagaagaagcgctttgaggaaggcaaagggcggtacctgcagatgaaggcgaagcgacagggccacgcggagcctcagccctagactccctcctcctgccactggtgcctcgagtagccatggcaacgggcccagtgtccagtcacttagaagttccccccttggccaaaaacccaattcacattgagagctggtgttgtctgaagttttcgtatcacagtgttaacctgtactctctcctgcaaacctacacaccaaagctttatttatatcattccagtatcaatgctacacagtgttgtcccgagcgccgggaggcgttgggcagaaaccctcgggaatgcttccgagcacgctgtagggtatgggaagaacccagcaccactaataaagctgctgcttggctgga

SEQ ID NO: 456205 - DNA, 1996 bp, Homo sapiens
  misc_feature (1746)..(1746): n is a, c, g, or t
  misc_feature (1758)..(1758): n is a, c, g, or t
  misc_feature (1827)..(1827): n is a, c, g, or t
  misc_feature (1924)..(1924): n is a, c, g, or t
tttttttcggagttgcgtgggttttaatttaaagatgtaagtacaaatctatgtgcattgtagaaaattcggaaaaggtccaactgcctagcaagtaaaaagctgtcattccagcacgtggggggtgaccgcttctcccttcttgggtgttttttggtggattttttttggtgaccccgactggcctagactccattcaagggcacatcttgtgcagtaaaacacgcatgtttcagggctcctcactgcaacacgtgcacctccaggctggcgctcagcgctcccagtaaaagctgcaggcggcggtgtagatagtcgccggcctttcctcctccccacctcgtgacgctttgtgctgcggaagcaaaggcccgttccattccccgtgtcttcccagcagccgccaccaatgctcctttctaggaaacagccttccattctctcttagggccgatcttagcgagagccgcgatgcgggcgactggtgccggggtgggttgggggcgggggtgggaatcaggccccactgccaggagcccgggccgcgccttccgctctgacctcatccggccgcccaggcactgggcgcggcagcgaatcggcggcgcgggcggccgggaacgcccagcacaaatatttaccgccgcgcggagagtgagggcccaagtccgccctgctccgccacttaggccgccccagacgcttccctcggggctgccaccgggtcgggcgcggctgccgcggctagcgggccttccccgcaccggcgcggcccaaccgccaccgaaccttctggaagcggcggctgcctgggcccccacgccgccagaatcgtacgcccgcgcgagctctctgcagccttggcggcctgggaggcggggctcggggtggggccggcgcgggggcggggtcggcgcggggaggccgcgttcgattcgcccccggcgcgcaggccccgcctcaccagccccatcgctccacctctgccctccccctttatggcgcggcccgggctcattcattccgcgccgggcctgccagacacctgcgcccttctgcagccgcccgccgcatccgccgccgcagcccccagcatgtcgggcccagacgtcgagacgccgtccgccatccagatctgccggatcatgcggccagatgatgccaacgtggccggcaatgtccacggggggaccatcctgaagatgatcgaggaggcaggcgccatcatcagcacccggcattgcaacagccagaacggggagcgctgtgtggccgccctggctcgtgtcgagcgcaccgacttcctgtctcccatgtgcatcggtgaggtggcgcatgtcagcgcggagatcacctacacctccaagcactctgtggaggtgcaggtcaacgtgatgtccgaaaacatcctcacaggtgccaaaaagctgaccaataaggccaccctgtggtatgtgcccctgtcgctgaagaatgtggacaaggtcctcgaggtgcctcctgttgtgtattcccggcaggagcaggaggaggagggccggaagcggtatgaagcccagaagctggagcgcatggagaccaagtggaggaacggggacatcgtccagccagtcctcaacccagagccgaacactgtcagctacagccagtccagcttgatccacctggtggggccttcagactgcaccctgcacggctttgtgcacggaggtgtgaccatgaagctcataccacaggtgccaaaangctgaacgcggngtcagatctgtggtttttctacttgaaggacacaatgttttccaaactagcacatttgcagaggtttgntgtacttagtcgcggagttcattcttcagaggcttctgctacatctgttggaactaaaaaaacagtccaagggcctccaacctctgatgacattttnggaaagggaatattaagtatggtggacacaactaccatcccttttacctggtaggccctgggagaggaggga

SEQ ID NO: 456206 - DNA, 1934 bp, Homo sapiens
tttttttcggagttgcgtgggttttaatttaaagatgtaagtacaaatctatgtgcattgtagaaaattcggaaaaggtccaactgcctagcaagtaaaaagctgtcattccagcacgtggggggtgaccgcttctcccttcttgggtgttttttggtggattttttttggtgaccccgactggcctagactccattcaagggcacatcttgtgcagtaaaacacgcatgtttcagggctcctcactgcaacacgtgcacctccaggctggcgctcagcgctcccagtaaaagctgcaggcggcggtgtagatagtcgccggcctttcctcctccccacctcgtgacgctttgtgctgcggaagcaaaggcccgttccattccccgtgtcttcccagcagccgccaccaatgctcctttctaggaaacagccttccattctctcttagggccgatcttagcgagagccgcgatgcgggcgactggtgccggggtgggttgggggcgggggtgggaatcaggccccactgccaggagcccgggccgcgccttccgctctgacctcatccggccgcccaggcactgggcgcggcagcgaatcggcggcgcgggcggccgggaacgcccagcacaaatatttaccgccgcgcggagagtgagggcccaagtccgccctgctccgccacttaggccgccccagacgcttccctcggggctgccaccgggtcgggcgcggctgccgcggctagcgggccttccccgcaccggcgcggcccaaccgccaccgaaccttctggaagcggcggctgcctgggcccccacgccgccagaatcgtacgcccgcgcgagctctctgcagccttggcggcctgggaggcggggctcggggtggggccggcgcgggggcggggtcggcgcggggaggccgcgttcgattcgcccccggcgcgcaggccccgcctcaccagccccatcgctccacctctgccctccccctttatggcgcggcccgggctcattcattccgcgccgggcctgccagacacctgcgcccttctgcagccgcccgccgcatccgccgccgcagcccccagcatgtcgggcccagacgtcgagacgccgtccgccatccagatctgccggatcatgcggccagatgatgccaacgtggccggcaatgtccacggggggaccatcctgaagatgatcgaggaggcaggcgccatcatcagcacccggcattgcaacagccagaacggggagcgctgtgtggccgccctggctcgtgtcgagcgcaccgacttcctgtctcccatgtgcatcggtgaggtggcgcatgtcagcgcggagatcacctacacctccaagcactctgtggaggtgcaggtcaacgtgatgtccgaaaacatcctcacaggtgccaaaaagctgaccaataaggccaccctgtggtatgtgcccctgtcgctgaagaatgtggacaaggtcctcgaggtgcctcctgttgtgtattcccggcaggagcaggaggaggagggccggaagcggtatgaagcccagaagctggagcgcatggagaccaagtggaggaacggggacatcgtccagccagtcctcaacccagccactggtgcctcgagtagccatggcaacgggcccagtgtccagtcacttagaagttccccccttggccaaaaacccaattcacattgagagctggtgttgtctgaagttttcgtatcacagtgttaacctgtactctctcctgcaaacctacacaccaaagctttatttatatcattccagtatcaatgctacacagtgttgtcccgagcgccgggaggcgttgggcagaaaccctcgggaatgcttccgagcacgctgtagggtatgggaagaacccagcaccactaataaagctgctgcttggctgga

SEQ ID NO: 456207 - DNA, 1637 bp, Homo sapiens
  misc_feature (454)..(454): n is a, c, g, or t
gcctttcttattggaatgaagctagttgggataggaatgaaaggttaaatcatagaactcagtccctgcatttctgctgggatcttggcttttcagtcggaggaaaattctccaaaaacattctccatgtgaggatgagcaaatatgaagggatagcattgttgccacgttcattttctgtctgggcaaggccatggggtggaaagagccaaagctaagctgaagctccacagagctcacaccatgttatctacttgagggagtgggaggtgtttgaagactaaagccaactctttttggctaagaatcttttctttggtagaacttctgtctcctcccctctaggaggatcaccatctcacattttaaaagttaggtgctctttgtatgcgaggattgggattgttaggggcctgtgttcgtgatgatcactatcatggagtcatttcttgtngggaatagttagagggtaagatcagagataggtacttagttcaagaagactctctgaagctcccaaactgtagatatgtcctgtgtgcgaactggctggctttacagaagtcctgatggaagtgggtttattgttttttgactcgttaccaaccctctgcttactccttcccctcaaaaaagggaagctgacttctcaggttagccagcagctcactcatacttttttctctctctattccattggctgatctgctgacttggggctctgaatctggatactctccatcaccggttggctgctgtcaccatttccttcctcgttgatggcactactagtggtcaagcagaggatgcagatgtacaactcaccataccaccgggtgacagactgtgtacgggcagtgtggcaaaatgaaggggccggggccttttaccgcagctacaccacccagctgaccatgaacgttcctttccaagccattcacttcatgacctatgaattcctgcaggagcactttaacccccagagacggtacaacccaagctcccacgtcctctctggagcttgcgcaggagctgtagctgccgcagccacaaccccactggacgtttgcaaaacactgctcaacacccaggagtccttggctttgaactcacacattacaggacatatcacaggcatggctagtgccttcaggacggtatatcaagtaggtggggtgaccgcctatttccgaggggtgcaggccagagtaatttaccagatcccctccacagccatcgcatggtctgtgtatgagttcttcaaatacctaatcactaaaaggcaagaagagtggagggctggcaagtgaagtagcactgaacgaagccaggggttcagatgacactgctgcatcctggtcacattctctgtctcctggaatgctcccacctcaagtggagttagaaggaaggtagaggggctctcccccaggattttggtgttttgactaacaccagttcctgccaacctctgttgccaccacctttccttccaggccctaagcacgtgcagcaaagcacaccacagcacctttgataacctctctccatcctgggcctgatgacctgctctagactgttatagagggataagcagctcattcccctggttcctaataaaaagcctttaaattaaa

SEQ ID NO: 456208 - DNA, 1547 bp, Homo sapiens
caagcgggagccggaggccccgggctctctgggccgcgcctgaggcggacactacggggccggggggcggcggcggcagtggtggcagcggcggcgggggtgggcgccgcagctggcccgggtggatggagttggaggggcggggtgctggcggtgtggcgggggggccggcggcagggcccgggcggagccccggggagtcggcgctgctggacgggtggctgcagcggggcgtgggccggggggccggcggcggggaggccggggcctgcaggcccccggtacgacaagatccggactccggcccggactacgaggcgctgccggctggagccactgtcaccacgcacatggtggcaggcgccgtggcagggatcctggagcactgcgtgatgtaccccatcgactgcgtcaagacccggatgcagagtctacagcctgacccagctgcccgctatcgcaatgtgttggaggccctctggaggattataagaacggagggcctatggaggcccatgagggggctgaacgtcacagcaacaggcgcagggcctgcccacgccctttattttgcctgctacgaaaagttaaaaaagacattgagtgatgtaatccaccctgggggcaatagccatattgccaatggtgcggccgggtgtgtggcaacattacttcatgatgcagccatgaaccctgcggaagtggtcaagcagaggatgcagatgtacaactcaccataccaccgggtgacagactgtgtacgggcagtgtggcaaaatgaaggggccggggccttttaccgcagctacaccacccagctgaccatgaacgttcctttccaagccattcacttcatgacctatgaattcctgcaggagcactttaacccccagagacggtacaacccaagctcccacgtcctctctggagcttgcgcaggagctgtagctgccgcagccacaaccccactggacgtttgcaaaacactgctcaacacccaggagtccttggctttgaactcacacattacaggacatatcacaggcatggctagtgccttcaggacggtatatcaagtaggtggggtgaccgcctatttccgaggggtgcaggccagagtaatttaccagatcccctccacagccatcgcatggtctgtgtatgagttcttcaaatacctaatcactaaaaggcaagaagagtggagggctggcaagtgaagtagcactgaacgaagccaggggttcagatgacactgctgcatcctggtcacattctctgtctcctggaatgctcccacctcaagtggagttagaaggaaggtagaggggctctcccccaggattttggtgttttgactaacaccagttcctgccaacctctgttgccaccacctttccttccaggccctaagcacgtgcagcaaagcacaccacagcacctttgataacctctctccatcctgggcctgatgacctgctctagactgttatagagggataagcagctcattcccctggttcctaataaaaagcctttaaattaaa

SEQ ID NO: 456209 - DNA, 2423 bp, Homo sapiens
cgacgtggtgcgggccaatggccgcggtcaaagtatcaagagtggttgagcctatcaaagttcagccttaagtttctcccgcccttctaaaagtcagaggcgggttgatcgcacatgtcggccaatcagtgaccaataaacaagaagcttctaagatcaaaggggaaaaggtgggatgtaggcgctagcaacgcctcagggcggaggaatgacaggcgacttcgctaatactaccggctgatttttcgtacgtaaacccggatgcagagtctacagcctgacccagctgcccgctatcgcaatgtgttggaggccctctggaggattataagaacggagggcctatggaggcccatgagggggctgaacgtcacagcaacaggcgcagggcctgcccacgccctttattttgcctgctacgaaaagtattgagccttcctgtgctggttcccccactttcccaactctttgggctttgctgctgtcagtgctttccagtctcagcatggtttggagctgaagctttgggctgggataggccagattataagggagggacttccaaacctgatgttctcagacaacgggccgcttcaaccctgccttttcctttggggcacctcaacaaagggttacagtatcctcccttacctaccagcttgacttgttcctctcatctccctggcatcaacttctaatgccctggtaatgtggagacacactgaactacccccagtctatgtttgacagttgggtggtgtcctgctccttagggcaggattggaggcgacccagccagccacccaaggaagatactaatgaagcccctgctttttgcctcaccttttcaggatcccaactcaccagaggcagtttgtgttgagaacatgacaaagcctcatgacaaaatgaatgggggtggggccaaggaactgcatgaagaaaccagaaggttgtgtggaagtaagagaaaggatagcagcctagggctttaggaccggctggaaaccaagttgagtgtggagaggatgaggggtagagtagttcaggacctgaacgaaagatctttgtagacaaatgttaggctctgcaaatgggttctgcggcaggactgaggtgggattctgtggtgaggttctgtgagatctgaccacctggcccccgtatctccctccactggtggcaggtgatgtgctggcatccctaggcagcagtgtatctgcttcctgtctggggtgtgagctgcatttattctcagaatgatctttattgataagacttgagctggccttcctatcatggatgtggaatacattagtgaccttacaaagttggtgggaacagatactttaccttcttaaacaggagtttaggagcagtgggtccccatcttttggactagctcttaacgttacttttccccgctgtagtgtagcacagccactccccttcactgggggacctcaatgagttggtcagctctcttggccttacatgtggcagttgttttcttgtttgcaggtgcggccgggtgtgtggcaacattacttcatgatgcagccatgaaccctgcggaagtggtcaagcagaggatgcagatgtacaactcaccataccaccgggtgacagactgtgtacgggcagtgtggcaaaatgaaggggccggggccttttaccgcagctacaccacccagctgaccatgaacgttcctttccaagccattcacttcatgacctatgaattcctgcaggagcactttaacccccagagacggtacaacccaagctcccacgtcctctctggagcttgcgcaggagctgtagctgccgcagccacaaccccactggacgtttgcaaaacactgctcaacacccaggagtccttggctttgaactcacacattacaggacatatcacaggcatggctagtgccttcaggacggtatatcaagtaggtggggtgaccgcctatttccgaggggtgcaggccagagtaatttaccagatcccctccacagccatcgcatggtctgtgtatgagttcttcaaatacctaatcactaaaaggcaagaagagtggagggctggcaagtgaagtagcactgaacgaagccaggggttcagatgacactgctgcatcctggtcacattctctgtctcctggaatgctcccacctcaagtggagttagaaggaaggtagaggggctctcccccaggattttggtgttttgactaacaccagttcctgccaacctctgttgccaccacctttccttccaggccctaagcacgtgcagcaaagcacaccacagcacctttgataacctctctccatcctgggcctgatgacctgctctagactgttatagagggataagcagctcattcccctggttcctaataaaaagcctttaaattaaa

SEQ ID NO: 456210 - DNA, 2516 bp, Homo sapiens
cgacgtggtgcgggccaatggccgcggtcaaagtatcaagagtggttgagcctatcaaagttcagccttaagtttctcccgcccttctaaaagtcagaggcgggttgatcgcacatgtcggccaatcagtgaccaataaacaagaagcttctaagatcaaaggggaaaaggtgggatgtaggcgctagcaacgcctcagggcggaggaatgacaggcgacttcgctaatactaccggctgatttttcgtacgtaaacccggatgcagagtctacagcctgacccagctgcccgctatcgcaatgtgttggaggccctctggaggattataagaacggagggcctatggaggcccatgagggggctgaacgtcacagcaacaggcgcagggcctgcccacgccctttattttgcctgctacgaaaagtattgagccttcctgtgctggttcccccactttcccaactctttgggctttgctgctgtcagtgctttccagtctcagcatggtttggagctgaagctttgggctgggataggccagattataagggagggacttccaaacctgatgttctcagacaacgggccgcttcaaccctgccttttcctttggggcacctcaacaaagggttacagtatcctcccttacctaccagcttgacttgttcctctcatctccctggcatcaacttctaatgccctggtaatgtggagacacactgaactacccccagtctatgtttgacagttgggtggtgtcctgctccttagggcaggattggaggcgacccagccagccacccaaggaagatactaatgaagcccctgctttttgcctcaccttttcaggatcccaactcaccagaggcagtttgtgttgagaacatgacaaagcctcatgacaaaatgaatgggggtggggccaaggaactgcatgaagaaaccagaaggttgtgtggaagtaagagaaaggatagcagcctagggctttaggaccggctggaaaccaagttgagtgtggagaggatgaggggtagagtagttcaggacctgaacgaaagatctttgtagacaaatgttaggctctgcaaatgggttctgcggcaggactgaggtgggattctgtggtgaggttctgtgagatctgaccacctggcccccgtatctccctccactggtggcaggtgatgtgctggcatccctaggcagcagtgtatctgcttcctgtctggggtgtgagctgcatttattctcagaatgatctttattgataagacttgagctggccttcctatcatggatgtggaatacattagtgaccttacaaagttggtgggaacagatactttaccttcttaaacaggagtttaggagcagtgggtccccatcttttggactagctcttaacgttacttttccccgctgtagtgtagcacagccactccccttcactgggggacctcaatgagttggtcagctctcttggccttacatgtggcagttgttttcttgtttgcaggtgcggccgggtgtgtggcaacattacttcatgatgcagccatgaaccctgcggaaggctgatctgctgacttggggctctgaatctggatactctccatcaccggttggctgctgtcaccatttccttcctcgttgatggcactactagtggtcaagcagaggatgcagatgtacaactcaccataccaccgggtgacagactgtgtacgggcagtgtggcaaaatgaaggggccggggccttttaccgcagctacaccacccagctgaccatgaacgttcctttccaagccattcacttcatgacctatgaattcctgcaggagcactttaacccccagagacggtacaacccaagctcccacgtcctctctggagcttgcgcaggagctgtagctgccgcagccacaaccccactggacgtttgcaaaacactgctcaacacccaggagtccttggctttgaactcacacattacaggacatatcacaggcatggctagtgccttcaggacggtatatcaagtaggtggggtgaccgcctatttccgaggggtgcaggccagagtaatttaccagatcccctccacagccatcgcatggtctgtgtatgagttcttcaaatacctaatcactaaaaggcaagaagagtggagggctggcaagtgaagtagcactgaacgaagccaggggttcagatgacactgctgcatcctggtcacattctctgtctcctggaatgctcccacctcaagtggagttagaaggaaggtagaggggctctcccccaggattttggtgttttgactaacaccagttcctgccaacctctgttgccaccacctttccttccaggccctaagcacgtgcagcaaagcacaccacagcacctttgataacctctctccatcctgggcctgatgacctgctctagactgttatagagggataagcagctcattcccctggttcctaataaaaagcctttaaattaaa

SEQ ID NO: 456211 - DNA, 1422 bp, Homo sapiens
cgacgtggtgcgggccaatggccgcggtcaaagtatcaagagtggttgagcctatcaaagttcagccttaagtttctcccgcccttctaaaagtcagaggcgggttgatcgcacatgtcggccaatcagtgaccaataaacaagaagcttctaagatcaaaggggaaaaggtgggatgtaggcgctagcaacgcctcagggcggaggaatgacaggcgacttcgctaatactaccggctgatttttcgtacgtaaacccggatgcagagtctacagcctgacccagctgcccgctatcgcaatgtgttggaggccctctggaggattataagaacggagggcctatggaggcccatgagggggctgaacgtcacagcaacaggcgcagggcctgcccacgccctttattttgcctgctacgaaaagttaaaaaagacattgagtgatgtaatccaccctgggggcaatagccatattgccaatggctgatctgctgacttggggctctgaatctggatactctccatcaccggttggctgctgtcaccatttccttcctcgttgatggcactactagtggtcaagcagaggatgcagatgtacaactcaccataccaccgggtgacagactgtgtacgggcagtgtggcaaaatgaaggggccggggccttttaccgcagctacaccacccagctgaccatgaacgttcctttccaagccattcacttcatgacctatgaattcctgcaggagcactttaacccccagagacggtacaacccaagctcccacgtcctctctggagcttgcgcaggagctgtagctgccgcagccacaaccccactggacgtttgcaaaacactgctcaacacccaggagtccttggctttgaactcacacattacaggacatatcacaggcatggctagtgccttcaggacggtatatcaagtaggtggggtgaccgcctatttccgaggggtgcaggccagagtaatttaccagatcccctccacagccatcgcatggtctgtgtatgagttcttcaaatacctaatcactaaaaggcaagaagagtggagggctggcaagtgaagtagcactgaacgaagccaggggttcagatgacactgctgcatcctggtcacattctctgtctcctggaatgctcccacctcaagtggagttagaaggaaggtagaggggctctcccccaggattttggtgttttgactaacaccagttcctgccaacctctgttgccaccacctttccttccaggccctaagcacgtgcagcaaagcacaccacagcacctttgataacctctctccatcctgggcctgatgacctgctctagactgttatagagggataagcagctcattcccctggttcctaataaaaagcctttaaattaaa

SEQ ID NO: 456212 - DNA, 1488 bp, Homo sapiens
caagcgggagccggaggccccgggctctctgggccgcgcctgaggcggacactacggggccggggggcggcggcggcagtggtggcagcggcggcgggggtgggcgccgcagctggcccgggtggatggagttggaggggcggggtgctggcggtgtggcgggggggccggcggcagggcccgggcggagccccggggagtcggcgctgctggacgggtggctgcagcggggcgtgggccggggggccggcggcggggaggccggggcctgcaggcccccggtacgacaagatccggactccggcccggactacgaggcgctgccggctggagccactgtcaccacgcacatggtggcaggcgccgtggcagggatcctggagcactgcgtgatgtaccccatcgactgcgtcaagacccggatgcagagtctacagcctgacccagctgcccgctatcgcaatgtgttggaggccctctggaggattataagaacggagggcctatggaggcccatgagggggctgaacgtcacagcaacaggcgcagggcctgcccacgccctttattttgcctgctacgaaaagtgcggccgggtgtgtggcaacattacttcatgatgcagccatgaaccctgcggaagtggtcaagcagaggatgcagatgtacaactcaccataccaccgggtgacagactgtgtacgggcagtgtggcaaaatgaaggggccggggccttttaccgcagctacaccacccagctgaccatgaacgttcctttccaagccattcacttcatgacctatgaattcctgcaggagcactttaacccccagagacggtacaacccaagctcccacgtcctctctggagcttgcgcaggagctgtagctgccgcagccacaaccccactggacgtttgcaaaacactgctcaacacccaggagtccttggctttgaactcacacattacaggacatatcacaggcatggctagtgccttcaggacggtatatcaagtaggtggggtgaccgcctatttccgaggggtgcaggccagagtaatttaccagatcccctccacagccatcgcatggtctgtgtatgagttcttcaaatacctaatcactaaaaggcaagaagagtggagggctggcaagtgaagtagcactgaacgaagccaggggttcagatgacactgctgcatcctggtcacattctctgtctcctggaatgctcccacctcaagtggagttagaaggaaggtagaggggctctcccccaggattttggtgttttgactaacaccagttcctgccaacctctgttgccaccacctttccttccaggccctaagcacgtgcagcaaagcacaccacagcacctttgataacctctctccatcctgggcctgatgacctgctctagactgttatagagggataagcagctcattcccctggttcctaataaaaagcctttaaattaaa

SEQ ID NO: 456213 - DNA, 2750 bp, Homo sapiens
cgacgtggtgcgggccaatggccgcggtcaaagtatcaagagtggttgagcctatcaaagttcagccttaagtttctcccgcccttctaaaagtcagaggcgggttgatcgcacatgtcggccaatcagtgaccaataaacaagaagcttctaagatcaaaggggaaaaggtgggatgtaggcgctagcaacgcctcagggcggaggaatgacaggcgacttcgctaatactaccggctgatttttcgtacgtaaacccggatgcagagtctacagcctgacccagctgcccgctatcgcaatgtgttggaggccctctggaggattataagaacggagggcctatggaggcccatgagggggctgaacgtcacagcaacaggcgcagggcctgcccacgccctttattttgcctgctacgaaaagtattgagccttcctgtgctggttcccccactttcccaactctttgggctttgctgctgtcagtgctttccagtctcagcatggtttggagctgaagctttgggctgggataggccagattataagggagggacttccaaacctgatgttctcagacaacgggccgcttcaaccctgccttttcctttggggcacctcaacaaagggttacagtatcctcccttacctaccagcttgacttgttcctctcatctccctggcatcaacttctaatgccctggtaatgtggagacacactgaactacccccagtctatgtttgacagttgggtggtgtcctgctccttagggcaggattggaggcgacccagccagccacccaaggaagatactaatgaagcccctgctttttgcctcaccttttcaggatcccaactcaccagaggcagtttgtgttgagaacatgacaaagcctcatgacaaaatgaatgggggtggggccaaggaactgcatgaagaaaccagaaggttgtgtggaagtaagagaaaggatagcagcctagggctttaggaccggctggaaaccaagttgagtgtggagaggatgaggggtagagtagttcaggacctgaacgaaagatctttgtagacaaatgttaggctctgcaaatgggttctgcggcaggactgaggtgggattctgtggtgaggttctgtgagatctgaccacctggcccccgtatctccctccactggtggcaggtgatgtgctggcatccctaggcagcagtgtatctgcttcctgtctggggtgtgagctgcatttattctcagaatgatctttattgataagacttgagctggccttcctatcatggatgtggaatacattagtgaccttacaaagttggtgggaacagatactttaccttcttaaacaggagtttaggagcagtgggtccccatcttttggactagctcttaacgttacttttccccgctgtagtgtagcacagccactccccttcactgggggacctcaatgagttggtcagctctcttggccttacatgtggcagttgttttcttgtttgcaggtgcggccgggtgtgtggcaacattacttcatgatgcagccatgaaccctgcggaagtggtcaagcagaggatgcagatgtacaactcaccataccaccgggtgacagactgtgtacgggcagtgtggcaaaatgaaggggccggggccttttaccgcagctacaccacccagctgaccatgaacgttcctttccaagccattcacttcatgacctatgaattcctgcaggagcactttaacccccagagacggtacaacccaagctcccacgtcctctctggagcttgcgcaggagctgtagctgccgcagccacaaccccactggacgtttgcaaaacactgctcaacacccaggagtccttggctttgaactcacacattacaggacatatcacaggcatggctagtgccttcaggacggtatatcaagtaggtggggtgaccgcctatttccgaggggtgcaggccagagtaatttaccagatcccctccacagccatcgcatggtctgtgtatgagttcttcaaatacctaatcactaaaaggcaagaagagtggagggctggcaagtgaagtagcactgaacgaagccaggggttcagatgacactgctgcatcctggtcacattctctgtctcctggaatgctcccacctcaagtggagttagaaggaaggtagaggggctctcccccaggattttggtgttttgactaacaccagttcctgccaacctctgttgccaccacctttccttccaggccctaagcacgtgcagcaaagcacaccacagcacctttgataacctctctccatcctgggcctgatgacctgctctagactgttatagagggataagcagctcattcccctggttcctaataaaaagcctttaaattaaacaaacaaaacaaaaaaaaaaaaaaaaaaaaaaaaaagggggggggcggcccaaaaattcccccgggggggcccaaagttgtaggcggtaccccagttttctgtgtgtcccagaggggggccccatatagggagcgcgtaattaataggcatgggcaaggggccgggacgttttacacaacggcggggaagggggaaaacggtggcacccgcggggaaactgggggaagggaaccctaaactcggggggggggacacaagtggggccaatctccacaaggaagatttagaggccaaaggggacactagacactcaacgggtaaacggg

SEQ ID NO: 456214 - DNA, 1464 bp, Homo sapiens
  misc_feature (454)..(454): n is a, c, g, or t
gcctttcttattggaatgaagctagttgggataggaatgaaaggttaaatcatagaactcagtccctgcatttctgctgggatcttggcttttcagtcggaggaaaattctccaaaaacattctccatgtgaggatgagcaaatatgaagggatagcattgttgccacgttcattttctgtctgggcaaggccatggggtggaaagagccaaagctaagctgaagctccacagagctcacaccatgttatctacttgagggagtgggaggtgtttgaagactaaagccaactctttttggctaagaatcttttctttggtagaacttctgtctcctcccctctaggaggatcaccatctcacattttaaaagttaggtgctctttgtatgcgaggattgggattgttaggggcctgtgttcgtgatgatcactatcatggagtcatttcttgtngggaatagttagagggtaagatcagagataggtacttagttcaagaagactctctgaagctcccaaactgtagatatgtcctgtgtgcgaactggctggctttacagaagtcctgatggaagtgggtttattgttttttgactcgttaccaaccctctgcttactccttcccctcaaaaaagggaagctgacttctcaggttagccagcagctcactcatacttttttctctctctattccattggctgatctgctgacttggggctctgaatctggatactctccatcaccggttggctgctgtcaccatttccttcctcgttgatggcactactagtggtcaagcagaggatgcagatgtacaactcaccataccaccgggtgacagactgtgtacgggcagtgtggcaaaatgaaggggccggggccttttaccgcagctacaccacccagctgaccatgaacgttcctttccaagccattcacttcatgacctatgaattcctgcaggagcactttaacccccagagacggtacaacccaagctcccacgtcctctctggagcttgcgcaggagctgtagctgccgcagccacaaccccactggacgtttgcaaaacactgctcaacacccaggagtccttggctttgaactcacacattacaggacatatcacaggcatggctagtgccttcaggacggtatatcaagtaggtggggtgaccgcctatttccgaggggtgcaggccagagtaatttaccagatcccctccacagccatcgcatggtctgtgtatgagttcttcaaatacctaatcactaaaaggcaagaagagtggagggctggcaagtgaagtagcactgaacgaagccaggggttcagatgacactgctgcatcctggtcacattctctctctccatcctgggcctgatgacctgctctagactgttatagagggataagcagctcattcccctggttcctaataaaaagcctttaaattaaa

SEQ ID NO: 456215 - DNA, 2207 bp, Homo sapiens
cgacgtggtgcgggccaatggccgcggtcaaagtatcaagagtggttgagcctatcaaagttcagccttaagtttctcccgcccttctaaaagtcagaggcgggttgatcgcacatgtcggccaatcagtgaccaataaacaagaagcttctaagatcaaaggggaaaaggtgggatgtaggcgctagcaacgcctcagggcggaggaatgacaggcgacttcgctaatactaccggctgatttttcgtacgtaaacccggatgcagagtctacagcctgacccagctgcccgctatcgcaatgtgttggaggccctctggaggattataagaacggagggcctatggaggcccatgagggggctgaacgtcacagcaacaggcgcagggcctgcccacgccctttattttgcctgctacgaaaagtattgagccttcctgtgctggttcccccactttcccaactctttgggctttgctgctgtcagtgctttccagtctcagcatggtttggagctgaagctttgggctgggataggccagattataagggagggacttccaaacctgatgttctcagacaacgggccgcttcaaccctgccttttcctttggggcacctcaacaaagggttacagtatcctcccttacctaccagcttgacttgttcctctcatctccctggcatcaacttctaatgccctggtaatgtggagacacactgaactacccccagtctatgtttgacagttgggtggtgtcctgctccttagggcaggattggaggcgacccagccagccacccaaggaagatactaatgaagcccctgctttttgcctcaccttttcaggatcccaactcaccagaggcagtttgtgttgagaacatgacaaagcctcatgacaaaatgaatgggggtggggccaaggaactgcatgaagaaaccagaaggttgtgtggaagtaagagaaaggatagcagcctagggctttaggaccggctggaaaccaagttgagtgtggagaggatgaggggtagagtagttcaggacctgaacgaaagatctttgtagacaaatgttaggctctgcaaatgggttctgcggcaggactgaggtgggattctgtggtgaggttctgtgagatctgaccacctggcccccgtatctccctccactggtggcaggtgatgtgctggcatccctaggcagcagtgtatctgcttcctgtctggggtgtgagctgcatttattctcagaatgatctttattgataagacttgagctggccttcctatcatggatgtggaatacattagtgaccttacaaagttggtgggaacagatactttaccttcttaaacaggagtttaggagcagtgggtccccatcttttggactagctcttaacgttacttttccccgctgtagtgtagcacagccactccccttcactgggggacctcaatgagttggtcagctctcttggccttacatgtggcagttgttttcttgtttgcaggtgcggccgggtgtgtggcaacattacttcatgatgcagccatgaaccctgcggaagtggtcaagcagaggatgcagatgtacaactcaccataccaccgggtgacagactgtgtacgggcagtgtggcaaaatgaaggggccggggccttttaccgcagctacaccacccagctgaccatgaacgttcctttccaagccattcacttcatgacctatgaattcctgcaggagcactttaacccccagagacggtacaacccaagctcccacgtcctctctggagcttgcgcaggagctgtagctgccgcagccacaaccccactggacgtttgcaaaacactgctcaacacccaggagtccttggctttgaactcacacattacaggacatatcacaggcatggctagtgccttcaggacggtatatcaagtaggtggggtgaccgcctatttccgaggggtgcaggccagagtaatttaccagatcccctccacagccatcgcatggtctgtgtatgagttcttcaaatacctttccttccaggccctaagcacgtgcagcaaagcacaccacagcacctttgataacctctctccatcctgggcctgatgacctgctctagactgttatagagggataagcagctcattcccctggttcctaataaaaagcctttaaattaaa

SEQ ID NO: 456216 - DNA, 2009 bp, Homo sapiens
caagcgggagccggaggccccgggctctctgggccgcgcctgaggcggacactacggggccggggggcggcggcggcagtggtggcagcggcggcgggggtgggcgccgcagctggcccgggtggatggagttggaggggcggggtgctggcggtgtggcgggggggccggcggcagggcccgggcggagccccggggagtcggcgctgctggacgggtggctgcagcggggcgtgggccggggggccggcggcggggaggccggggcctgcaggcccccggtacgacaagatccggactccggcccggactacgaggcgctgccggctggagccactgtcaccacgcacatggtggcaggcgccgtggcagggatcctggagcactgcgtgatgtaccccatcgactgcgtcaagacccggatgcagagtctacagcctgacccagctgcccgctatcgcaatgtgttggaggccctctggaggattataagaacggagggcctatggaggcccatgagggggctgaacgtcacagcaacaggcgcagggcctgcccacgccctttattttgcctgctacgaaaagttaaaaaagacattgagtgatgtaatccaccctgggggcaatagccatattgccaatggtattgagccttcctgtgctggttcccccactttcccaactctttgggctttgctgctgtcagtgctttccagtctcagcatggtttggagctgaagctttgggctgggataggccagtggtggcaggtgatgtgctggcatccctaggcagcagtgtatctgcttcctgtctggggtgtgagctgcatttattctcagaatgatctttattgataagacttgagctggccttcctatcatggatgtggaatacattagtgaccttacaaagttggtgggaacagatactttaccttcttaaacaggagtttaggagcagtgggtccccatcttttggactagctcttaacgttacttttccccgctgtagtgtagcacagccactccccttcactgggggacctcaatgagttggtcagctctcttggccttacatgtggcagttgttttcttgtttgcaggtgcggccgggtgtgtggcaacattacttcatgatgcagccatgaaccctgcggaagtggtcaagcagaggatgcagatgtacaactcaccataccaccgggtgacagactgtgtacgggcagtgtggcaaaatgaaggggccggggccttttaccgcagctacaccacccagctgaccatgaacgttcctttccaagccattcacttcatgacctatgaattcctgcaggagcactttaacccccagagacggtacaacccaagctcccacgtcctctctggagcttgcgcaggagctgtagctgccgcagccacaaccccactggacgtttgcaaaacactgctcaacacccaggagtccttggctttgaactcacacattacaggacatatcacaggcatggctagtgccttcaggacggtatatcaagtaggtggggtgaccgcctatttccgaggggtgcaggccagagtaatttaccagatcccctccacagccatcgcatggtctgtgtatgagttcttcaaatacctaatcactaaaaggcaagaagagtggagggctggcaagtgaagtagcactgaacgaagccaggggttcagatgacactgctgcatcctggtcacattctctgtctcctggaatgctcccacctcaagtggagttagaaggaaggtagaggggctctcccccaggattttggtgttttgactaacaccagttcctgccaacctctgttgccaccacctttccttccaggccctaagcacgtgcagcaaagcacaccacagcacctttgataacctctctccatcctgggcctgatgacctgctctagactgttatagagggataagcagctcattcccctggttcctaataaaaagcctttaaattaaa

SEQ ID NO: 456217 - DNA, 1089 bp, Homo sapiens
caagcgggagccggaggccccgggctctctgggccgcgcctgaggcggacactacggggccggggggcggcggcggcagtggtggcagcggcggcgggggtgggcgccgcagctggcccgggtggatggagttggaggggcggggtgctggcggtgtggcgggggggccggcggcagggcccgggcggagccccggggagtcggcgctgctggacgggtggctgcagcggggcgtgggccggggggccggcggcggggaggccggggcctgcaggcccccggtacgacaagatccggactccggcccggactacgaggcgctgccggctggagccactgtcaccacgcacatggtggcaggcgccgtggcagggatcctggagcactgcgtgatgtaccccatcgactgcgtcaaggtgagacctgcacccggcttcgaacccgacctggggctgacccgacccctgggtcttgtccggagccaggatcccggctgagagccggagccgacatgggttccttcctggctcctgccactaccacatgattcgaaccgacactccattcaagcaaggtcctcagctgggagttgatcccagtcaggaaccaggacctatttctaaccgtcagtgaaatctgaatcgggactcaggatcgaaaatctgtcagccaaagccctggaccccacctgggactaaacaggaatagggtgggatggggtatcccgaagctcaggtaagtgctactaactcgattaaggtgaagccaactggcgtgaaccagaccctgaaatggatctaacggcttgagatgttttctgggctagtgcttttacaaactccttgctgtatcttcccttactgacggggcaggaacccgaatctgggatctctcagctagataaaggacttacatgttaaatcttaacacatgagtgactggaaatcattgtgcagtgagaatgcagaattccagactggaagtaatgtgggaaagatcgtattcaggaataggtttcagtttctctgtgaagcaagcatgataccccacctatttcctgaacatgaaattgagctgggattaggactg

SEQ ID NO: 456218 - DNA, 1386 bp, Homo sapiens
cgacgtggtgcgggccaatggccgcggtcaaagtatcaagagtggttgagcctatcaaagttcagccttaagtttctcccgcccttctaaaagtcagaggcgggttgatcgcacatgtcggccaatcagtgaccaataaacaagaagcttctaagatcaaaggggaaaaggtgggatgtaggcgctagcaacgcctcagggcggaggaatgacaggcgacttcgctaatactaccggctgatttttcgtacgtaaacccggatgcagagtctacagcctgacccagctgcccgctatcgcaatgtgttggaggccctctggaggattataagaacggagggcctatggaggcccatgagggggctgaacgtcacagcaacaggcgcagggcctgcccacgccctttattttgcctgctacgaaaagttaaaaaagacattgagtgatgtaatccaccctgggggcaatagccatattgccaatggtgcggccgggtgtgtggcaacattacttcatgatgcagccatgaaccctgcggaagtggtcaagcagaggatgcagatgtacaactcaccataccaccgggtgacagactgtgtacgggcagtgtggcaaaatgaaggggccggggccttttaccgcagctacaccacccagctgaccatgaacgttcctttccaagccattcacttcatgacctatgaattcctgcaggagcactttaacccccagagacggtacaacccaagctcccacgtcctctctggagcttgcgcaggagctgtagctgccgcagccacaaccccactggacgtttgcaaaacactgctcaacacccaggagtccttggctttgaactcacacattacaggacatatcacaggcatggctagtgccttcaggacggtatatcaagtaggtggggtgaccgcctatttccgaggggtgcaggccagagtaatttaccagatcccctccacagccatcgcatggtctgtgtatgagttcttcaaatacctaatcactaaaaggcaagaagagtggagggctggcaagtgaagtagcactgaacgaagccaggggttcagatgacactgctgcatcctggtcacattctctgtctcctggaatgctcccacctcaagtggagttagaaggaaggtagaggggctctcccccaggattttggtgttttgactaacaccagttcctgccaacctctgttgccaccacctttccttccaggccctaagcacgtgcagcaaagcacaccacagcacctttgataacctctctccatcctgggcctgatgacctgctctagactgttatagagggataagcagctcattcccctggttcctaataaaaagcctttaaattaaa

SEQ ID NO: 456219 - DNA, 1034 bp, Homo sapiens
tgaacgaagccaggtgttcagatgacactgctgcatcctggtcacattctactgtcttctggaatgctcccacctcaatgagttggtcagctctcttggccttacatgtggcagttgttttcttgtttgcaggtgcggccgggtgtgtggcaacattacttcatgatgcagccatgaaccctgcggaagtggtcaagcagaggatgcagatgtacaactcaccataccaccgggtgacagactgtgtacgggcagtgtggcaaaatgaaggggccggggccttttaccgcagctacaccacccagctgaccatgaacgttcctttccaagccattcacttcatgacctatgaattcctgcaggagcactttaacccccagagacggtacaacccaagctcccacgtcctctctggagcttgcgcaggagctgtagctgccgcagccacaaccccactggacgtttgcaaaacactgctcaacacccaggagtccttggctttgaactcacacattacaggacatatcacaggcatggctagtgccttcaggacggtatatcaagtaggtggggtgaccgcctatttccgaggggtgcaggccagagtaatttaccagatcccctccacagccatcgcatggtctgtgtatgagttcttcaaatacctaatcactaaaaggcaagaagagtggagggctggcaagtgaagtagcactgaacgaagccaggggttcagatgacactgctgcatcctggtcacattctctgtctcctggaatgctcccacctcaagtggagttagaaggaaggtagaggggctctcccccaggattttggtgttttgactaacaccagttcctgccaacctctgttgccaccacctttccttccaggccctaagcacgtgcagcaaagcacaccacagcacctttgataacctctctccatcctgggcctgatgacctgctctagactgttatagagggataagcagctcattcccctggttcctaataaaaagcctttaaattaaa

SEQ ID NO: 456220 - DNA, 2585 bp, Homo sapiens
  misc_feature (2520)..(2520): n is a, c, g, or t
cgacgtggtgcgggccaatggccgcggtcaaagtatcaagagtggttgagcctatcaaagttcagccttaagtttctcccgcccttctaaaagtcagaggcgggttgatcgcacatgtcggccaatcagtgaccaataaacaagaagcttctaagatcaaaggggaaaaggtgggatgtaggcgctagcaacgcctcagggcggaggaatgacaggcgacttcgctaatactaccggctgatttttcgtacgtaaacccggatgcagagtctacagcctgacccagctgcccgctatcgcaatgtgttggaggccctctggaggattataagaacggagggcctatggaggcccatgagggggctgaacgtcacagcaacaggcgcagggcctgcccacgccctttattttgcctgctacgaaaagtattgagccttcctgtgctggttcccccactttcccaactctttgggctttgctgctgtcagtgctttccagtctcagcatggtttggagctgaagctttgggctgggataggccagattataagggagggacttccaaacctgatgttctcagacaacgggccgcttcaaccctgccttttcctttggggcacctcaacaaagggttacagtatcctcccttacctaccagcttgacttgttcctctcatctccctggcatcaacttctaatgccctggtaatgtggagacacactgaactacccccagtctatgtttgacagttgggtggtgtcctgctccttagggcaggattggaggcgacccagccagccacccaaggaagatactaatgaagcccctgctttttgcctcaccttttcaggatcccaactcaccagaggcagtttgtgttgagaacatgacaaagcctcatgacaaaatgaatgggggtggggccaaggaactgcatgaagaaaccagaaggttgtgtggaagtaagagaaaggatagcagcctagggctttaggaccggctggaaaccaagttgagtgtggagaggatgaggggtagagtagttcaggacctgaacgaaagatctttgtagacaaatgttaggctctgcaaatgggttctgcggcaggactgaggtgggattctgtggtgaggttctgtgagatctgaccacctggcccccgtatctccctccactggtggcaggtgatgtgctggcatccctaggcagcagtgtatctgcttcctgtctggggtgtgagctgcatttattctcagaatgatctttattgataagacttgagctggccttcctatcatggatgtggaatacattagtgaccttacaaagttggtgggaacagatactttaccttcttaaacaggagtttaggagcagtgggtccccatcttttggactagctcttaacgttacttttccccgctgtagtgtagcacagccactccccttcactgggggacctcaatgagttggtcagctctcttggccttacatgtggcagttgttttcttgtttgcaggtgcggccgggtgtgtggcaacattacttcatgatgcagccatgaaccctgcggaagtggtcaagcagaggatgcagatgtacaactcaccataccaccgggtgacagactgtgtacgggcagtgtggcaaaatgaaggggccggggccttttaccgcagctacaccacccagctgaccatgaacgttcctttccaagccattcacttcatgacctatgaattcctgcaggagcactttaacccccagagacggtacaacccaagctcccacgtcctctctggagcttgcgcaggagctgtagctgccgcagccacaaccccactggacgtttgcaaaacactgctcaacacccaggagtccttggctttgaactcacacattacaggacatatcacaggcatggctagtgccttcaggacggtatatcaagtaggtggggtgaccgcctatttccgaggggtgcaggccagagtaatttaccagatcccctccacagccatcgcatggtctgtgtatgagttcttcaaatacctaatcactaaaaggcaagaagagtggagggctggcaagtgaagtagcactgaacgaagccaggggttcagatgacactgctgcatcctggtcacattctctgtctcctggaatgctcccacctcaagtggagttagaaggaaggtagaggggctctcccccaggattttggtgttttgactaacaccagttcctgccaacctctgttgccaccacctttccttccaggccctaagcacgtgcagcaaagcacaccacagcacctttgataacctctctccatcctgggcctgatgacctgctctagactgttatagagggataagcagctcattcccctggttcctaataaaaagcctttaaattaaaaaaaaaaaaaaaaaaaaaactcgagactagctcgtgccgaattcggcacgagattctgcacaccgagctgaacctgcatgagcttgaaagcgatganagagagcccacagagtctacccaacagcttaacaagcctgaggtcttggaggtgaccctgaaccc

SEQ ID NO: 456221 - DNA, 2403 bp, Homo sapiens
cgacgtggtgcgggccaatggccgcggtcaaagtatcaagagtggttgagcctatcaaagttcagccttaagtttctcccgcccttctaaaagtcagaggcgggttgatcgcacatgtcggccaatcagtgaccaataaacaagaagcttctaagatcaaaggggaaaaggtgggatgtaggcgctagcaacgcctcagggcggaggaatgacaggcgacttcgctaatactaccggctgatttttcgtacgtaaacccggatgcagagtctacagcctgacccagctgcccgctatcgcaatgtgttggaggccctctggaggattataagaacggagggcctatggaggcccatgagggggctgaacgtcacagcaacaggcgcagggcctgcccacgccctttattttgcctgctacgaaaagtattgagccttcctgtgctggttcccccactttcccaactctttgggctttgctgctgtcagtgctttccagtctcagcatggtttggagctgaagctttgggctgggataggccagattataagggagggacttccaaacctgatgttctcagacaacgggccgcttcaaccctgccttttcctttggggcacctcaacaaagggttacagtatcctcccttacctaccagcttgacttgttcctctcatctccctggcatcaacttctaatgccctggtaatgtggagacacactgaactacccccagtctatgtttgacagttgggtggtgtcctgctccttagggcaggattggaggcgacccagccagccacccaaggaagatactaatgaagcccctgctttttgcctcaccttttcaggatcccaactcaccagaggcagtttgtgttgagaacatgacaaagcctcatgacaaaatgaatgggggtggggccaaggaactgcatgaagaaaccagaaggttgtgtggaagtaagagaaaggatagcagcctagggctttaggaccggctggaaaccaagttgagtgtggagaggatgaggggtagagtagttcaggacctgaacgaaagatctttgtagacaaatgttaggctctgcaaatgggttctgcggcaggactgaggtgggattctgtggtgaggttctgtgagatctgaccacctggcccccgtatctccctccactggtggcaggtgatgtgctggcatccctaggcagcagtgtatctgcttcctgtctggggtgtgagctgcatttattctcagaatgatctttattgataagacttgagctggccttcctatcatggatgtggaatacattagtgaccttacaaagttggtgggaacagatactttaccttcttaaacaggagtttaggagcagtgggtccccatcttttggactagctcttaacgttacttttccccgctgtagtgtagcacagccactccccttcactgggggacctcaatgagttggtcagctctcttggccttacatgtggcagttgttttcttgtttgcaggtgcggccgggtgtgtggcaacattacttcatgatgcagccatgaaccctgcggaagtggtcaagcagaggatgcagatgtacaactcaccataccaccgggtgacagactgtgtacgggcagtgtggcaaaatgaaggggccggggccttttaccgcagctacaccacccagctgaccatgaacgttcctttccaagccattcacttcatgacctatgaattcctgcaggagcactttaacccccagagacggtacaacccaagctcccacgtcctctctggagcttgcgcaggagctgtagctgccgcagccacaaccccactggacgtttgcaaaacactgctcaacacccaggagtccttggctttgaactcacacattacaggacatatcacaggcatggctagtgccttcaggacggtatatcaagtaggtggggtgaccgcctatttccgaggggtgcaggccagagtaatttaccagatcccctccacagccatcgcatggtctgtgtatgagttcttcaaatacctaatcactaaaaggcaagaagagtggagggctggcaagtgaagtagcactgaacgaagccaggggttcagatgacactgctgcatcctggtcacattctctgtctcctggaatgctcccacctcaagtgcctagaaggcatgatagaagggttttgtgtgagcattcaggcagtttcgagcctcgcagatcttgtcagccttggaagacaccgcctgtcttttcgggccgtcaggtcgcgcagcggagcaggccaaggccagtgcgatagcctatgtccataagggggctcgtgcggtcatctagcagtggtatagaggaataagcggctcggtactctcgttccaga

SEQ ID NO: 456222 - DNA, 1416 bp, Homo sapiens
  misc_feature (454)..(454): n is a, c, g, or t
gcctttcttattggaatgaagctagttgggataggaatgaaaggttaaatcatagaactcagtccctgcatttctgctgggatcttggcttttcagtcggaggaaaattctccaaaaacattctccatgtgaggatgagcaaatatgaagggatagcattgttgccacgttcattttctgtctgggcaaggccatggggtggaaagagccaaagctaagctgaagctccacagagctcacaccatgttatctacttgagggagtgggaggtgtttgaagactaaagccaactctttttggctaagaatcttttctttggtagaacttctgtctcctcccctctaggaggatcaccatctcacattttaaaagttaggtgctctttgtatgcgaggattgggattgttaggggcctgtgttcgtgatgatcactatcatggagtcatttcttgtngggaatagttagagggtaagatcagagataggtacttagttcaagaagactctctgaagctcccaaactgtagatatgtcctgtgtgcgaactggctggctttacagaagtcctgatggaagtgggtttattgttttttgactcgttaccaaccctctgcttactccttcccctcaaaaaagggaagctgacttctcaggttagccagcagctcactcatacttttttctctctctattccattggctgatctgctgacttggggctctgaatctggatactctccatcaccggttggctgctgtcaccatttccttcctcgttgatggcactactagtggtcaagcagaggatgcagatgtacaactcaccataccaccgggtgacagactgtgtacgggcagtgtggcaaaatgaaggggccggggccttttaccgcagctacaccacccagctgaccatgaacgttcctttccaagccattcacttcatgacctatgaattcctgcaggagcactttaacccccagagacggtacaacccaagctcccacgtcctctctggagcttgcgcaggagctgtagctgccgcagccacaaccccactggacgtttgcaaaacactgctcaacacccaggagtccttggctttgaactcacacattacaggacatatcacaggcatggctagtgccttcaggacggtatatcaagtaggtggggtgaccgcctatttccgaggggtgcaggccagagtaatttaccagatcccctccacagccatcgcatggtctgtgtatgagttcttcaaatacctaatcactaaaaggcaagaagagtggagggctggcaagtgaagtagcactgaacgaagccaggggttcagatgacactgctctagactgttatagagggataagcagctcattcccctggttcctaataaaaagcctttaaattaaa

SEQ ID NO: 456223 - DNA, 4136 bp, Homo sapiens
cagagcacagaacattttttcagactgaacagactgttggaccagcctgtcatgatatgttttagataaagtttgagtgagttcattgggataaatggtccacaatcttaaacagaatactgtgagccaatgccttttggaagtaatggtggaggataatatgattaaagggaacatgcttgtgtttatttttgttggtagtatatgattagaaaaactagataattcccataagatgaagatcttccatgaacaaactaccatcaatcatccatcagattgattttttttttttttataagtaacactaaagaagctgtaaagaacattgaaggtggtcattccttcaaaactgtgttttgaccacacaaggtgggcattaacaaaccaaatttcaacttaagtctgtttgtattatattgggggtgctgcgagactggagattttataaaagcaagcatttttatttccatttataatttctattcaatattgctagatatattaacatgaaggaatggggaagcttatttcaatcaaagctaaaattttcagaagtctgtaaaaatggaaaaacaccattgaaagaggcagaaacaggtaagggggatagtatcttagaaaacctgttggttaaggcagctgcatgtgataaaagtggtacttgaacttggtagtgtttccttagaacctcctccaaaaatatgcatttaccaggcttgttacaattttttgacagtttttcatcaactgtcaaaaacttcaacccttttaaaacctagatataaatgcttacatgtaaagaaaggaagctaagcagtgggtacctgggatctctctgaactatttttataacttcttgtgagtcttaagtatttcaaaataaaagtggttttaaagtaaattcatagattaaatgtatcattatctatatataaaccatgatttaaaactttaattttctaaacatagtattcaacttagttgaataaatatatgatagaagttaaatagaatttttatttcattcttaagaaaaactcatgtttgtaacaaatgatatctaaagatctattttgccttaccagaaaagaaaaaaaaaaccctaaaaccaaaaactccttttccctaggaagtcaaaaatgctgtgatttaaaatatctaattatatttttttctttctatggtagtggggtttacttctgaggataaaatattttgaaaaagctctgtcccttgacatggtagttctcccgtgccttgtacttgttctctctccatatgcacagtgtgacaagatgctcacctttaatgaagaaggtgtagcttttcgttttaagctgtaattgtctttgtcttgatttggctatttttataactgaaatcctgagcaacagagataatttgggtggtaatgatcatcttttgtatatgttcttgatgttaagaaatattttttgctgccattcagctttgtggaatttatgtttacttttcaatattttcatatttcttaaccagattttaaagaaatttgttgttagttacgtgaaatcaaaggtcaggtcagtaagcccattatcctcaaacttgaagtttcgttggatgttcaaaatgctaatttttgcagagatataaggataaattagttttagtttgtgttcttaagggtttgcaaaataatttggctcccaaactcttgttggggtgtagtgtttgctaggagcccaggatacctgccctggacttaaattgtgattgaagtggagaggtactctaggaatttaaaaagacacaaaattatttttttccagactagtgtgccatggatttctgataagaattaacattcttgaacaaaggtatcagaaagggtaactcgagttgaaggtttgtgaatagaaggggaaatgtgatagaagattattcagaacaaaataagtagacaaaataacaaaagacaggaaaataagtctctttgtatccttattaatcatttgaaattatgctataatattttttaaaactcacctgtttggttctgggtgaagcagttcctgaaggagtgtttgtcagaatatattgttaggagaatagagggttctgtggccaagtaagtttgggaaatagtgggttagacaaagttgagttactgttggcctttcagacctttgatacgctaatgtgcattttaaatctccaagaagcacctctattttatacatcatttccctaatttattttaatatggatttcttgtttttgttttcttgagacggagtcttggtcttgtcacccaggctggagtgcagtggcacgatctcggctcactacaacctccgcctcccaggttcaagcgattctcctgcctcagcctcccaatttactgggattacaggcacctgccaccacgcccagctaatttttgtatttttagtagagatggggtttcaccatgttgaccaggctgattttgaactcctgacctcaggtgattctgcccgcctcaccctcccacagtgctggaattataggtatgagccactgtccccggccagatttttttaaaagtaggtatcttgtgggatttatgttctgagagatacacctaaggaaatgctgccctacagtgtttttgctagttcatactcattacaaaggtttcttgttgttgggtgcccctctagccagtggtagtaaaatgggaagagacaggtcaagactcccttggaccatggcattgagagagggatggctgtcggcatagatatgttggttatttaggcatttgtgagggaggcccctggctcttccagcctgtttccttaggatcccagttggccgggaacagctgtacaagggtctgctgaactggtggtttcagcagactacccagttcctaagcatccatgagacagagggaaccaacttgtatttccagaacaattttccaaaccttttctggctgtactttaaaagtgccaaaaaggcaatgggtgtttatgacactaaagtcacatacaagctagtatgatacatacatcatagaaagcttatagttgctcagtgacaaagcaaaggaagtttaatattttccagttttgttcattaccgaagacagtctacggttcatagttttcactaaattctaagcagattctatatcctaaaacatttaaacctcactaggcctgcaattttgagagggttagctaaatatgtttggtatcacttcagagtctaaaaccagattactaatcgtgtgtaaggaggcattttgtgtgtctttgcaatgtatacaattggattatttggaacaccattttgaatgtgtatttgagagaaagctcgcctgtgggttttgagttgtggtgtaatggtgaacatgtagccacgtgaaaggccgttggatctttgttctgattcttcagtcgtcttcttgcaaattcagagaaatgtcttttaatcatttcgtttacatatcccagatccttggaaatcatgaaaaataacttgccagagtttgcatcagccctcagtaagtcatgaaccatagagaaggtcatggggccatttattctttggaccactggctacttctgaagttctggcttccttctctctaggaggagtcgtgtattcaagcttttaagttaaatgcataaaaatgagttttacttctcttctgacttgatttttaattttatgaaatgggaaataatgtttttccatttttctgttcattttgaagtgggaatttgaggtgtttgtaatgtcatgttactgttctgaaagattgacagtaaagaagacaagaaatatatgtatgtagtatgcatattagttttgtcccaccaagcctatctttgaatggcaaacattttaaaaacatctgttctagttgcacaactactctagcttctttataaagtaaacaatcttaaagtaagcaatgttggccataatttcaatattctagccttgccgagtgtgaatatattttactcagagactatgtacaaatacactaaagtggtgatggtgatcaatattgtaaagaatttattctgataaatgagaaactggatataatgtcaaaatagctattttctcaataaaaatctcaaatctcctga

SEQ ID NO: 456224 - DNA, 4443 bp, Homo sapiens
cagagcacagaacattttttcagactgaacagactgttggaccagcctgtcatgatatgttttagataaagtttgagtgagttcattgggataaatggtccacaatcttaaacagaatactgtgagccaatgccttttggaagtaatggtggaggataatatgattaaagggaacatgcttgtgtttatttttgttggtagtatatgattagaaaaactagataattcccataagatgaagatcttccatgaacaaactaccatcaatcatccatcagattgattttttttttttttataagtaacactaaagaagctgtaaagaacattgaaggtggtcattccttcaaaactgtgttttgaccacacaaggtgggcattaacaaaccaaatttcaacttaagtctgtttgtattatattgggggtgctgcgagactggagattttataaaagcaagcatttttatttccatttataatttctattcaatattgctagatatattaacatgaaggaatggggaagcttatttcaatcaaagctaaaattttcagaagtctgtaaaaatggaaaaacaccattgaaagaggcagaaacaggtaagggggatagtatcttagaaaacctgttggttaaggcagctgcatgtgataaaagtggtacttgaacttggtagtgtttccttagaacctcctccaaaaatatgcatttaccaggcttgttacaattttttgacagtttttcatcaactgtcaaaaacttcaacccttttaaaacctagatataaatgcttacatgtaaagaaaggaagctaagcagtgggtacctgggatctctctgaactatttttataacttcttgtgagtcttaagtatttcaaaataaaagtggttttaaagtaaattcatagattaaatgtatcattatctatatataaaccatgatttaaaactttaattttctaaacatagtattcaacttagttgaataaatatatgatagaagttaaatagaatttttatttcattcttaagaaaaactcatgtttgtaacaaatgatatctaaagatctattttgccttaccagaaaagaaaaaaaaaaccctaaaaccaaaaactccttttccctaggaagtcaaaaatgctgtgatttaaaatatctaattatatttttttctttctatggtagtggggtttacttctgaggataaaatattttgaaaaagctctgtcccttgacatggtagttctcccgtgccttgtacttgttctctctccatatgcacagtgtgacaagatgctcacctttaatgaagaaggtgtagcttttcgttttaagctgtaattgtctttgtcttgatttggctatttttataactgaaatcctgagcaacagagataatttgggtggtaatgatcatcttttgtatatgttcttgatgttaagaaatattttttgctgccattcagctttgtggaatttatgtttacttttcaatattttcatatttcttaaccagattttaaagaaatttgttgttagttacgtgaaatcaaaggtcaggtcagtaagcccattatcctcaaacttgaagtttcgttggatgttcaaaatgctaatttttgcagagatataaggataaattagttttagtttgtgttcttaagggtttgcaaaataatttggctcccaaactcttgttggggtgtagtgtttgctaggagcccaggatacctgccctggacttaaattgtgattgaagtggagaggtactctaggaatttaaaaagacacaaaattatttttttccagactagtgtgccatggatttctgataagaattaacattcttgaacaaaggtatcagaaagggtaactcgagttgaaggtttgtgaatagaaggggaaatgtgatagaagattattcagaacaaaataagtagacaaaataacaaaagacaggaaaataagtctctttgtatccttattaatcatttgaaattatgctataatattttttaaaactcacctgtttggttctgggtgaagcagttcctgaaggagtgtttgtcagaatatattgttaggagaatagagggttctgtggccaagtaagtttgggaaatagtgggttagacaaagttgagttactgttggcctttcagacctttgatacgctaatgtgcattttaaatctccaagaagcacctctattttatacatcatttccctaatttattttaatatggatttcttgtttttgttttcttgagacggagtcttggtcttgtcacccaggctggagtgcagtggcacgatctcggctcactacaacctccgcctcccaggttcaagcgattctcctgcctcagcctcccaatttactgggattacaggcacctgccaccacgcccagctaatttttgtatttttagtagagatggggtttcaccatgttgaccaggctgattttgaactcctgacctcaggtgattctgcccgcctcaccctcccacagtgctggaattataggtatgagccactgtccccggccagatttttttaaaagtaggtatcttgtgggatttatgttctgagagatacacctaaggaaatgctgccctacagtgtttttgctagttcatactcattacaaaggtttcttgttgttgggtgcccctctagccagtggtagtaaaatgggaagagacaggtcaagactcccttggaccatggcattgagagagggatggctgtcggcatagatatgttggttatttaggcatttgtgagggaggcccctggctcttccagcctgtttccttaggatcccagttggccgggaacagctgtacaagggtctgctgaactggtggtttcagcagactacccagttcctaagcatccatgagacagagggaaccaacttgtatttccagaacaattttccaaaccttttctggctgtactttaaaagtgccaaaaaggcaatgggtgtttatgacactaaagtcacatacaagctagtatgatacatacatcatagaaagcttatagttgctcagtgacaaagcaaaggaagtttaatattttccagttttgttcattaccgaagacagtctacggttcatagttttcactaaattctaagcagattctatatcctaaaacatttaaacctcactaggcctgcaattttgagagggttagctaaatatgtttggtatcacttcagagtctaaaaccagattactaatcgtgtgtaaggaggcattttgtgtgtctttgcaatgtatacaattggattatttggaacaccattttgaatgtgtatttgagagaaagctcgcctgtgggttttgagttgtggtgtaatggtgaacatgtagccacgtgaaaggccgttggatctttgttctgattcttcagtcgtcttcttgcaaattcagagaaatgtcttttaatcatttcgtttacatatcccagatccttggaaatcatgaaaaataacttgccagagtttgcatcagccctcagtaagtcatgaaccatagagaaggtcatggggccatttattctttggaccactggctacttctgaagttctggcttccttctctctaggaggagtcgtgtattcaagcttttaagttaaatgcataaaaatgagttttacttctcttctgacttgatttttaattttatgaaatgggaaataatgtttttccatttttctgttcattttgaagtgggaatttgaggtgtttgtaatgtcatgttactgttctgaaagattgacagtaaagaagacaagaaatatatgtatgtagtatgcatattagttttgtcccaccaagcctatctttgaatggcaaacattttaaaaacatctgttctagttgcacaactactctagcttctttataaagtaaacaatcttaaagtaagcaatgttggccataatttcaatattctagccttgccgagtgtgaatatattttactcagagactatgtacaaatacactaaagtggtgatggtgatcaatattgtaaagaatttattctgataaatgagaaactggatataatgtcaaaatagctattttctcaataaaaatctcaaatctcctgactgcttatgaattctcgatttaatgttatttattctttgaggtaaatcttttcatcgcgaagaattttttgctggttgaatgtggttgttcagggctgggactgagctatagacatagtgggtttttaaaaaatgtccattctttttttttttttttgagacagagttttgctcttatcacccaggctggagtgcaatggtgtgaactcggctcactgcaaccttcgccacctgggttcaagcaattctcctgccttagcctcccaagtagctgggattacaggcacctgccaccttacccggctaa

SEQ ID NO: 456225 - DNA, 441 bp, Homo sapiens
gagcggccgcccgggcaggtacttaatgtttttccatttttctgttcattttgaagtgggaatttgaggtgtttgtaatgtcatgttactgttctgaaagattgacagtaaagaagacaagaaatatatgtatgtagtatgcatattagttttgtcccaccaagcctatctttgaatggcaaacattttaaaaacatctgttctagttgcacaactactctagcttctttataaagtaaacaatcttaaagtaagcaatgttggccataatttcaatattctagccttgccgagtgtgaatatattttactcagagactatgtacaaatacactaaagtggtgatggtgatcaatattgtaaagaatttattctgataaatgagaaactggatataatgtcaaaatagctattttctcaataaaaatctcaaatctcctga

SEQ ID NO: 456226 - DNA, 279 bp, Homo sapiens
caggggaaccagaagaagcctctggtgggaaaaaaggcagcagctaccaagaaaacaaggctgtgaacttttcgggaactggaactgtttaacttgaacccaggattgtttaaagctttatttatttatagcttcttcttaaaaaaaagtgttgaagaaattttttggttattcatacaaaaaaatgagttgatgatggaaaagcaagtcataatcatctaattgtttttgtctaggtcgagaatgaatgttagctgatgaaataaaccctgacaagga

SEQ ID NO: 456227 - DNA, 4031 bp, Homo sapiens
cggcgccgagtagccgggccgggccggagcgcgggcgcggcggaggcagctgcgcccggctcctgccctcccaggccccgcgccccgcgcccgggccccggcgatggtgacacatgcggcggcggcgcgccggcggcaggaccatggttgagcgcgccagcaagttcgtgctggtggtggcgggctcggtgtgcttcatgctcatcttgtaccagtacgcgggcccaggactgagcctgggcgcgcccggcggccgcgcgccgcccgacgacctggacctgttccccacgcccgacccccactacgagaagaagtactacttcccggtccgcgagctggagcgctcgctgcgcttcgacatgaagggcgacgacgtgatcgtcttcctgcacatccagaagacgggcggcaccaccttcggccgccacctcgtgcagaacgtacgcctcgaggtgccgtgcgactgccggcccggccagaagaagtgcacctgctaccggcccaaccgccgcgagacttggctcttctcccgcttctccaccggctggagctgcgggctgcacgccgactggaccgagctcaccaactgcgtgcccggcgtgctggaccgccgcgactccgccgcgctgcgcacgcccaggaagttctactacatcaccctgctacgagaccccgtgtcccgctacctgagcgagtggcggcatgtgcagaggggtgccacgtggaagacgtcgttgcatatgtgtgatgggcgcacgcccacgcctgaggagctgccgccctgctacgagggcacggactggtcgggctgcacgctacaggagttcatggactgcccgtacaacctggccaacaaccgccaggtgcgcatgctggccgacctgagcctggtgggctgctacaacctgtccttcatccccgagggcaagcgggcccagctgctgctcgagagcgccaagaagaacctgcggggcatggccttcttcggcctgaccgagttccagcgcaagacgcagtacctgttcgagcggacgttcaacctcaagttcatccggcccttcatgcagtacaatagcacgcgggcgggcggcgtggaggtggatgaagacaccatccggcgcatcgaggagctcaacgacctggacatgcagctgtacgactacgccaaggacctcttccagcagcgctaccagtacaagcggcagctggagcgcagggagcagcgcctgaggagccgcgaggagcgtctgctgcaccgggccaaggaggcactgccgcgggaggatgccgacgagccgggccgcgtgcccaccgaggactacatgagccacatcattgagaagtggtagtggcggtggtggccacggggaggcctcttggggggtgtgggggataaaacaggacagacgacaggtccacccaagactgtcaagggatgagcatcccaaacctgctccacagaggtagctgcgtcctgaaaaaaaacagagcagggatgtagtggggctgggcagggatgggggcttgagaaatcaacaggtgcagcccagtgggtcagaggaaagcgtgctcgaaggatgccatggtcagggcagggcctccagagcaggtgttgtgcctggagctgctctcctggcctccttggatttatcgcaaaaactgaaggtttgcgcaagagacgaggacagcggaaagtggacctgccaggccgggagtgtgtccctcaccaactatgcacacagcactcgctcttagctcctctgtccgggctactaggagtgagaccagcttctggcaactgccccagctccaggccatcccatagcccctcctcttctggctgcccccaatgccccgaggcctggggagcccccagctcacccatctgtagctccctcaaagtcagggcccaccccatctgaggcagagaagactcgagtccagcccccaggaagcctgctcccctctctggcccatggtcctgcttcatgctttgggtcaggaggccaaagctgatgttcaggccccacccactccctacagtcctcagaccaaggaggggtttgggtagtaggcccgagctgcattgccggccttcctcgggccaactggcagcccaggagtggggaggctttggccagggatgctgccacttgtgcgtgagtccgcggctggcccttggaggtgaccatccaggcaggcctggctcagactggaagggctggggaccgagggctcccctgcctctgttctcctttctgacccactgggatttgctagcaggctgccccagccccatcaccgaaacacatactcaagagctcaaataccactgctcccaccagcgtacggattaagttcatcaggcttccatcggctggagcatgggaccatagcccctgcccaggagccgtaccctcggaccacagtggctctgtatggccaggaactgggactcgagctttcagattctcaactagccttggcaaaacagctgtaggtggcctccctgacaacagacactcagccctccccaccctggctctccttgcatttccccatgctccccaccccctggcaaaaggctggccatgctctgttcccagcagccgcgcaggtttccccactggctgcaatggccctaccaaaagccatgttgcatatccgttgtaagcacgtgccctgtgccctgtccccattccttatgccctaggaggccaagctggtgtctctaggagggcccacacaggcaccctggatcccccagagagtagattggtgtgctcaggccgcaggctgactcagaggtagggcagtgggctctgcaggccacctggctggggttggtgggggtcctctctcctgccccagcttccactcagccaccacagttgccacaccatggggtggagacgtgggtcaccacgggcttgggagcaagcgccttctgcagcacaggaagccgaagctggggtcaggtgaggtcgctacccctggaggtctggcataagggccccaccctcaggtctcctacactggccccattttactttggggtccaaggacaggatggtcaacagggcagggtggacagcgtgccagcgccgcgcagggccacctccctgggtggatgcatcacactaaggaagtgagtgccaaggggatttagtggtgtggttctttcaaagggaggtcagggtcaatgggaatctgctcggacactcaacatgggggtgggtgcactccttggaggaggaggaacacgttcaggggattgtgaggtcttgcacaagccacgtggggcaccttggcttcccggcaggaggtggacacccagccagaggcctggctcaaggtgacctcaccttcaccatgggcttcctgggtgcgcgggcctgagcgcaggttgttttgtacatattggaatatgtgttaacttatgccccgcatcccaactcacacggaagcacgggtcttgtctcagtctcttcgctgcatttggaaagcagtctcctctcgggccagcgccgggctgaggtgtccagaggcggcggcagctggcagtgccctcagcccccaagtgtccagcctggcacttcccattcaggccacctgctttgggtcaacagttcctttgccagcagcatctcctaaattgtaaggactctgtccaccggggccctcccagggctgtgaggacggaaacaggcagggagtggagctaacagcttagtcaccaggacccccagacctgcaaacgtcccctcctggaaggggaagccaggaacagcagaactgcccacaaaacaaggctgtgaacttttcgggaactggaactgtttaacttgaacccaggattgtttaaagctttatttatttatagcttcttcttaaaaaaaagtgttgaagaaattttttggttattcatacaaaaaaatgagttgatgatggaaaagcaagtcataatcatctaattgtttttgtctaggtcgagaatgaatgttagctgatgaaataaaccctgacaagga

SEQ ID NO: 456228 - DNA, 4026 bp, Homo sapiens
cggcgccgagtagccgggccgggccggagcgcgggcgcggcggaggcagctgcgcccggctcctgccctcccaggccccgcgccccgcgcccgggccccggcgatggtgacacatgcggcggcggcgcgccggcggcaggaccatggttgagcgcgccagcaagttcgtgctggtggtggcgggctcggtgtgcttcatgctcatcttgtaccagtacgcgggcccaggactgagcctgggcgcgcccggcggccgcgcgccgcccgacgacctggacctgttccccacgcccgacccccactacgagaagaagtactacttcccggtccgcgagctggagcgctcgctgcgcttcgacatgaagggcgacgacgtgatcgtcttcctgcacatccagaagacgggcggcaccaccttcggccgccacctcgtgcagaacgtacgcctcgaggtgccgtgcgactgccggcccggccagaagaagtgcacctgctaccggcccaaccgccgcgagacttggctcttctcccgcttctccaccggctggagctgcgggctgcacgccgactggaccgagctcaccaactgcgtgcccggcgtgctggaccgccgcgactccgccgcgctgcgcacgcccaggaagttctactacatcaccctgctacgagaccccgtgtcccgctacctgagcgagtggcggcatgtgcagaggggtgccacgtggaagacgtcgttgcatatgtgtgatgggcgcacgcccacgcctgaggagctgccgccctgctacgagggcacggactggtcgggctgcacgctacaggagttcatggactgcccgtacaacctggccaacaaccgccaggtgcgcatgctggccgacctgagcctggtgggctgctacaacctgtccttcatccccgagggcaagcgggcccagctgctgctcgagagcgccaagaagaacctgcggggcatggccttcttcggcctgaccgagttccagcgcaagacgcagtacctgttcgagcggacgttcaacctcaagttcatccggcccttcatgcagtacaatagcacgcgggcgggcggcgtggaggtggatgaagacaccatccggcgcatcgaggagctcaacgacctggacatgcagctgtacgactacgccaaggacctcttccagcagcgctaccagtacaagcggcagctggagcgcagggagcagcgcctgaggagccgcgaggagcgtctgctgcaccgggccaaggaggcactgccgcgggaggatgccgacgagccgggccgcgtgcccaccgaggactacatgagccacatcattgagaagtggtagtggcggtggtggccacggggaggcctcttggggggtgtgggggataaaacaggacagacgacaggtccacccaagactgtcaagggatgagcatcccaaacctgctccacagaggtagctgcgtcctgaaaaaaaacagagcagggatgtagtggggctgggcagggatgggggcttgagaaatcaacaggtgcagcccagtgggtcagaggaaagcgtgctcgaaggatgccatggtcagggcagggcctccagagcaggtgttgtgcctggagctgctctcctggcctccttggatttatcgcaaaaactgaaggtttgcgcaagagacgaggacagcggaaagtggacctgccaggccgggagtgtgtccctcaccaactatgcacacagcactcgctcttagctcctctgtccgggctactaggagtgagaccagcttctggcaactgccccagctccaggccatcccatagcccctcctcttctggctgcccccaatgccccgaggcctggggagcccccagctcacccatctgtagctccctcaaagtcagggcccaccccatctgaggcagagaagactcgagtccagcccccaggaagcctgctcccctctctggcccatggtcctgcttcatgctttgggtcaggaggccaaagctgatgttcaggccccacccactccctacagtcctcagaccaaggaggggtttgggtagtaggcccgagctgcattgccggccttcctcgggccaactggcagcccaggagtggggaggctttggccagggatgctgccacttgtgcgtgagtccgcggctggcccttggaggtgaccatccaggcaggcctggctcagactggaagggctggggaccgagggctcccctgcctctgttctcctttctgacccactgggatttgctagcaggctgccccagccccatcaccgaaacacatactcaagagctcaaataccactgctcccaccagcgtacggattaagttcatcaggcttccatcggctggagcatgggaccatagcccctgcccaggagccgtaccctcggaccacagtggctctgtatggccaggaactgggactcgagctttcagattctcaactagccttggcaaaacagctgtaggtggcctccctgacaacagacactcagccctccccaccctggctctccttgcatttccccatgctccccaccccctggcaaaaggctggccatgctctgttcccagcagccgcgcaggtttccccactggctgcaatggccctaccaaaagccatgttgcatatccgttgtaagcacgtgccctgtgccctgtccccattccttatgccctaggaggccaagctggtgtctctaggagggcccacacaggcaccctggatcccccagagagtagattggtgtgctcaggccgcaggctgactcagaggtagggcagtgggctctgcaggccacctggctggggttggtgggggtcctctctcctgccccagcttccactcagccaccacagttgccacaccatggggtggagacgtgggtcaccacgggcttgggagcaagcgccttctgcagcacaggaagccgaagctggggtcaggtgaggtcgctacccctggaggtctggcataagggccccaccctcaggtctcctacactggccccattttactttggggtccaaggacaggatggtcaacagggcagggtggacagcgtgccagcgccgcgcagggccacctccctgggtggatgcatcacactaaggaagtgagtgccaaggggatttagtggtgtggttctttcaaagggaggtcagggtcaatgggaatctgctcggacactcaacatgggggtgggtgcactccttggaggaggaggaacacgttcaggggattgtgaggtcttgcacaagccacgtggggcaccttggcttcccggcaggaggtggacacccagccagaggcctggctcaaggtgacctcaccttcaccatgggcttcctgggtgcgcgggcctgagcgcaggttgttttgtacatattggaatatgtgttaacttatgccccgcatcccaactcacacggaagcacgggtcttgtctcagtctcttcgctgcatttggaaagcagtctcctctcgggccagcgccgggctgaggtgtccagaggcggcggcagctggcagtgccctcagcccccaagtgtccagcctggcacttcccattcaggccacctgctttgggtcaacagttcctttgccagcagcatctcctaaattgtaaggactctgtccaccggggccctcccagggctgtgaggacggaaacaggcagggagtggagctaacagcttagtcaccaggacccccagacctgcaaacgtcccctcctggaaggggaagccaggaacagcagaactgcccacaaaacaaggctgtgaacttttcgggaactggaactgtttaacttgaacccaggattgtttaaagctttatttatttatagcttcttcttaaaaaaaagtgttgaagaaattttttggttattcatacaaaaaaatgagttgatgatggaaaagcaagtcataatcatctaattgtttttgtcttgggtcgtttgtcttcgggtcgtttatcttcgggtcgttt

SEQ ID NO: 456229 - DNA, 3969 bp, Homo sapiens
cggcgccgagtagccgggccgggccggagcgcgggcgcggcggaggcagctgcgcccggctcctgccctcccaggccccgcgccccgcgcccgggccccggcgatggtgacacatgcggcggcggcgcgccggcggcaggaccatggttgagcgcgccagcaagttcgtgctggtggtggcgggctcggtgtgcttcatgctcatcttgtaccagtacgcgggcccaggactgagcctgggcgcgcccggcggccgcgcgccgcccgacgacctggacctgttccccacgcccgacccccactacgagaagaagtactacttcccggtccgcgagctggagcgctcgctgcgcttcgacatgaagggcgacgacgtgatcgtcttcctgcacatccagaagacgggcggcaccaccttcggccgccacctcgtgcagaacgtacgcctcgaggtgccgtgcgactgccggcccggccagaagaagtgcacctgctaccggcccaaccgccgcgagacttggctcttctcccgcttctccaccggctggagctgcgggctgcacgccgactggaccgagctcaccaactgcgtgcccggcgtgctggaccgccgcgactccgccgcgctgcgcacgcccaggaagttctactacatcaccctgctacgagaccccgtgtcccgctacctgagcgagtggcggcatgtgcagaggggtgccacgtggaagacgtcgttgcatatgtgtgatgggcgcacgcccacgcctgaggagctgccgccctgctacgagggcacggactggtcgggctgcacgctacaggagttcatggactgcccgtacaacctggccaacaaccgccaggtgcgcatgctggccgacctgagcctggtgggctgctacaacctgtccttcatccccgagggcaagcgggcccagctgctgctcgagagcgccaagaagaacctgcggggcatggccttcttcggcctgaccgagttccagcgcaagacgcagtacctgttcgagcggacgttcaacctcaagttcatccggcccttcatgcagtacaatagcacgcgggcgggcggcgtggaggtggatgaagacaccatccggcgcatcgaggagctcaacgacctggacatgcagctgtacgactacgccaaggacctcttccagcagcgctaccagtacaagcggcagctggagcgcagggagcagcgcctgaggagccgcgaggagcgtctgctgcaccgggccaaggaggcactgccgcgggaggatgccgacgagccgggccgcgtgcccaccgaggactacatgagccacatcattgagaagtggtagtggcggtggtggccacggggaggcctcttggggggtgtgggggataaaacaggacagacgacaggtccacccaagactgtcaagggatgagcatcccaaacctgctccacagaggtagctgcgtcctgaaaaaaaacagagcagggatgtagtggggctgggcagggatgggggcttgagaaatcaacaggtgcagcccagtgggtcagaggaaagcgtgctcgaaggatgccatggtcagggcagggcctccagagcaggtgttgtgcctggagctgctctcctggcctccttggatttatcgcaaaaactgaaggtttgcgcaagagacgaggacagcggaaagtggacctgccaggccgggagtgtgtccctcaccaactatgcacacagcactcgctcttagctcctctgtccgggctactaggagtgagaccagcttctggcaactgccccagctccaggccatcccatagcccctcctcttctggctgcccccaatgccccgaggcctggggagcccccagctcacccatctgtagctccctcaaagtcagggcccaccccatctgaggcagagaagactcgagtccagcccccaggaagcctgctcccctctctggcccatggtcctgcttcatgctttgggtcaggaggccaaagctgatgttcaggccccacccactccctacagtcctcagaccaaggaggggtttgggtagtaggcccgagctgcattgccggccttcctcgggccaactggcagcccaggagtggggaggctttggccagggatgctgccacttgtgcgtgagtccgcggctggcccttggaggtgaccatccaggcaggcctggctcagactggaagggctggggaccgagggctcccctgcctctgttctcctttctgacccactgggatttgctagcaggctgccccagccccatcaccgaaacacatactcaagagctcaaataccactgctcccaccagcgtacggattaagttcatcaggcttccatcggctggagcatgggaccatagcccctgcccaggagccgtaccctcggaccacagtggctctgtatggccaggaactgggactcgagctttcagattctcaactagccttggcaaaacagctgtaggtggcctccctgacaacagacactcagccctccccaccctggctctccttgcatttccccatgctccccaccccctggcaaaaggctggccatgctctgttcccagcagccgcgcaggtttccccactggctgcaatggccctaccaaaagccatgttgcatatccgttgtaagcacgtgccctgtgccctgtccccattccttatgccctaggaggccaagctggtgtctctaggagggcccacacaggcaccctggatcccccagagagtagattggtgtgctcaggccgcaggctgactcagaggtagggcagtgggctctgcaggccacctggctggggttggtgggggtcctctctcctgccccagcttccactcagccaccacagttgccacaccatggggtggagacgtgggtcaccacgggcttgggagcaagcgccttctgcagcacaggaagccgaagctggggtcaggtgaggtcgctacccctggaggtctggcataagggccccaccctcaggtctcctacactggccccattttactttggggtccaaggacaggatggtcaacagggcagggtggacagcgtgccagcgccgcgcagggccacctccctgggtggatgcatcacactaaggaagtgagtgccaaggggatttagtggtgtggttctttcaaagggaggtcagggtcaatgggaatctgctcggacactcaacatgggggtgggtgcactccttggaggaggaggaacacgttcaggggattgtgaggtcttgcacaagccacgaacagcagaactgcccacaaaacaaggctgtgaacttttcgggaactggaactgtttaacttgaacccaggattgtttaaagctttatttatttatagcttcttcttaaaaaaaagtgttgaagaaattttttggttattcatacaaaaaaatgagttgatgatggaaaagcaagtcataatcatctaattgtttttgtctaggtcgagaatgaatgttagctgatgaaataaaccctgacaaggaaaaaatataatgcaaaattgaaacacaatttatacgagacacaacgaaccgcgaaaagaataaaactcatcaaatccataacaaagcacaacacaacacaaacacagacagaaacggagcggccgcgccccacgaccacacgcccaccggagggaccaacaaaaggcagatgcaccacacaccatccagcacaacagagggcccgcacccaaacaagacgggcgacgcaaacagaccaggacgcgagccgcgagcggccaccgtcgcgcacaaaccaccgcgagcgcaccggacaacaccacggagtagggccgcacacccgtgcgaggagagccgcacccccgcgcgagcgggggaggagaaccaacggcggcgacaaccaccaccgacgaggaggggggaagcgcgaccgcggggcgagacaa

SEQ ID NO: 456230 - DNA, 4456 bp, Homo sapiens
cggcgccgagtagccgggccgggccggagcgcgggcgcggcggaggcagctgcgcccggctcctgccctcccaggccccgcgccccgcgcccgggccccggcgatggtgacacatgcggcggcggcgcgccggcggcaggaccatggttgagcgcgccagcaagttcgtgctggtggtggcgggctcggtgtgcttcatgctcatcttgtaccagtacgcgggcccaggactgagcctgggcgcgcccggcggccgcgcgccgcccgacgacctggacctgttccccacgcccgacccccactacgagaagaagtactacttcccggtccgcgagctggagcgctcgctgcgcttcgacatgaagggcgacgacgtgatcgtcttcctgcacatccagaagacgggcggcaccaccttcggccgccacctcgtgcagaacgtacgcctcgaggtgccgtgcgactgccggcccggccagaagaagtgcacctgctaccggcccaaccgccgcgagacttggctcttctcccgcttctccaccggctggagctgcgggctgcacgccgactggaccgagctcaccaactgcgtgcccggcgtgctggaccgccgcgactccgccgcgctgcgcacgcccaggaagttctactacatcaccctgctacgagaccccgtgtcccgctacctgagcgagtggcggcatgtgcagaggggtgccacgtggaagacgtcgttgcatatgtgtgatgggcgcacgcccacgcctgaggagctgccgccctgctacgagggcacggactggtcgggctgcacgctacaggagttcatggactgcccgtacaacctggccaacaaccgccaggtgcgcatgctggccgacctgagcctggtgggctgctacaacctgtccttcatccccgagggcaagcgggcccagctgctgctcgagagcgccaagaagaacctgcggggcatggccttcttcggcctgaccgagttccagcgcaagacgcagtacctgttcgagcggacgttcaacctcaagttcatccggcccttcatgcagtacaatagcacgcgggcgggcggcgtggaggtggatgaagacaccatccggcgcatcgaggagctcaacgacctggacatgcagctgtacgactacgccaaggacctcttccagcagcgctaccagtacaagcggcagctggagcgcagggagcagcgcctgaggagccgcgaggagcgtctgctgcaccgggccaaggaggcactgccgcgggaggatgccgacgagccgggccgcgtgcccaccgaggactacatgagccacatcattgagaagtggtagtggcggtggtggccacggggaggcctcttggggggtgtgggggataaaacaggacagacgacaggtccacccaagactgtcaagggatgagcatcccaaacctgctccacagaggtagctgcgtcctgaaaaaaaacagagcagggatgtagtggggctgggcagggatgggggcttgagaaatcaacaggtgcagcccagtgggtcagaggaaagcgtgctcgaaggatgccatggtcagggcagggcctccagagcaggtgttgtgcctggagctgctctcctggcctccttggatttatcgcaaaaactgaaggtttgcgcaagagacgaggacagcggaaagtggacctgccaggccgggagtgtgtccctcaccaactatgcacacagcactcgctcttagctcctctgtccgggctactaggagtgagaccagcttctggcaactgccccagctccaggccatcccatagcccctcctcttctggctgcccccaatgccccgaggcctggggagcccccagctcacccatctgtagctccctcaaagtcagggcccaccccatctgaggcagagaagactcgagtccagcccccaggaagcctgctcccctctctggcccatggtcctgcttcatgctttgggtcaggaggccaaagctgatgttcaggccccacccactccctacagtcctcagaccaaggaggggtttgggtagtaggcccgagctgcattgccggccttcctcgggccaactggcagcccaggagtggggaggctttggccagggatgctgccacttgtgcgtgagtccgcggctggcccttggaggtgaccatccaggcaggcctggctcagactggaagggctggggaccgagggctcccctgcctctgttctcctttctgacccactgggatttgctagcaggctgccccagccccatcaccgaaacacatactcaagagctcaaataccactgctcccaccagcgtacggattaagttcatcaggcttccatcggctggagcatgggaccatagcccctgcccaggagccgtaccctcggaccacagtggctctgtatggccaggaactgggactcgagctttcagattctcaactagccttggcaaaacagctgtaggtggcctccctgacaacagacactcagccctccccaccctggctctccttgcatttccccatgctccccaccccctggcaaaaggctggccatgctctgttcccagcagccgcgcaggtttccccactggctgcaatggccctaccaaaagccatgttgcatatccgttgtaagcacgtgccctgtgccctgtccccattccttatgccctaggaggccaagctggtgtctctaggagggcccacacaggcaccctggatcccccagagagtagattggtgtgctcaggccgcaggctgactcagaggtagggcagtgggctctgcaggccacctggctggggttggtgggggtcctctctcctgccccagcttccactcagccaccacagttgccacaccatggggtggagacgtgggtcaccacgggcttgggagcaagcgccttctgcagcacaggaagccgaagctggggtcaggtgaggtcgctacccctggaggtctggcataagggccccaccctcaggtctcctacactggccccattttactttggggtccaaggacaggatggtcaacagggcagggtggacagcgtgccagcgccgcgcagggccacctccctgggtggatgcatcacactaaggaagtgagtgccaaggggatttagtggtgtggttctttcaaagggaggtcagggtcaatgggaatctgctcggacactcaacatgggggtgggtgcactccttggaggaggaggaacacgttcaggggattgtgaggtcttgcacaagccacgtggggcaccttggcttcccggcaggaggtggacacccagccagaggcctggctcaaggtgacctcaccttcaccatgggcttcctgggtgcgcgggcctgagcgcaggttgttttgtacatattggaatatgtgttaacttatgccccgcatcccaactcacacggaagcacgggtcttgtctcagtctcttcgctgcatttggaaagcagtctcctctcgggccagcgccgggctgaggtgtccagaggcggcggcagctggcagtgccctcagcccccaagtgtccagcctggcacttcccattcaggccacctgctttgggtcaacagttcctttgccagcagcatctcctaaattgtaaggactctgtccaccggggccctcccagggctgtgaggacggaaacaggcagggagtggagctaacagcttagtcaccaggacccccagacctgcaaacgtcccctcctggaaggggaagccaggaacagcagaactgcccacaaaacaaggctgtgaacttttcgggaactggaactgtttaacttgaacccaggattgtttaaagctttatttatttatagcttcttcttaaaaaaaagtgttgaagaaattttttggttattcatacaaaaaaatgagttgatgatggaaaagcaagtcataatcatctaattgtttttgtctaggtcgagaatgaatgttagctgatgaaataaaccctgacaaggaaaaaatataatgcaaaattgaaacacaatttatacgagacacaacgaaccgcgaaaagaataaaactcatcaaatccataacaaagcacaacacaacacaaacacagacagaaacggagcggccgcgccccacgaccacacgcccaccggagggaccaacaaaaggcagatgcaccacacaccatccagcacaacagagggcccgcacccaaacaagacgggcgacgcaaacagaccaggacgcgagccgcgagcggccaccgtcgcgcacaaaccaccgcgagcgcaccggacaacaccacggagtagggccgcacacccgtgcgaggagagccgcacccccgcgcgagcgggggaggagaaccaacggcggcgacaaccaccaccgacgaggaggggggaagcgcgaccgcggggcgagacaa

SEQ ID NO: 456231 - DNA, 3726 bp, Homo sapiens
  misc_feature (3588)..(3588): n is a, c, g, or t
cggcgccgagtagccgggccgggccggagcgcgggcgcggcggaggcagctgcgcccggctcctgccctcccaggccccgcgccccgcgcccgggccccggcgatggtgacacatgcggcggcggcgcgccggcggcaggaccatggttgagcgcgccagcaagttcgtgctggtggtggcgggctcggtgtgcttcatgctcatcttgtaccagtacgcgggcccaggactgagcctgggcgcgcccggcggccgcgcgccgcccgacgacctggacctgttccccacgcccgacccccactacgagaagaagtactacttcccggtccgcgagctggagcgctcgctgcgcttcgacatgaagggcgacgacgtgatcgtcttcctgcacatccagaagacgggcggcaccaccttcggccgccacctcgtgcagaacgtacgcctcgaggtgccgtgcgactgccggcccggccagaagaagtgcacctgctaccggcccaaccgccgcgagacttggctcttctcccgcttctccaccggctggagctgcgggctgcacgccgactggaccgagctcaccaactgcgtgcccggcgtgctggaccgccgcgactccgccgcgctgcgcacgcccaggaagttctactacatcaccctgctacgagaccccgtgtcccgctacctgagcgagtggcggcatgtgcagaggggtgccacgtggaagacgtcgttgcatatgtgtgatgggcgcacgcccacgcctgaggagctgccgccctgctacgagggcacggactggtcgggctgcacgctacaggagttcatggactgcccgtacaacctggccaacaaccgccaggtgcgcatgctggccgacctgagcctggtgggctgctacaacctgtccttcatccccgagggcaagcgggcccagctgctgctcgagagcgccaagaagaacctgcggggcatggccttcttcggcctgaccgagttccagcgcaagacgcagtacctgttcgagcggacgttcaacctcaagttcatccggcccttcatgcagtacaatagcacgcgggcgggcggcgtggaggtggatgaagacaccatccggcgcatcgaggagctcaacgacctggacatgcagctgtacgactacgccaaggacctcttccagcagcgctaccagtacaagcggcagctggagcgcagggagcagcgcctgaggagccgcgaggagcgtctgctgcaccgggccaaggaggcactgccgcgggaggatgccgacgagccgggccgcgtgcccaccgaggactacatgagccacatcattgagaagtggtagtggcggtggtggccacggggaggcctcttggggggtgtgggggataaaacaggacagacgacaggtccacccaagactgtcaagggatgagcatcccaaacctgctccacagaggtagctgcgtcctgaaaaaaaacagagcagggatgtagtggggctgggcagggatgggggcttgagaaatcaacaggtgcagcccagtgggtcagaggaaagcgtgctcgaaggatgccatggtcagggcagggcctccagagcaggtgttgtgcctggagctgctctcctggcctccttggatttatcgcaaaaactgaaggtttgcgcaagagacgaggacagcggaaagtggacctgccaggccgggagtgtgtccctcaccaactatgcacacagcactcgctcttagctcctctgtccgggctactaggagtgagaccagcttctggcaactgccccagctccaggccatcccatagcccctcctcttctggctgcccccaatgccccgaggcctggggagcccccagctcacccatctgtagctccctcaaagtcagggcccaccccatctgaggcagagaagactcgagtccagcccccaggaagcctgctcccctctctggcccatggtcctgcttcatgctttgggtcaggaggccaaagctgatgttcaggccccacccactccctacagtcctcagaccaaggaggggtttgggtagtaggcccgagctgcattgccggccttcctcgggccaactggcagcccaggagtggggaggctttggccagggatgctgccacttgtgcgtgagtccgcggctggcccttggaggtgaccatccaggcaggcctggctcagactggaagggctggggaccgagggctcccctgcctctgttctcctttctgacccactgggatttgctagcaggctgccccagccccatcaccgaaacacatactcaagagctcaaataccactgctcccaccagcgtacggattaagttcatcaggcttccatcggctggagcatgggaccatagcccctgcccaggagccgtaccctcggaccacagtggctctgtatggccaggaactgggactcgagctttcagattctcaactagccttggcaaaacagctgtaggtggcctccctgacaacagacactcagccctccccaccctggctctccttgcatttccccatgctccccaccccctggcaaaaggctggccatgctctgttcccagcagccgcgcaggtttccccactggctgcaatggccctaccaaaagccatgttgcatatccgttgtaagcacgtgccctgtgccctgtccccattccttatgccctaggaggccaagctggtgtctctaggagggcccacacaggcaccctggatcccccagagagtagattggtgtgctcaggccgcaggctgactcagaggtagggcagtgggctctgcaggccacctggctggggttggtgggggtcctctctcctgccccagcttccactcagccaccacagttgccacaccatggggtggagacgtgggtcaccacgggcttgggagcaagcgccttctgcagcacaggaagccgaagctggggtcaggtgaggtcgctacccctggaggtctggcataagggccccaccctcaggtctcctacactggccccattttactttggggtccaaggacaggatggtcaacagggcagggtggacagcgtgccagcgccgcgcagggccacctccctgggtggatgcatcacactaaggaagtgagtgccaaggggatttagtggtgtggttctttcaaagggaggtcagggtcaatgggaatctgctcggacactcaacatgggggtgggtgcactccttggaggaggaggaacacgttcaggggattgtgaggtcttgcacaagccacgtggggcaccttggcttcccggcaggaggtggacacccagccagaggcctggctcaaggtgacctcaccttcaccatgggcttcctgggtgcgcgggcctgagcgcaggttgttttgtacatattggaatatgtgttaacttatgccccgcatcccaactcacacggaagcacgggtcttgtctcagtctcttcgctgcatttggaaagcagtctcctctcgggccagcgccgggctgaggtgtccagaggcggcggcagctggcagtgccctcagcccaaggtcagctgnattccatcaggcactgtgggtcaccggtccttgcagagattctaatgagacgcgcacgggccccagggggggcggaaagggggggggaactgcaggacccaagaagcccgggggggagaagagcccaaaagggggggg

SEQ ID NO: 456232 - DNA, 2924 bp, Homo sapiens
cggcgccgagtagccgggccgggccggagcgcgggcgcggcggaggcagctgcgcccggctcctgccctcccaggccccgcgccccgcgcccgggccccggcgatggtgacacatgcggcggcggcgcgccggcggcaggaccatggttgagcgcgccagcaagttcgtgctggtggtggcgggctcggtgtgcttcatgctcatcttgtaccagtacgcgggcccaggactgagcctgggcgcgcccggcggccgcgcgccgcccgacgacctggacctgttccccacgcccgacccccactacgagaagaagtactacttcccggtccgcgagctggagcgctcgctgcgcttcgacatgaagggcgacgacgtgatcgtcttcctgcacatccagaagacgggcggcaccaccttcggccgccacctcgtgcagaacgtacgcctcgaggtgccgtgcgactgccggcccggccagaagaagtgcacctgctaccggcccaaccgccgcgagacttggctcttctcccgcttctccaccggctggagctgcgggctgcacgccgactggaccgagctcaccaactgcgtgcccggcgtgctggaccgccgcgactccgccgcgctgcgcacgcccaggaagttctactacatcaccctgctacgagaccccgtgtcccgctacctgagcgagtggcggcatgtgcagaggggtgccacgtggaagacgtcgttgcatatgtgtgatgggcgcacgcccacgcctgaggagctgccgccctgctacgagggcacggactggtcgggctgcacgctacaggagttcatggactgcccgtacaacctggccaacaaccgccaggtgcgcatgctggccgacctgagcctggtgggctgctacaacctgtccttcatccccgagggcaagcgggcccagctgctgctcgagagcgccaagaagaacctgcggggcatggccttcttcggcctgaccgagttccagcgcaagacgcagtacctgttcgagcggacgttcaacctcaagttcatccggcccttcatgcagtacaatagcacgcgggcgggcggcgtggaggtggatgaagacaccatccggcgcatcgaggagctcaacgacctggacatgcagctgtacgactacgccaaggacctcttccagcagcgctaccagtacaagcggcagctggagcgcagggagcagcgcctgaggagccgcgaggagcgtctgctgcaccgggccaaggaggcactgccgcgggaggatgccgacgagccgggccgcgtgcccaccgaggactacatgagccacatcattgagaagtggtagtggcggtggtggccacggggaggcctcttggggggtgtgggggataaaacaggacagacgacaggtccacccaagactgtcaagggatgagcatcccaaacctgctccacagaggtagctgcgtcctgaaaaaaaacagagcagggatgtagtggggctgggcagggatgggggcttgagaaatcaacaggtgcagcccagtgggtcagaggaaagcgtgctcgaaggatgccatggtcagggcagggcctccagagcaggtgttgtgcctggagctgctctcctggcctccttggatttatcgcaaaaactgaaggtttgcgcaagagacgaggacagcggaaagtggacctgccaggccgggagtgtgtccctcaccaactatgcacacagcactcgctcttagctcctctgtccgggctactaggagtgagaccagcttctggcaactgccccagctccaggccatcccatagcccctcctcttctggctgcagcacaggaagccgaagctggggtcaggtgaggtcgctacccctggaggtctggcataagggccccaccctcaggtctcctacactggccccattttactttggggtccaaggacaggatggtcaacagggcagggtggacagcgtgccagcgccgcgcagggccacctccctgggtggatgcatcacactaaggaagtgagtgccaaggggatttagtggtgtggttctttcaaagggaggtcagggtcaatgggaatctgctcggacactcaacatgggggtgggtgcactccttggaggaggaggaacacgttcaggggattgtgaggtcttgcacaagccacgtggggcaccttggcttcccggcaggaggtggacacccagccagaggcctggctcaaggtgacctcaccttcaccatgggcttcctgggtgcgcgggcctgagcgcaggttgttttgtacatattggaatatgtgttaacttatgccccgcatcccaactcacacggaagcacgggtcttgtctcagtctcttcgctgcatttggaaagcagtctcctctcgggccagcgccgggctgaggtgtccagaggcggcggcagctggcagtgccctcagcccccaagtgtccagcctggcacttcccattcaggccacctgctttgggtcaacagttcctttgccagcagcatctcctaaattgtaaggactctgtccaccggggccctcccagggctgtgaggacggaaacaggcagggagtggagctaacagcttagtcaccaggacccccagacctgcaaacgtcccctcctggaaggggaagccaggaacagcagaactgcccacaaaacaaggctgtgaacttttcgggaactggaactgtttaacttgaacccaggattgtttaaagctttatttatttatagcttcttcttaaaaaaaagtgttgaagaaattttttggttattcatacaaaaaaatgagttgatgatggaaaagcaagtcataatcatctaattgtttttgtctaggtcgagaatgaatgttagctgatgaaataaaccctgacaagga

SEQ ID NO: 456233 - DNA, 2172 bp, Homo sapiens
gccctgcagtgccattggcctggcaggcaggatcgaggaggaagtggctgattactgagcggttcttcctcacctggcttgggccactgtgcacagctgtgccgctggctcagccccgccccctgcggccctccgccgtggcttccccctccctacagagagatgctgtcccgtgggtggtttcaccgagacctcagtgggctggatgcagagaccctgctcaagggccgaggtgtccacggtagcttcctggctcggcccagtcgcaagaaccagggtgacttctcgctctccgtcagggtgggggatcaggtgacccatattcggatccagaactcaggggatttctatgacctgtatggaggggagaagtttgcgactctgacagagctggtggagtactacactcagcagcagggtgtcctgcaggaccgcgacggcaccatcatccacctcaagtacccgctgaactgctccgatcccactagtgagaggtggtaccatggccacatgtctggcgggcaggcagagacgctgctgcaggccaagggcgagccctggacgtttcttgtgcgtgagagcctcagccagcctggagacttcgtgctttctgtgctcagtgaccagcccaaggctggcccaggctccccgctcagggtcacccacatcaaggtcatgtgcgagggtggacgctacacagtgggtggtttggagaccttcgacagcctcacggacctggtggagcatttcaagaagacggggattgaggaggcctcaggcgcctttgtctacctgcggcagccgtactatgccacgagggtgaatgcggctgacattgagaaccgagtgttggaactgaacaagaagcaggagtccgaggatacagccaaggctggcttctgggaggagtttgagagtttgcagaagcaggaggtgaagaacttgcaccagcgtctggaagggcagcggccagagaacaagggcaagaaccgctacaagaacattctcccctttgaccacagccgagtgatcctgcagggacgggacagtaacatccccgggtccgactacatcaatgccaactacatcaagaaccagctgctaggccctgatgagaacgctaagacctacatcgccagccagggctgtctggaggccacggtcaatgacttctggcagatggcgtggcaggagaacagccgtgtcatcgtcatgaccacccgagaggtggagaaaggccggaacaaatgcgtcccatactggcccgaggtgggcatgcagcgtgcttatgggccctactctgtgaccaactgcggggagcatgacacaaccgaatacaaactccgtaccttacaggtctccccgctggacaatggagacctgattcgggagatctggcattaccagtacctgagctggcccgaccatggggtccccagtgagcctgggggtgtcctcagcttcctggaccagatcaaccagcggcaggaaagtctgcctcacgcagggcccatcatcgtgcactgcagcgccggcatcggccgcacaggcaccatcattgtcatcgacatgctcatggagaacatctccaccaagggcctggactgtgacattgacatccagaagaccatccagatggtgcgggcgcagcgctcgggcatggtgcagacggaggcgcagtacaagttcatctacgtggccatcgcccagttcattgaaaccactaagaagaagctggaggtcctgcagtcgcagaagggccaggagtcggagtacgggaacatcacctatcccccagccatgaagaatgcccatgccaaggcctcccgcacctcgtccaaacacaaggaggatgtgtatgagaacctgcacactaagaacaagagggaggagaaagtgaagaagcagcggtcagcagacaaggagaagagcaagggttccctcaagaggaagtgagcggtgctgtcctcaggtggccatgcctcagccctgaccctgtggaagcatttcgcgatggacagactcacaacctgaacctaggagtgccccattcttttgtaatttaaatggctgcatcccccccacctctccctgaccctgtatatagcccagccaggccccaggcagggccaacccttctcctcttgtaaataaagccctgggatcactgtg

SEQ ID NO: 456234 - DNA, 455 bp, Homo sapiens
tgccggctgccccaggccagtggagtggcagccccagaactgggaccaccgggggtggtgaggcggcccggcactgggagctgcatctgaggcttagtccctgagctctctgcctgcccagactagctgcacctcctcattccctgcgcccccttcctctccggaagcccccaggatggtgaggtggtttcaccgagacctcagtgggctggatgcagagaccctgctcaagggccgaggtgtccacggtagcttcctggctcggcccagtcgcaagaaccagggtgacttctcgctctccgtcaggtaggtgggccccccgcaaccccgggcattttggccactctcttgtgccatccaggccctgaaccactcattcctggttccccgtggcagtgctgactccccgtctgttcccttgcccccaacccccacactccccatccctgtctgtg

SEQ ID NO: 456235 - DNA, 340 bp, Homo sapiens
tggctggtactgcctcggaggtactgggatgcgcccccttcctctccggaagcccccaggatggtgaggtggtttcaccgagacctcagtgggctggatgcagagaccctgctcaagggccgaggtgtccacggtagcttcctggctcggcccagtcgcaagaaccagggtgacttctcgctctccgtcaggtaggtgggccccccgcaaccccgggcattttggccactctcttgtgccatccaggccctgaaccactcattcctggttccccgtggcagtgctgactccccgtctgttcccttgcccccaacccccacactccccatccctgtctgtg

SEQ ID NO: 456236 - DNA, 2554 bp, Homo sapiens
tgccggctgccccaggccagtggagtggcagccccagaactgggaccaccgggggtggtgaggcggcccggcactgggagctgcatctgaggcttagtccctgagctctctgcctgcccagactagctgcacctcctcattccctgcgcccccttcctctccggaagcccccaggatggtgaggtggtttcaccgagacctcagtgggctggatgcagagaccctgctcaagggccgaggtgtccacggtagcttcctggctcggcccagtcgcaagaaccagggtgacttctcgctctccgtcagggtgggggatcaggtgacccatattcggatccagaactcaggggatttctatgacctgtatggaggggagaagtttgcgactctgacagagctggtggagtactacactcagcagcagggtgtcctgcaggaccgcgacggcaccatcatccacctcaagtacccgctgaactgctccgatcccactagtgagaggtggtaccatggccacatgtctggcgggcaggcagagacgctgctgcaggccaagggcgagccctggacgtttcttgtgcgtgagagcctcagccagcctggagacttcgtgctttctgtgctcagtgaccagcccaaggctggcccaggctccccgctcagggtcacccacatcaaggtcatgtgcgagggtggacgctacacagtgggtggtttggagaccttcgacagcctcacggacctggtggagcatttcaagaagacggggattgaggaggcctcaggcgcctttgtctacctgcggcagccgtactatgccacgagggtgaatgcggctgacattgagaaccgagtgttggaactgaacaagaagcaggagtccgaggatacagccaaggctggcttctgggaggagtttgagagtttgcagaagcaggaggtgaagaacttgcaccagcgtctggaagggcagcggccagagaacaagggcaagaaccgctacaagaacattctcccctttgaccacagccgagtgatcctgcagggacgggacagtaacatccccgggtccgactacatcaatgccaactacatcaagaaccagctgctaggccctgatgagaacgctaagacctacatcgccagccagggctgtctggaggccacggtcaatgacttctggcagatggcgtggcaggagaacagccgtgtcatcgtcatgaccacccgagaggtggagaaaggccggaacaaatgcgtcccatactggcccgaggtgggcatgcagcgtgcttatgggccctactctgtgaccaactgcggggagcatgacacaaccgaatacaaactccgtaccttacaggtctccccgctggacaatggagacctgattcgggagatctggcattaccagtacctgagctggcccgaccatggggtccccagtgagcctgggggtgtcctcagcttcctggaccagatcaaccagcggcaggaaagtctgcctcacgcagggcccatcatcgtgcactgcagcgccggcatcggccgcacaggcaccatcattgtcatcgacatgctcatggagaacatctccaccaagggcctggactgtgacattgacatccagaagaccatccagatggtgcgggcgcagcgctcgggcatggtgcagacggaggcgcagtacaagttcatctacgtggccatcgcccagttcattgaaaccactaagaagaagctggaggtcctgcagtcgcagaagggccaggagtcggagtacgggaacatcacctatcccccagccatgaagaatgcccatgccaaggcctcccgcacctcgtccaaacacaaggaggatgtgtatgagaacctgcacactaagaacaagagggaggagaaagtgaagaagcagcggtcagcagacaaggagaagagcaagggttccctcaagaggaagtgagcggtgctgtcctcaggtggccatgcctcagccctgaccctgtggaagcatttcgcgatggacagactcacaacctgaacctaggagtgccccattcttttgtaatttaaatggctgcatcccccccacctctccctgaccctgtatatagcccagccaggccccaggcagggccaacccttctcctcttgtaaataaagccctgggatcactgtgaaaaaaaaaacaaaaacgaaacaaaaaaaaaaaacaaaaacaaaaaaaaataaaaacaaacaaaacaaacaacacgaacactatgtgaatggctggatcagtatgtaataaataccactgactagaagttgagtgagtaagtagtggtaagtgagccgctcctactccaagatgtatgttgaggaaggactgggactgtacattcaattcgacggaacaccaggcaaattgcgtcggtgttgtggtgtaagcaattcggagggtgacgagtgaccgctgtagggatagaacacacagtgggatggtctgatgtaggaactcatagcacgcacacaggaaaactagatcagaacagggaactactagcaaaaccga

SEQ ID NO: 456237 - DNA, 2031 bp, Homo sapiens
cctactttctcgtgcaaagcccccaggatggtgaggtggtttcaccgagacctcagtgggctggatgcagagaccctgctcaagggccgaggtgtccacggtagcttcctggctcggcccagtcgcaagaaccagggtgacttctcgctctccgtcagggtgggggatcaggtgacccatattcggatccagaactcaggggatttctatgacctgtatggaggggagaagtttgcgactctgacagagctggtggagtactacactcagcagcagggtgtcctgcaggaccgcgacggcaccatcatccacctcaagtacccgctgaactgctccgatcccactagtgagaggtggtaccatggccacatgtctggcgggcaggcagagacgctgctgcaggccaagggcgagccctggacgtttcttgtgcgtgagagcctcagccagcctggagacttcgtgctttctgtgctcagtgaccagcccaaggctggcccaggctccccgctcagggtcacccacatcaaggtcatgtgcgagggtggacgctacacagtgggtggtttggagaccttcgacagcctcacggacctggtggagcatttcaagaagacggggattgaggaggcctcaggcgcctttgtctacctgcggcagccgtactatgccacgagggtgaatgcggctgacattgagaaccgagtgttggaactgaacaagaagcaggagtccgaggatacagccaaggctggcttctgggaggagtttgagagtttgcagaagcaggaggtgaagaacttgcaccagcgtctggaagggcagcggccagagaacaagggcaagaaccgctacaagaacattctcccctttgaccacagccgagtgatcctgcagggacgggacagtaacatccccgggtccgactacatcaatgccaactacatcaagaaccagctgctaggccctgatgagaacgctaagacctacatcgccagccagggctgtctggaggccacggtcaatgacttctggcagatggcgtggcaggagaacagccgtgtcatcgtcatgaccacccgagaggtggagaaaggccggaacaaatgcgtcccatactggcccgaggtgggcatgcagcgtgcttatgggccctactctgtgaccaactgcggggagcatgacacaaccgaatacaaactccgtaccttacaggtctccccgctggacaatggagacctgattcgggagatctggcattaccagtacctgagctggcccgaccatggggtccccagtgagcctgggggtgtcctcagcttcctggaccagatcaaccagcggcaggaaagtctgcctcacgcagggcccatcatcgtgcactgcagcgccggcatcggccgcacaggcaccatcattgtcatcgacatgctcatggagaacatctccaccaagggcctggactgtgacattgacatccagaagaccatccagatggtgcgggcgcagcgctcgggcatggtgcagacggaggcgcagtacaagttcatctacgtggccatcgcccagttcattgaaaccactaagaagaagctggaggtcctgcagtcgcagaagggccaggagtcggagtacgggaacatcacctatcccccagccatgaagaatgcccatgccaaggcctcccgcacctcgtccaaacacaaggaggatgtgtatgagaacctgcacactaagaacaagagggaggagaaagtgaagaagcagcggtcagcagacaaggagaagagcaagggttccctcaagaggaagtgagcggtgctgtcctcaggtggccatgcctcagccctgaccctgtggaagcatttcgcgatggacagactcacaacctgaacctaggagtgccccattcttttgtaatttaaatggctgcatcccccccacctctccctgaccctgtatatagcccagccaggccccaggcagggccaacccttctcctcttgtaaataaagccctgggatcactgtg

SEQ ID NO: 456238 - DNA, 1954 bp, Homo sapiens
gttaaggctaggtacgaggctgggtgttaattcgccgagggccagtcgcaagatccagggtgacttctcgctctccgtcagggtgggggatcaggtgacccatattcggatccagaactcaggggatttctatgacctgtatggaggggagaagtttgcgactctgacagagctggtggagtactacactcagcagcagggtgtcctgcaggaccgcgacggcaccatcatccacctcaagtacccgctgaactgctccgatcccactagtgagaggtggtaccatggccacatgtctggcgggcaggcagagacgctgctgcaggccaagggcgagccctggacgtttcttgtgcgtgagagcctcagccagcctggagacttcgtgctttctgtgctcagtgaccagcccaaggctggcccaggctccccgctcagggtcacccacatcaaggtcatgtgcgagggtggacgctacacagtgggtggtttggagaccttcgacagcctcacggacctggtggagcatttcaagaagacggggattgaggaggcctcaggcgcctttgtctacctgcggcagccgtactatgccacgagggtgaatgcggctgacattgagaaccgagtgttggaactgaacaagaagcaggagtccgaggatacagccaaggctggcttctgggaggagtttgagagtttgcagaagcaggaggtgaagaacttgcaccagcgtctggaagggcagcggccagagaacaagggcaagaaccgctacaagaacattctcccctttgaccacagccgagtgatcctgcagggacgggacagtaacatccccgggtccgactacatcaatgccaactacatcaagaaccagctgctaggccctgatgagaacgctaagacctacatcgccagccagggctgtctggaggccacggtcaatgacttctggcagatggcgtggcaggagaacagccgtgtcatcgtcatgaccacccgagaggtggagaaaggccggaacaaatgcgtcccatactggcccgaggtgggcatgcagcgtgcttatgggccctactctgtgaccaactgcggggagcatgacacaaccgaatacaaactccgtaccttacaggtctccccgctggacaatggagacctgattcgggagatctggcattaccagtacctgagctggcccgaccatggggtccccagtgagcctgggggtgtcctcagcttcctggaccagatcaaccagcggcaggaaagtctgcctcacgcagggcccatcatcgtgcactgcagcgccggcatcggccgcacaggcaccatcattgtcatcgacatgctcatggagaacatctccaccaagggcctggactgtgacattgacatccagaagaccatccagatggtgcgggcgcagcgctcgggcatggtgcagacggaggcgcagtacaagttcatctacgtggccatcgcccagttcattgaaaccactaagaagaagctggaggtcctgcagtcgcagaagggccaggagtcggagtacgggaacatcacctatcccccagccatgaagaatgcccatgccaaggcctcccgcacctcgtccaaacacaaggaggatgtgtatgagaacctgcacactaagaacaagagggaggagaaagtgaagaagcagcggtcagcagacaaggagaagagcaagggttccctcaagaggaagtgagcggtgctgtcctcaggtggccatgcctcagccctgaccctgtggaagcatttcgcgatggacagactcacaacctgaacctaggagtgccccattcttttgtaatttaaatggctgcatcccccccacctctccctgaccctgtatatagcccagccaggccccaggcagggccaacccttctcctcttgtaaataaagccctgggatcactgtg

SEQ ID NO: 456239 - DNA, 2174 bp, Homo sapiens
cctactttctcgtgcaaagcccccaggatggtgaggtggtttcaccgagacctcagtgggctggatgcagagaccctgctcaagggccgaggtgtccacggtagcttcctggctcggcccagtcgcaagaaccagggtgacttctcgctctccgtcagggtgggggatcaggtgacccatattcggatccagaactcaggggatttctatgacctgtatggaggggagaagtttgcgactctgacagagctggtggagtactacactcagcagcagggtgtcctgcaggaccgcgacggcaccatcatccacctcaagtacccgctgaactgctccgatcccactagtgagaggtggtaccatggccacatgtctggcgggcaggcagagacgctgctgcaggccaagggcgagccctggacgtttcttgtgcgtgagagcctcagccagcctggagacttcgtgctttctgtgctcagtgaccagcccaaggctggcccaggctccccgctcagggtcacccacatcaaggtcatgtgcgagggtggacgctacacagtgggtggtttggagaccttcgacagcctcacggacctggtggagcatttcaagaagacggggattgaggaggcctcaggcgcctttgtctacctgcggcagccgtactatgccacgagggtgaatgcggctgacattgagaaccgagtgttggaactgaacaagaagcaggagtccgaggatacagccaaggctggcttctgggaggagtttgagagtttgcagaagcaggaggtgaagaacttgcaccagcgtctggaagggcagcggccagagaacaagggcaagaaccgctacaagaacattctcccctttgaccacagccgagtgatcctgcagggacgggacagtaacatccccgggtccgactacatcaatgccaactacatcaagaaccagctgctaggccctgatgagaacgctaagacctacatcgccagccagggctgtctggaggccacggtcaatgacttctggcagatggcgtggcaggagaacagccgtgtcatcgtcatgaccacccgagaggtggagaaaggccggaacaaatgcgtcccatactggcccgaggtgggcatgcagcgtgcttatgggccctactctgtgaccaactgcggggagcatgacacaaccgaatacaaactccgtaccttacaggtctccccgctggacaatggagacctgattcgggagatctggcattaccagtacctgagctggcccgaccatggggtccccagtgagcctgggggtgtcctcagcttcctggaccagatcaaccagcggcaggaaagtctgcctcacgcagggcccatcatcgtgcactgcagcgccggcatcggccgcacaggcaccatcattgtcatcgacatgctcatggagaacatctccaccaagggcctggactgtgacattgacatccagaagaccatccagatggtgcgggcgcagcgctcgggcatggtgcagacggaggcgcagtacaagttcatctacgtggccatcgcccagttcattgaaaccactaagaagaagctggaggtcctgcagtcgcagaagggccaggagtcggagtacgggaacatcacctatcccccagccatgaagaatgcccatgccaaggcctcccgcacctcgtccaagagcttggagtctagtgcagggaccgtggctgcgtcacctgtgagacggggtggccagaggggactgccagtgccgggtccccctgtgctgtctcctgacctgcaccaactgcctgtacttgcccccctgcacccggctgcagacacaaggaggatgtgtatgagaacctgcacactaagaacaagagggaggagaaagtgaagaagcagcggtcagcagacaaggagaagagcaagggttccctcaagaggaagtgagcggtgctgtcctcaggtggccatgcctcagccctgaccctgtggaagcatttcgcgatggacagactcacaacctgaacctaggagtgccccattcttttgtaatttaaatggctgcatcccccccacctctccctgaccctgtatatagcccagccaggccccaggcagggccaacccttctcctcttgtaaataaagccctgggatcactgtg

SEQ ID NO: 456240 - DNA, 1891 bp, Homo sapiens
tgccggctgccccaggccagtggagtggcagccccagaactgggaccaccgggggtggtgaggcggcccggcactgggagctgcatctgaggcttagtccctgagctctctgcctgcccagactagctgcacctcctcattccctgcgcccccttcctctccggaagcccccaggatggtgaggtggtttcaccgagacctcagtgggctggatgcagagaccctgctcaagggccgaggtgtccacggtagcttcctggctcggcccagtcgcaagaaccagggtgacttctcgctctccgtcagggtgggggatcaggtgacccatattcggatccagaactcaggggatttctatgacctgtatggaggggagaagtttgcgactctgacagagctggtggagtactacactcagcagcagggtgtcctgcaggaccgcgacggcaccatcatccacctcaagtacccgctgaactgctccgatcccactagtgagaggtggtaccatggccacatgtctggcgggcaggcagagacgctgctgcaggccaagggcgagccctggacgtttcttgtgcgtgagagcctcagccagcctggagacttcgtgctttctgtgctcagtgaccagcccaaggctggcccaggctccccgctcagggtcacccacatcaaggtcatgtgcgagggtggacgctacacagtgggtggtttggagaccttcgacagcctcacggacctggtggagcatttcaagaagacggggattgaggaggcctcaggcgcctttgtctacctgcggcagccgtactatgccacgagggtgaatgcggctgacattgagaaccgagtgttggaactgaacaagaagcaggagtccgaggatacagccaaggctggcttctgggaggagtttgagagtttgcagaagcaggaggtgaagaacttgcaccagcgtctggaagggcagcggccagagaacaagggcaagaaccgctacaagaacattctcccctttgaccacagccgagtgatcctgcagggacgggacagtaacatccccgggtccgactacatcaatgccaactacatcaagaaccagctgctaggccctgatgagaacgctaagacctacatcgccagccagggctgtctggaggccacggtcaatgacttctggcagatggcgtggcaggagaacagccgtgtcatcgtcatgaccacccgagaggtggagaaaggccggaacaaatgcgtcccatactggcccgaggtgggcatgcagcgtgcttatgggccctactctgtgaccaactgcggggagcatgacacaaccgaatacaaactccgtaccttacaggtctccccgctggacaatggagacctgattcgggagatctggcattaccagtacctgagctggcccgaccatggggtccccagtgagcctgggggtgtcctcagcttcctggaccagatcaaccagcggcaggaaagtctgcctcacgcagggcccatcatcgtgcactgcagcgccggcatcggccgcacaggcaccatcattgtcatcgacatgctcatggagaacatctccaccaagggcctggactgtgacattgacatccagaagaccatccagatggtgcgggcgcagcgctcgggcatggtgcagacggaggcgcagtacaagttcatctacgtggccatcgcccagttcattgaaaccactaagaagaagctggaggtcctgcagtcgcagaagggccaggagtcggagtacgggaacatcacctatcccccactctccctgaccctgtatatagcccagccaggccccaggcagggccaacccttctcctcttgtaaataaagccctgggatcactgtg

SEQ ID NO: 456241 - DNA, 2001 bp, Homo sapiens
tgccggctgccccaggccagtggagtggcagccccagaactgggaccaccgggggtggtgaggcggcccggcactgggagctgcatctgaggcttagtccctgagctctctgcctgcccagactagctgcacctcctcattccctgcgcccccttcctctccggaagcccccaggatggtgaggtggtttcaccgagacctcagtgggctggatgcagagaccctgctcaagggccgaggtgtccacggtagcttcctggctcggcccagtcgcaagaaccagggtgacttctcgctctccgtcagggtgggggatcaggtgacccatattcggatccagaactcaggggatttctatgacctgtatggaggggagaagtttgcgactctgacagagctggtggagtactacactcagcagcagggtgtcctgcaggaccgcgacggcaccatcatccacctcaagtacccgctgaactgctccgatcccactagtgagaggtggtaccatggccacatgtctggcgggcaggcagagacgctgctgcaggccaagggcgagccctggacgtttcttgtgcgtgagagcctcagccagcctggagacttcgtgctttctgtgctcagtgaccagcccaaggctggcccaggctccccgctcagggtcacccacatcaaggtcatgtgcgagggtggacgctacacagtgggtggtttggagaccttcgacagcctcacggacctggtggagcatttcaagaagacggggattgaggaggcctcaggcgcctttgtctacctgcggcagccgtactatgccacgagggtgaatgcggctgacattgagaaccgagtgttggaactgaacaagaagcaggagtccgaggatacagccaaggctggcttctgggaggagtttgagagtttgcagaagcaggaggtgaagaacttgcaccagcgtctggaagggcagcggccagagaacaagggcaagaaccgctacaagaacattctcccctttgaccacagccgagtgatcctgcagggacgggacagtaacatccccgggtccgactacatcaatgccaactacatcaagaaccagctgctaggccctgatgagaacgctaagacctacatcgccagccagggctgtctggaggccacggtcaatgacttctggcagatggcgtggcaggagaacagccgtgtcatcgtcatgaccacccgagaggtggagaaaggccggaacaaatgcgtcccatactggcccgaggtgggcatgcagcgtgcttatgggccctactctgtgaccaactgcggggagcatgacacaaccgaatacaaactccgtaccttacaggtctccccgctggacaatggagacctgattcgggagatctggcattaccagtacctgagctggcccgaccatggggtccccagtgagcctgggggtgtcctcagcttcctggaccagatcaaccagcggcaggaaagtctgcctcacgcagggcccatcatcgtgcactgcaggtgaggatgataatcctgatggtagtagtgacagctgagaagtaaatactgctaagtgccatgagctgttataagcaatataaacgttagctcgcacattgagtgccctccgctcacccccggcttctcctgggtcccctcatggctccagaaccctgggtggatcgtggctggaaccagccccactttggccctctgcctgtgggtatcttcctcagagccctctccggatgtaccatctcgcccaaccctgccaaatacagaggaggagcccgggacccagttgctggccaggcccaagctagtcagggcaaggccgggcaggcacccacagtaggcctgtgtcccggctgctccgctttctctcgaggtcccattctgttggtttcttctcccaggaacatctatgaggcatgtgctccccattcctcctctttttccatcggtagccgcagggcttcggct

SEQ ID NO: 456242 - DNA, 1536 bp, Homo sapiens
ccccaggcctgcgacggcctctggcttcctcctcttcccccagcagctgtttgtcctgggacagggcaagtcggctgaatctagaggtgcccccgatgggctgtccggggacgcggctctgtcctgtgctctctcagggacaggcccatccccgagagctaccctcctgctcacccgccacacacacattcacacacttcttgaaagccccatggcctttatttagacgttacaggaaggaagtgggtgtggggggttatttttgacaatctgggtttgaaattagacagcgcgactcagggcatcagcttgctgggctcagctgagggtgggcctggggtctccctgaggtctgtttgcccagggctgggaaaggagagaaacttcctactgcactgctcccctgagtcccctgaccctgtgcccccgcaccctgctgtctcagggctatcctttccctgacgtcagggtttgaaggaaaagggaagtgaagccatgctgagagacgctccataactccttcagggagaggcggggagggctcagggtacctgggagccggcaggacagtggtgggatttgggggtcccaggtcttccggggtgggggcagccactcactaggagtgaggagtcggcgcgaggagtggaggagggaaggatggtggcagctggggagccagcgtcagcaccgcagagcccgaggtggagcgtgtccatgcagagctgggcaaacctccatcatcacttgcccggtgaccctgggcacattccctcccatcactggaggctcaggctgctcctgtggtgcctggggctggagctgagcgctgggtaccccccttcccggggagggcttgactggcctctgatggcacccccgtctttccccagcgccggcatcggccgcacaggcaccatcattgtcatcgacatgctcatggagaacatctccaccaagggcctggactgtgacattgacatccagaagaccatccagatggtgcgggcgcagcgctcgggcatggtgcagacggaggcgcagtacaagttcatctacgtggccatcgcccagttcattgaaaccactaagaagaagctggaggtcctgcagtcgcagaagggccaggagtcggagtacgggaacatcacctatcccccagccatgaagaatgcccatgccaaggcctcccgcacctcgtccaaacacaaggaggatgtgtatgagaacctgcacactaagaacaagagggaggagaaagtgaagaagcagcggtcagcagacaaggagaagagcaagggttccctcaagaggaagtgagcggtgctgtcctcaggtggccatgcctcagccctgaccctgtggaagcatttcgcgatggacagactcacaacctgaacctaggagtgccccattcttttgtaatttaaatggctgcatcccccccacctctccctgaccctgtatatagcccagccaggccccaggcagggccaacccttctcctcttgtaaataaagccctgggatcactgtg

SEQ ID NO: 456243 - DNA, 1135 bp, Homo sapiens
tgccggctgccccaggccagtggagtggcagccccagaactgggaccaccgggggtggtgaggcggcccggcactgggagctgcatctgaggcttagtccctgagctctctgcctgcccagactagctgcacctcctcattccctgcgcccccttcctctccggaagcccccaggatggtgaggtggtttcaccgagacctcagtgggctggatgcagagaccctgctcaagggccgaggtgtccacggtagcttcctggctcggcccagtcgcaagaaccagggtgacttctcgctctccgtcagggtgggggatcaggtgacccatattcggatccagaactcaggggatttctatgacctgtatggaggggagaagtttgcgactctgacagagctggtggagtactacactcagcagcagggtgtcctgcaggaccgcgacggcaccatcatccacctcaagtacccgctgaactgctccgatcccactagtgagaggtggtaccatggccacatgtctggcgggcaggcagagacgctgctgcaggccaagggcgagccctggacgtttcttgtgcgtgagagcctcagccagcctggagacttcgtgctttctgtgctcagtgaccagcccaaggctggcccaggctccccgctcagggtcacccacatcaaggtcatgtgcgagggtggacgctacacagtgggtggtttggagaccttcgacagcctcacggacctggtggagcatttcaagaagacggggattgaggaggcctcaggcgcctttgtctacctgcggcagccgtactatgccacgagggtgaatgcggctgacattgagaaccgagtgttggaactgaacaagaagcaggagtccgaggatacagccaaggctggcttctgggaggagtttgagagtttgcttcactctctagactagagtagaatttcatttggcagtctcctatacaaataatgtgtttatgttttttgacacatactgccagcaggtatgttgaaatacttattttggcaaggagggaacagaggaaggaagaatcatctaatgcttatttttggtaggttggaacttactgaagggacagtagccctgaactgggtctcagga

SEQ ID NO: 456244 - DNA, 933 bp, Homo sapiens
gccctgcagtgccattggcctggcaggcaggatcgaggaggaagtggctgattactgagcggttcttcctcacctggcttgggccactgtgcacagctgtgccgctggctcagccccgccccctgcggccctccgccgtggcttccccctccctacagagagatgctgtcccgtgggtggtttcaccgagacctcagtgggctggatgcagagaccctgctcaagggccgaggtgtccacggtagcttcctggctcggcccagtcgcaagaaccagggtgacttctcgctctccgtcaggtggtaccatggccacatgtctggcgggcaggcagagacgctgctgcaggccaagggcgagccctggacgtttcttgtgcgtgagagcctcagccagcctggagacttcgtgctttctgtgctcagtgaccagcccaaggctggcccaggctccccgctcagggtcacccacatcaaggtcatgtgcgagggtggacgctacacagtgggtggtttggagaccttcgacagcctcacggacctggtggagcatttcaagaagacggggattgaggaggcctcaggcgcctttgtctacctgcggcagccgtactatgccacgagggtgaatgcggctgacattgagaaccgagtgttggaactgaacaagaagcaggagtccgaggatacagccaaggctggcttctgggaggagtttgagagtttgcttcactctctagactagagtagaatttcatttggcagtctcctatacaaataatgtgtttatgttttttgacacatactgccagcaggtatgttgaaatacttattttggcaaggagggaacagaggaaggaagaatcatctaatgcttatttttggtaggttggaacttactgaagggacagtagccctgaactgggtctcagga

SEQ ID NO: 456245 - DNA, 2179 bp, Homo sapiens
tgccggctgccccaggccagtggagtggcagccccagaactgggaccaccgggggtggtgaggcggcccggcactgggagctgcatctgaggcttagtccctgagctctctgcctgcccagactagctgcacctcctcattccctgcgcccccttcctctccggaagcccccaggatggtgaggtggtttcaccgagacctcagtgggctggatgcagagaccctgctcaagggccgaggtgtccacggtagcttcctggctcggcccagtcgcaagaaccagggtgacttctcgctctccgtcagggtgggggatcaggtgacccatattcggatccagaactcaggggatttctatgacctgtatggaggggagaagtttgcgactctgacagagctggtggagtactacactcagcagcagggtgtcctgcaggaccgcgacggcaccatcatccacctcaagtacccgctgaactgctccgatcccactagtgagaggtggtaccatggccacatgtctggcgggcaggcagagacgctgctgcaggccaagggcgagccctggacgtttcttgtgcgtgagagcctcagccagcctggagacttcgtgctttctgtgctcagtgaccagcccaaggctggcccaggctccccgctcagggtcacccacatcaaggtcatgtgcgagggtggacgctacacagtgggtggtttggagaccttcgacagcctcacggacctggtggagcatttcaagaagacggggattgaggaggcctcaggcgcctttgtctacctgcggcagccgtactatgccacgagggtgaatgcggctgacattgagaaccgagtgttggaactgaacaagaagcaggagtccgaggatacagccaaggctggcttctgggaggagtttgagagtttgcagaagcaggaggtgaagaacttgcaccagcgtctggaagggcagcggccagagaacaagggcaagaaccgctacaagaacattctcccctttgaccacagccgagtgatcctgcagggacgggacagtaacatccccgggtccgactacatcaatgccaactacatcaagaaccagctgctaggccctgatgagaacgctaagacctacatcgccagccagggctgtctggaggccacggtcaatgacttctggcagatggcgtggcaggagaacagccgtgtcatcgtcatgaccacccgagaggtggagaaaggccggaacaaatgcgtcccatactggcccgaggtgggcatgcagcgtgcttatgggccctactctgtgaccaactgcggggagcatgacacaaccgaatacaaactccgtaccttacaggtctccccgctggacaatggagacctgattcgggagatctggcattaccagtacctgagctggcccgaccatggggtccccagtgagcctgggggtgtcctcagcttcctggaccagatcaaccagcggcaggaaagtctgcctcacgcagggcccatcatcgtgcactgcagcgccggcatcggccgcacaggcaccatcattgtcatcgacatgctcatggagaacatctccaccaagggcctggactgtgacattgacatccagaagaccatccagatggtgcgggcgcagcgctcgggcatggtgcagacggaggcgcagtacaagttcatctacgtggccatcgcccagttcattgaaaccactaagaagaagctggaggtcctgcagtcgcagaagggccaggagtcggagtacgggaacatcacctatcccccagccatgaagaatgcccatgccaaggcctcccgcacctcgtccaaacacaaggaggatgtgtatgagaacctgcacactaagaacaagagggaggagaaagtgaagaagcagcggtcagcagacaaggagaagagcaagggttccctcaagaggaagtgagcggtgctgtcctcaggtggccatgcctcagccctgaccctgtggaagcatttcgcgatggacagactcacaacctgaacctaggagtgccccattcttttgtaatttaaatggctgcatcccccccacctctccctgaccctgtatatagcccagccaggccccaggcagggccaacccttctcctcttgtaaataaagccctgggatcactgtg

SEQ ID NO: 456246 - DNA, 2263 bp, Homo sapiens
caagaagacggggattgaggaggcctcaggcgcctttgtctacctgcggcagccgtactatgccacgagggtgaatgcggctgacattgagaaccgagtgttggaactgaacaagaagcaggatcgaggaggaagtggctgattactgagcggttcttcctcacctggcttgggccactgtgcacagctgtgccgctggctcagccccgccccctgcggccctccgccgtggcttccccctccctacagagagatgctgtcccgtgggtggtttcaccgagacctcagtgggctggatgcagagaccctgctcaagggccgaggtgtccacggtagcttcctggctcggcccagtcgcaagaaccagggtgacttctcgctctccgtcagggtgggggatcaggtgacccatattcggatccagaactcaggggatttctatgacctgtatggaggggagaagtttgcgactctgacagagctggtggagtactacactcagcagcagggtgtcctgcaggaccgcgacggcaccatcatccacctcaagtacccgctgaactgctccgatcccactagtgagaggtggtaccatggccacatgtctggcgggcaggcagagacgctgctgcaggccaagggcgagccctggacgtttcttgtgcgtgagagcctcagccagcctggagacttcgtgctttctgtgctcagtgaccagcccaaggctggcccaggctccccgctcagggtcacccacatcaaggtcatgtgcgagggtggacgctacacagtgggtggtttggagaccttcgacagcctcacggacctggtggagcatttcaagaagacggggattgaggaggcctcaggcgcctttgtctacctgcggcagccgtactatgccacgagggtgaatgcggctgacattgagaaccgagtgttggaactgaacaagaagcaggagtccgaggatacagccaaggctggcttctgggaggagtttgagagtttgcagaagcaggaggtgaagaacttgcaccagcgtctggaagggcagcggccagagaacaagggcaagaaccgctacaagaacattctcccctttgaccacagccgagtgatcctgcagggacgggacagtaacatccccgggtccgactacatcaatgccaactacatcaagaaccagctgctaggccctgatgagaacgctaagacctacatcgccagccagggctgtctggaggccacggtcaatgacttctggcagatggcgtggcaggagaacagccgtgtcatcgtcatgaccacccgagaggtggagaaaggccggaacaaatgcgtcccatactggcccgaggtgggcatgcagcgtgcttatgggccctactctgtgaccaactgcggggagcatgacacaaccgaatacaaactccgtaccttacaggtctccccgctggacaatggagacctgattcgggagatctggcattaccagtacctgagctggcccgaccatggggtccccagtgagcctgggggtgtcctcagcttcctggaccagatcaaccagcggcaggaaagtctgcctcacgcagggcccatcatcgtgcactgcagcgccggcatcggccgcacaggcaccatcattgtcatcgacatgctcatggagaacatctccaccaagggcctggactgtgacattgacatccagaagaccatccagatggtgcgggcgcagcgctcgggcatggtgcagacggaggcgcagtacaagttcatctacgtggccatcgcccagttcattgaaaccactaagaagaagctggaggtcctgcagtcgcagaagggccaggagtcggagtacgggaacatcacctatcccccagccatgaagaatgcccatgccaaggcctcccgcacctcgtccaaacacaaggaggatgtgtatgagaacctgcacactaagaacaagagggaggagaaagtgaagaagcagcggtcagcagacaaggagaagagcaagggttccctcaagaggaagtgagcggtgctgtcctcaggtggccatgcctcagccctgaccctgtggaagcatttcgcgatggacagactcacaacctgaacctaggagtgccccattcttttgtaatttaaatggctgcatcccccccacctctccctgaccctgtatatagcccagccaggccccaggcagggccaacccttctcctcttgtaaataaagccctgggatcactgtg

SEQ ID NO: 456247 - DNA, 2355 bp, Homo sapiens
caagaagacggggattgaggaggcctcaggcgcctttgtctacctgcggcagccgtactatgccacgagggtgaatgcggctgacattgagaaccgagtgttggaactgaacaagaagcaggatcgaggaggaagtggctgattactgagcggttcttcctcacctggcttgggccactgtgcacagctgtgccgctggctcagccccgccccctgcggccctccgccgtggcttccccctccctacagagagatgctgtcccgtggtgaggtaagggcctgccacccacggtagacaggaggcaagggtgcctggtgcccacgggacccctcctcactgccctgcctgggccgcccaggtggtttcaccgagacctcagtgggctggatgcagagaccctgctcaagggccgaggtgtccacggtagcttcctggctcggcccagtcgcaagaaccagggtgacttctcgctctccgtcagggtgggggatcaggtgacccatattcggatccagaactcaggggatttctatgacctgtatggaggggagaagtttgcgactctgacagagctggtggagtactacactcagcagcagggtgtcctgcaggaccgcgacggcaccatcatccacctcaagtacccgctgaactgctccgatcccactagtgagaggtggtaccatggccacatgtctggcgggcaggcagagacgctgctgcaggccaagggcgagccctggacgtttcttgtgcgtgagagcctcagccagcctggagacttcgtgctttctgtgctcagtgaccagcccaaggctggcccaggctccccgctcagggtcacccacatcaaggtcatgtgcgagggtggacgctacacagtgggtggtttggagaccttcgacagcctcacggacctggtggagcatttcaagaagacggggattgaggaggcctcaggcgcctttgtctacctgcggcagccgtactatgccacgagggtgaatgcggctgacattgagaaccgagtgttggaactgaacaagaagcaggagtccgaggatacagccaaggctggcttctgggaggagtttgagagtttgcagaagcaggaggtgaagaacttgcaccagcgtctggaagggcagcggccagagaacaagggcaagaaccgctacaagaacattctcccctttgaccacagccgagtgatcctgcagggacgggacagtaacatccccgggtccgactacatcaatgccaactacatcaagaaccagctgctaggccctgatgagaacgctaagacctacatcgccagccagggctgtctggaggccacggtcaatgacttctggcagatggcgtggcaggagaacagccgtgtcatcgtcatgaccacccgagaggtggagaaaggccggaacaaatgcgtcccatactggcccgaggtgggcatgcagcgtgcttatgggccctactctgtgaccaactgcggggagcatgacacaaccgaatacaaactccgtaccttacaggtctccccgctggacaatggagacctgattcgggagatctggcattaccagtacctgagctggcccgaccatggggtccccagtgagcctgggggtgtcctcagcttcctggaccagatcaaccagcggcaggaaagtctgcctcacgcagggcccatcatcgtgcactgcagcgccggcatcggccgcacaggcaccatcattgtcatcgacatgctcatggagaacatctccaccaagggcctggactgtgacattgacatccagaagaccatccagatggtgcgggcgcagcgctcgggcatggtgcagacggaggcgcagtacaagttcatctacgtggccatcgcccagttcattgaaaccactaagaagaagctggaggtcctgcagtcgcagaagggccaggagtcggagtacgggaacatcacctatcccccagccatgaagaatgcccatgccaaggcctcccgcacctcgtccaaacacaaggaggatgtgtatgagaacctgcacactaagaacaagagggaggagaaagtgaagaagcagcggtcagcagacaaggagaagagcaagggttccctcaagaggaagtgagcggtgctgtcctcaggtggccatgcctcagccctgaccctgtggaagcatttcgcgatggacagactcacaacctgaacctaggagtgccccattcttttgtaatttaaatggctgcatcccccccacctctccctgaccctgtatatagcccagccaggccccaggcagggccaacccttctcctcttgtaaataaagccctgggatcactgtg

SEQ ID NO: 456248 - DNA, 2140 bp, Homo sapiens
caagaagacggggattgaggaggcctcaggcgcctttgtctacctgcggcagccgtactatgccacgagggtgaatgcggctgacattgagaaccgagtgttggaactgaacaagaagcaggatcgaggaggaagtggctgattactgagcggttcttcctcacctggcttgggccactgtgcacagctgtgccgctggctcagccccgccccctgcggccctccgccgtggcttccccctccctacagagagatgctgtcccgtggggtgggggatcaggtgacccatattcggatccagaactcaggggatttctatgacctgtatggaggggagaagtttgcgactctgacagagctggtggagtactacactcagcagcagggtgtcctgcaggaccgcgacggcaccatcatccacctcaagtacccgctgaactgctccgatcccactagtgagaggtggtaccatggccacatgtctggcgggcaggcagagacgctgctgcaggccaagggcgagccctggacgtttcttgtgcgtgagagcctcagccagcctggagacttcgtgctttctgtgctcagtgaccagcccaaggctggcccaggctccccgctcagggtcacccacatcaaggtcatgtgcgagggtggacgctacacagtgggtggtttggagaccttcgacagcctcacggacctggtggagcatttcaagaagacggggattgaggaggcctcaggcgcctttgtctacctgcggcagccgtactatgccacgagggtgaatgcggctgacattgagaaccgagtgttggaactgaacaagaagcaggagtccgaggatacagccaaggctggcttctgggaggagtttgagagtttgcagaagcaggaggtgaagaacttgcaccagcgtctggaagggcagcggccagagaacaagggcaagaaccgctacaagaacattctcccctttgaccacagccgagtgatcctgcagggacgggacagtaacatccccgggtccgactacatcaatgccaactacatcaagaaccagctgctaggccctgatgagaacgctaagacctacatcgccagccagggctgtctggaggccacggtcaatgacttctggcagatggcgtggcaggagaacagccgtgtcatcgtcatgaccacccgagaggtggagaaaggccggaacaaatgcgtcccatactggcccgaggtgggcatgcagcgtgcttatgggccctactctgtgaccaactgcggggagcatgacacaaccgaatacaaactccgtaccttacaggtctccccgctggacaatggagacctgattcgggagatctggcattaccagtacctgagctggcccgaccatggggtccccagtgagcctgggggtgtcctcagcttcctggaccagatcaaccagcggcaggaaagtctgcctcacgcagggcccatcatcgtgcactgcagcgccggcatcggccgcacaggcaccatcattgtcatcgacatgctcatggagaacatctccaccaagggcctggactgtgacattgacatccagaagaccatccagatggtgcgggcgcagcgctcgggcatggtgcagacggaggcgcagtacaagttcatctacgtggccatcgcccagttcattgaaaccactaagaagaagctggaggtcctgcagtcgcagaagggccaggagtcggagtacgggaacatcacctatcccccagccatgaagaatgcccatgccaaggcctcccgcacctcgtccaaacacaaggaggatgtgtatgagaacctgcacactaagaacaagagggaggagaaagtgaagaagcagcggtcagcagacaaggagaagagcaagggttccctcaagaggaagtgagcggtgctgtcctcaggtggccatgcctcagccctgaccctgtggaagcatttcgcgatggacagactcacaacctgaacctaggagtgccccattcttttgtaatttaaatggctgcatcccccccacctctccctgaccctgtatatagcccagccaggccccaggcagggccaacccttctcctcttgtaaataaagccctgggatcactgtg

SEQ ID NO: 456249 - DNA, 2049 bp, Homo sapiens
tgccggctgccccaggccagtggagtggcagccccagaactgggaccaccgggggtggtgaggcggcccggcactgggagctgcatctgaggcttagtccctgagctctctgcctgcccagactagctgcacctcctcattccctgcgcccccttcctctccggaagcccccaggatggtgaggtggtttcaccgagacctcagtgggctggatgcagagaccctgctcaagggccgaggtgtccacggtagcttcctggctcggcccagtcgcaagaaccagggtgacttctcgctctccgtcaggaccgcgacggcaccatcatccacctcaagtacccgctgaactgctccgatcccactagtgagaggtggtaccatggccacatgtctggcgggcaggcagagacgctgctgcaggccaagggcgagccctggacgtttcttgtgcgtgagagcctcagccagcctggagacttcgtgctttctgtgctcagtgaccagcccaaggctggcccaggctccccgctcagggtcacccacatcaaggtcatgtgcgagggtggacgctacacagtgggtggtttggagaccttcgacagcctcacggacctggtggagcatttcaagaagacggggattgaggaggcctcaggcgcctttgtctacctgcggcagccgtactatgccacgagggtgaatgcggctgacattgagaaccgagtgttggaactgaacaagaagcaggagtccgaggatacagccaaggctggcttctgggaggagtttgagagtttgcagaagcaggaggtgaagaacttgcaccagcgtctggaagggcagcggccagagaacaagggcaagaaccgctacaagaacattctcccctttgaccacagccgagtgatcctgcagggacgggacagtaacatccccgggtccgactacatcaatgccaactacatcaagaaccagctgctaggccctgatgagaacgctaagacctacatcgccagccagggctgtctggaggccacggtcaatgacttctggcagatggcgtggcaggagaacagccgtgtcatcgtcatgaccacccgagaggtggagaaaggccggaacaaatgcgtcccatactggcccgaggtgggcatgcagcgtgcttatgggccctactctgtgaccaactgcggggagcatgacacaaccgaatacaaactccgtaccttacaggtctccccgctggacaatggagacctgattcgggagatctggcattaccagtacctgagctggcccgaccatggggtccccagtgagcctgggggtgtcctcagcttcctggaccagatcaaccagcggcaggaaagtctgcctcacgcagggcccatcatcgtgcactgcagcgccggcatcggccgcacaggcaccatcattgtcatcgacatgctcatggagaacatctccaccaagggcctggactgtgacattgacatccagaagaccatccagatggtgcgggcgcagcgctcgggcatggtgcagacggaggcgcagtacaagttcatctacgtggccatcgcccagttcattgaaaccactaagaagaagctggaggtcctgcagtcgcagaagggccaggagtcggagtacgggaacatcacctatcccccagccatgaagaatgcccatgccaaggcctcccgcacctcgtccaaacacaaggaggatgtgtatgagaacctgcacactaagaacaagagggaggagaaagtgaagaagcagcggtcagcagacaaggagaagagcaagggttccctcaagaggaagtgagcggtgctgtcctcaggtggccatgcctcagccctgaccctgtggaagcatttcgcgatggacagactcacaacctgaacctaggagtgccccattcttttgtaatttaaatggctgcatcccccccacctctccctgaccctgtatatagcccagccaggccccaggcagggccaacccttctcctcttgtaaataaagccctgggatcactgtg

SEQ ID NO: 456250 - DNA, 2150 bp, Homo sapiens
tgccggctgccccaggccagtggagtggcagccccagaactgggaccaccgggggtggtgaggcggcccggcactgggagctgcatctgaggcttagtccctgagctctctgcctgcccagactagctgcacctcctcattccctgcgcccccttcctctccggaagcccccaggatggtgaggtggtttcaccgagacctcagtgggctggatgcagagaccctgctcaagggccgaggtgtccacggtagcttcctggctcggcccagtcgcaagaaccagggtgacttctcgctctccgtcagggtgggggatcaggtgacccatattcggatccagaactcaggggatttctatgacctgtatggaggggagaagtttgcgactctgacagagctggtggagtactacactcagcagcagggtgtcctgcaggaccgcgacggcaccatcatccacctcaagtacccgctgaactgctccgatcccactagtgagaggtggtaccatggccacatgtctggcgggcaggcagagacgctgctgcaggccaagggcgagccctggacgtttcttgtgcgtgagagcctcagccagcctggagacttcgtgctttctgtgctcagtgaccagcccaaggctggcccaggctccccgctcagggtcacccacatcaaggtcatgtgcgagggtggacgctacacagtgggtggtttggagaccttcgacagcctcacggacctggtggagcatttcaagaagacggggattgaggaggcctcaggcgcctttgtctacctgcggcagccgtactatgccacgagggtgaatgcggctgacattgagaaccgagtgttggaactgaacaagaagcaggagtccgaggatacagccaaggctggcttctgggaggagtttgagagtttgcagaagcaggaggtgaagaacttgcaccagcgtctggaagggcagcggccagagaacaagggcaagaaccgctacaagaacattctcccctttgaccacagccgagtgatcctgcagggacgggacagtaacatccccgggtccgactacatcaatgccaactacatcaagaaccagctgctaggccctgatgagaacgctaagacctacatcgccagccagggctgtctggaggccacggtcaatgacttctggcagatggcgtggcaggagaacagccgtgtcatcgtcatgaccacccgagaggtggagaaaggccggaacaaatgcgtcccatactggcccgaggtgggcatgcagcgtgcttatgggccctactctgtgaccaactgcggggagcatgacacaaccgaatacaaactccgtaccttacaggtctccccgctggacaatggagacctgattcgggagatctggcattaccagtacctgagctggcccgaccatggggtccccagtgagcctgggggtgtcctcagcttcctggaccagatcaaccagcggcaggaaagtctgcctcacgcagggcccatcatcgtgcactgcagcgccggcatcggccgcacaggcaccatcattgtcatcgacatgctcatggagaacatctccaccaagggcctggactgtgacattgacatccagaagaccatccagatggtgcgggcgcagcgctcgggcatggtgcagacggaggcgcagtacaagttcatctacgtggccatcgcccagttcattgaaaccactaagaagaagctggaggtcctgcagtcgcagaagggccaggagtcggagtacgggaacatcacctatcccccagccatgaagaatgcccatgccaaggcctcccgcacctcgtccaaacacaaggaggatgtgtatgagaacctgcacactaagaacaagagggaggagaaagtgaagaagcagcggtcagcagacaaggagaagagcaagggttccctcaagaggaacctcagccctgaccctgtggaagcatttcgcgatggacagactcacaacctgaacctaggagtgccccattcttttgtaatttaaatggctgcatcccccccacctctccctgaccctgtatatagcccagccaggccccaggcagggccaacccttctcctcttgtaaataaagccctgggatcactgtg

SEQ ID NO: 456251 - DNA, 1237 bp, Homo sapiens
gaggatcccattggatatgcggatagggcagcggccagagaacaagggcaagaaccgctacaagaacattctcccctttgaccacagccgagtgatcctgcagggacgggacagtaacatccccgggtccgactacatcaatgccaactacatcaagaaccagctgctaggccctgatgagaacgctaagacctacatcgccagccagggctgtctggaggccacggtcaatgacttctggcagatggcgtggcaggagaacagccgtgtcatcgtcatgaccacccgagaggtggagaaaggccggaacaaatgcgtcccatactggcccgaggtgggcatgcagcgtgcttatgggccctactctgtgaccaactgcggggagcatgacacaaccgaatacaaactccgtaccttacaggtctccccgctggacaatggagacctgattcgggagatctggcattaccagtacctgagctggcccgaccatggggtccccagtgagcctgggggtgtcctcagcttcctggaccagatcaaccagcggcaggaaagtctgcctcacgcagggcccatcatcgtgcactgcagcgccggcatcggccgcacaggcaccatcattgtcatcgacatgctcatggagaacatctccaccaagggcctggactgtgacattgacatccagaagaccatccagatggtgcgggcgcagcgctcgggcatggtgcagacggaggcgcagtacaagttcatctacgtggccatcgcccagttcattgaaaccactaagaagaagctggaggtcctgcagtcgcagaagggccaggagtcggagtacgggaacatcacctatcccccagccatgaagaatgcccatgccaaggcctcccgcacctcgtccaaacacaaggaggatgtgtatgagaacctgcacactaagaacaagagggaggagaaagtgaagaagcagcggtcagcagacaaggagaagagcaagggttccctcaagaggaagtgagcggtgctgtcctcaggtggccatgcctcagccctgaccctgtggaagcatttcgcgatggacagactcacaacctgaacctaggagtgccccattcttttgtaatttaaatggctgcatcccccccacctctccctgaccctgtatatagcccagccaggccccaggcagggccaacccttctcctcttgtaaataaagccctgggatcactgtg

SEQ ID NO: 456252 - DNA, 1127 bp, Homo sapiens
tgccggctgccccaggccagtggagtggcagccccagaactgggaccaccgggggtggtgaggcggcccggcactgggagctgcatctgaggcttagtccctgagctctctgcctgcccagactagctgcacctcctcattccctgcgcccccttcctctccggaagcccccaggatggtgaggtggtttcaccgagacctcagtgggctggatgcagagaccctgctcaagggccgaggtgtccacggtagcttcctggctcggcccagtcgcaagaaccagggtgacttctcgctctccgtcagggtgggggatcaggtgacccatattcggatccagaactcaggggatttctatgacctgtatggaggggagaagtttgcgactctgacagagctggtggagtactacactcagcagcagggtgtcctgcaggaccgcgacggcaccatcatccacctcaagtacccgctgaactgctccgatcccactagtgagaggtggtaccatggccacatgtctggcgggcaggcagagacgctgctgcaggccaagggcgagccctggacgtttcttgtgcgtgagagcctcagccagcctggagacttcgtgctttctgtgctcagtgaccagcccaaggctggcccaggctccccgctcagggtcacccacatcaaggtcatgtgcgagggtggacgctacacagtgggtggtttggagaccttcgacagcctcacggacctggtggagcatttcaagaagacggggattgaggaggcctcaggcgcctttgtctacctgcggcagccgtactatgccacgagggtgaatgcggctgacattgagaaccgagtgttggaactgaacaagaagcaggagtccgaggatacagccaaggctggcttctgggaggagtttgagagtttgcagaagcaggaggtgaagaacttgcaccagcgtctggaagggcagcggccagagaacaagggcaagaaccgctacaagaacattctcccctgtgagcacccaggctgccccattcacccaggataccgccccctgcccagctgcctcccctcatctcacaggtctccaccctccacgccaggaggggccatctccccac

SEQ ID NO: 456253 - DNA, 755 bp, Homo sapiens
tgccggctgccccaggccagtggagtggcagccccagaactgggaccaccgggggtggtgaggcggcccggcactgggagctgcatctgaggcttagtccctgagctctctgcctgcccagactagctgcacctcctcattccctgcgcccccttcctctccggaagcccccaggatggtgaggtggtttcaccgagacctcagtgggctggatgcagagaccctgctcaagggccgaggtgtccacggtagcttcctggctcggcccagtcgcaagaaccagggtgacttctcgctctccgtcagggtgggggatcaggtgacccatattcggatccagaactcaggggatttctatgacctgtatggaggggagaagtttgcgactctgacagagctggtggagtactacactcagcagcagggtgtcctgcaggaccgcgacggcaccatcatccacctcaagtacccgctgaactgctccgatcccactagtgagaggtggtaccatggccacatgtctggcgggcaggcagagacgctgctgcaggccaagggcgagcccctcagccctgaccctgtggaagcatttcgcgatggacagactcacaacctgaacctaggagtgccccattcttttgtaatttaaatggctgcatcccccccacctctccctgaccctgtatatagcccagccaggccccaggcagggccaacccttctcctcttgtaaataaagccctgggatcactgtg

SEQ ID NO: 456254 - DNA, 196 bp, Homo sapiens
ggaggagaaagtgaagaagcagcggtcagcagacaaggagaagagcaagggttccctcaagaggaagtgagcggtgctgtcctcaggtggccatggtacagctcttctgcctgggtgtcctccctgccctgccctgtgtccttggctccactgccttccctgggtggatggggtggccgcagcctcattctgtgct

SEQ ID NO: 456255 - DNA, 3371 bp, Homo sapiens
aggcggggcaccctgaggggcggggaaggactagggtgcggggagggggttgcaaaaggagccgagcggcttctgctcaatggcggaaaagccgccggtgctctgacggcctcgttcccctagcagttgcgggggagtttcctgccggcgcggctggagtctctgattctcagggttcggtggttggaagatgctccagagagacgaggctgcggcggaggaggtggcggcggccgaatcggcaacggcgctagggtggagagaaggcggcagcggcggcggcggcggcgtgaggggccgggcggtgtaaacagccccggaggcggcggaggcggcggtcgagaccccgagggggaagcggcggctgagtcagggtcgcgcctccgttggaaacttgggctgagtaccgcggcgggcgcgagcgaggcgccctagacatcttctccctcccttgcctcagatttattgctaaacatgggtgcatttttggataaacccaaaactgaaaaacataatgctcatggtgctgggaatggtttacgttatggcctgagcagcatgcaaggatggagagtggaaatggaagatgcacacacagctgttgtaggtattcctcacggcttggaagactggtcattttttgcagtttatgatggtcatgctggatcccgagtggcaaattactgctcaacacatttattagaacacatcactactaacgaagactttagggcagctggaaaatcaggatctgctcttgagctttcagtggaaaatgttaagaatggtatcagaactggatttttgaaaattgatgaatacatgcgtaacttttcagacctcagaaacgggatggacaggagtggttcaactgcagtgggagttatgatttcacctaagcatatctactttatcaactgtggtgattcacgtgctgttctgtataggaatggacaagtctgcttttctacccaggatcacaaaccttgcaatccaagggaaaaggagcgaatccaaaatgcaggaggcagcgtgatgatacaacgtgttaatggttcattagcagtatctcgtgctctgggggactatgattacaagtgtgttgatggcaagggcccaacagaacaacttgtttctccagagcctgaggtttatgaaattttaagagcagaagaggatgaatttatcatcttggcttgtgatgggatctgggatgttatgagtaatgaggagctctgtgaatatgttaaatctaggcttgaggtatctgatgacctggaaaatgtgtgcaattgggtagtggacacttgtttacacaagggaagtcgagataacatgagtattgtactagtttgcttttcaaatgctcccaaggtctcagatgaagcggtgaaaaaagattcagagttggataagcacttggaatcacgggttgaagagattatggagaagtctggcgaggaaggaatgcctgatcttgcccatgtcatgcgcatcttgtctgcagaaaatatcccaaatttgcctcctgggggaggtcttgctggcaagcgtaatgttattgaagctgtttatagtagactgaatccacatagagaaagtgatgggggtgctggagatctagaagacccatggtagccttaaaaaccttctaaaatgcttttgattctgaaaattgggggaaaaaacttttaatcacaattttcttcaatacaaggggaaaatattcttgcggattcccaacgttttgtgatatgagcagaaaatcattagcatttcccatcatttgttcatatttgtgttttctgacagttgccacttgtagcattgcctgtactacagtattttttgccaacctcaggcatactcgttacatctgtattgaactttcggccctagaaaccagtggagttatttcaccacaaatcaacaatgtgcctgaggtgcatgggaaatatagttagctatactctgaaaatacattatgttttttttctttaaacaaaacacacaacatgtaagcatgtaagagtaaagaattgtatgatatgttccttttttcagttcaccaagttggaagccttttgcagctctgtggcttggaatttcatttgagcaatttctataggatatgtatttattattgattgttatttaatttttttccaattttacctgtattaccaaactgggttctccaataatgtccaaattgtaatgttgccttgcttcaagataaagtgtatttgggaataatattataaacccttacaaattttatgcatgtatctactgcatccttcaactctcactagaaaatcttttgaaaccaaatggattaatttatggctatttataatttgctttgacatctcactgttggaaattttttaaagatgagatttgcctttataatgtaaattgtgatttttgttttacatgtgggtttctatagttttaattttttcagcttttaagatacgagttttgtgtaatttggtatttttaatcatttatgttattttaaaagctcagaatatcacattgaaattactataaatacatttaaaattatctattttagatctaaggaaatactacagagatattttcatgggttcagtaacttttcattttataacattgggcacggtacagagtgattgtcacataaggtacttgaagatttattagtttaattctatttttacagtaaccttgaattcttctgagttttgcatgtattaaattcaattaatgctgaacatgaagagtaaagtatttatctgaaagaagtttctgggttaggagaagtaatgaatgtatccatttgtacatggtttacatgttgtggatgctttgtaaacattttcctgtatgtttaaattgtgtttcagcaggatgtaattgcccttgtgtgtagttaaaatgagtcatcatctggtcctttgtgaaatggaattcatggtattttctgtaacgttttcctgaagctgtttctggagagccacacatttaaatacagacagctttcctgatcatttgatttattgtgcacctgatttttggtctaaaaggaattattgccacaatatattttatttattctttagattttagccttgtaagttaaagtgctttacatgatgatgtgaaaagctgtttgtccctttactgggtttggggggttgttaaaagatagggaatgaagaatgcaaaatggtttatcgttcaaactgtccactctgatccaaccctgtactgatagtacttcccagtatgatattgtgatgtttcatacaatgcagtgaacataaccaacttgttacctaaataaagaattgataaaaacagtgtgacatattaaaaaa

SEQ ID NO: 456256 - DNA, 2668 bp, Homo sapiens
aggcggggcaccctgaggggcggggaaggactagggtgcggggagggggttgcaaaaggagccgagcggcttctgctcaatggcggaaaagccgccggtgctctgacggcctcgttcccctagcagttgcgggggagtttcctgccggcgcggctggagtctctgattctcagggttcggtggttggaagatgctccagagagacgaggctgcggcggaggaggtggcggcggccgaatcggcaacggcgctagggtggagagaaggcggcagcggcggcggcggcggcgtgaggggccgggcggtgtaaacagccccggaggcggcggaggcggcggtcgagaccccgagggggaagcggcggctgagtcagggtcgcgcctccgttggaaacttgggctgagtaccgcggcgggcgcgagcgaggcgccctagacatcttctccctcccttgcctcagatttattgctaaacatgggtgcatttttggataaacccaaaactgaaaaacataatgctcatggtgctgggaatggtttacgttatggcctgagcagcatgcaaggatggagagtggaaatggaagatgcacacacagctgttgtaggtattcctcacggcttggaagactggtcattttttgcagtttatgatggtcatgctggatcccgagtggcaaattactgctcaacacatttattagaacacatcactactaacgaagactttagggcagctggaaaatcaggatctgctcttgagctttcagtggaaaatgttaagaatggtatcagaactggatttttgaaaattgatgaatacatgcgtaacttttcagacctcagaaacgggatggacaggagtggttcaactgcagtgggagttatgatttcacctaagcatatctactttatcaactgtggtgattcacgtgctgttctgtataggaatggacaagtctgcttttctacccaggatcacaaaccttgcaatccaagggaaaaggagcgaatccaaaatgcaggaggcagcgtgatgatacaacgtgttaatggttcattagcagtatctcgtgctctgggggactatgattacaagtgtgttgatggcaagggcccaacagaacaacttgtttctccagagcctgaggtttatgaaattttaagagcagaagaggatgaatttatcatcttggcttgtgatgggatctgggatgttatgagtaatgaggagctctgtgaatatgttaaatctaggcttgaggtatctgatgacctggaaaatgtgtgcaattgggtagtggacacttgtttacacaagggaagtcgagataacatgagtattgtactagtttgcttttcaaatgctcccaaggtctcagatgaagcggtgaaaaaagattcagagttggataagcacttggaatcacgggttgaagagattatggagaagtctggcgaggaaggaatgcctgatcttgcccatgtcatgcgcatcttgtctgcagaaaatatcccaaatttgcctcctgggggaggtcttgctggcaagcgtaatgttattgaagctgtttatagtagactgaatccacatagagaaagtgatggggcctccgatgaagcagaggaaagtggatcacagggaaaattggtggaagctctcaggcaaatgagaattaatcataggggaaactaccgacaacttctggaggagatgctgactagttacaggctagctaaagtagagggagaagaaagccctgctgaaccagctgccacagctacttcttcgaacagtgatgctggaaacccagtgacaatgcaggaaagccatactgaatcagaaagtggtcttgctgaattagacagctctaatgaagatgcagggacaaagatgagtggtgaaaaaatatgactttcctttttggtaatatttttgtgatctttgatggtttttaacctaggaagtgtaatgtatgcatttatataactgttttgttatttgaatcttggaaaactagttttattatattcagatagccttgttttttaaaaaggcctttgcatacacctttatgagatagtgtaaaattgactatttatagtactatggatttaatgaaattatatgtcatttcacattgtatgccagaaattaggctaccaattatgaattaaagtcagtagttaaattaatactagatagaattagaaattttgattagagagattatgctatattatggaaaaacttgttaatgtagaattatactgcttcatattattttacctattagtacactcatagttagctttgtaataaatttatgttttctttaataattttagttcttcaaagaatggctgatgctggcctgtaatttttctttcaaggatgataatttgtgtgttgtttgatttgtttatattttacatctctgtagttttatttttagaagttgtgagatattggatgtgtggctatttttcctttctctgtattctttatgaaacataacttttgaaaaacctatgtattattcatacagctttggtttgtatattctgtatagcctaactacacacatcaaaatgtatgtcaaccaagtgtttagaatgaaattataagtgtttaagtccaaataaagcatgtgatgtggaataatcta

SEQ ID NO: 456257 - DNA, 157 bp, Homo sapiens
atgttatccccaacacctatccccaacacctggaaacccagtgacaatgcaggaaagccatactgaatcagaaagtggtcttgctgaattagacagctctaatgaagatgcagggacaaagatgagtgggtgttgggcgataacatccgggatcctc

SEQ ID NO: 456258 - DNA, 3317 bp, Homo sapiens
aggcggggcaccctgaggggcggggaaggactagggtgcggggagggggttgcaaaaggagccgagcggcttctgctcaatggcggaaaagccgccggtgctctgacggcctcgttcccctagcagttgcgggggagtttcctgccggcgcggctggagtctctgattctcagggttcggtggttggaagatgctccagagagacgaggctgcggcggaggaggtggcggcggccgaatcggcaacggcgctagggtggagagaaggcggcagcggcggcggcggcggcgtgaggggccgggcggtgtaaacagccccggaggcggcggaggcggcggtcgagaccccgagggggaagcggcggctgagtcagggtcgcgcctccgttggaaacttgggctgagtaccgcggcgggcgcgagcgaggcgccctagacatcttctccctcccttgcctcagatttattgctaaacatgggtgcatttttggataaacccaaaactgaaaaacataatgctcatggtgctgggaatggtttacgttatggcctgagcagcatgcaaggatggagagtggaaatggaagatgcacacacagctgttgtaggtattcctcacggcttggaagactggtcattttttgcagtttatgatggtcatgctggatcccgagtggcaaattactgctcaacacatttattagaacacatcactactaacgaagactttagggcagctggaaaatcaggatctgctcttgagctttcagtggaaaatgttaagaatggtatcagaactggatttttgaaaattgatgaatacatgcgtaacttttcagacctcagaaacgggatggacaggagtggttcaactgcagtgggagttatgatttcacctaagcatatctactttatcaactgtggtgattcacgtgctgttctgtataggaatggacaagtctgcttttctacccaggatcacaaaccttgcaatccaagggaaaaggagcgaatccaaaatgcaggaggcagcgtgatgatacaacgtgttaatggttcattagcagtatctcgtgctctgggggactatgattacaagtgtgttgatggcaagggcccaacagaacaacttgtttctccagagcctgaggtttatgaaattttaagagcagaagaggatgaatttatcatcttggcttgtgatgggatctgggatgttatgagtaatgaggagctctgtgaatatgttaaatctaggcttgaggtatctgatgacctggaaaatgtgtgcaattgggtagtggacacttgtttacacaagggaagtcgagataacatgagtattgtactagtttgcttttcaaatgctcccaaggtctcagatgaagcggtgaaaaaagattcagagttggataagcacttggaatcacgggttgaagagattatggagaagtctggcgaggaaggaatgcctgatcttgcccatgtcatgcgcatcttgtctgcagaaaatatcccaaatttgcctcctgggggaggtcttgctggcaagcgtaatgttattgaagctgtttatagtagactgaatccacatagagaaagtgatgggggtgctggagatctagaagacccatggtagccttaaaaaccttctaaaatgcttttgattctgaaaattgggggaaaaaacttttaatcacaattttcttcaatacaaggggaaaatattcttgcggattcccaacgttttgtgatatgagcagaaaatcattagcatttcccatcatttgttcatatttgtgttttctgacagttgccacttgtagcattgcctgtactacagtattttttgccaacctcaggcatactcgttacatctgtattgaactttcggccctagaaaccagtggagttatttcaccacaaatcaacaatgtgcctgaggtgcatgggaaatatagttagctatactctgaaaatacattatgttttttttctttaaacaaaacacacaacatgtaagcatgtaagagtaaagaattgtatgatatgttccttttttcagttcaccaagttggaagccttttgcagctctgtggcttggaatttcatttgagcaatttctataggatatgtatttattattgattgttatttaatttttttccaattttacctgtattaccaaactgggttctccaataatgtccaaattgtaatgttgccttgcttcaagataaagtgtatttgggaataatattataaacccttacaaattttatgcatgtatctactgcatccttcaactctcactagaaaatcttttgaaaccaaatggattaatttatggctatttataatttgctttgacatctcactgttggaaattttttaaagatgagatttgcctttataatgtaaattgtgatttttgttttacatgtgggtttctatagttttaattttttcagcttttaagatacgagttttgtgtaatttggtatttttaatcatttatgttattttaaaagctcagaatatcacattgaaattactataaatacatttaataacttttcattttataacattgggcacggtacagagtgattgtcacataaggtacttgaagatttattagtttaattctatttttacagtaaccttgaattcttctgagttttgcatgtattaaattcaattaatgctgaacatgaagagtaaagtatttatctgaaagaagtttctgggttaggagaagtaatgaatgtatccatttgtacatggtttacatgttgtggatgctttgtaaacattttcctgtatgtttaaattgtgtttcagcaggatgtaattgcccttgtgtgtagttaaaatgagtcatcatctggtcctttgtgaaatggaattcatggtattttctgtaacgttttcctgaagctgtttctggagagccacacatttaaatacagacagctttcctgatcatttgatttattgtgcacctgatttttggtctaaaaggaattattgccacaatatattttatttattctttagattttagccttgtaagttaaagtgctttacatgatgatgtgaaaagctgtttgtccctttactgggtttggggggttgttaaaagatagggaatgaagaatgcaaaatggtttatcgttcaaactgtccactctgatccaaccctgtactgatagtacttcccagtatgatattgtgatgtttcatacaatgcagtgaacataaccaacttgttacctaaataaagaattgataaaaacagtgtgacatattaaaaaa

SEQ ID NO: 456259 - DNA, 3418 bp, Homo sapiens
aggcggggcaccctgaggggcggggaaggactagggtgcggggagggggttgcaaaaggagccgagcggcttctgctcaatggcggaaaagccgccggtgctctgacggcctcgttcccctagcagttgcgggggagtttcctgccggcgcggctggagtctctgattctcagggttcggtggttggaagatgctccagagagacgaggctgcggcggaggaggtggcggcggccgaatcggcaacggcgctagggtggagagaaggcggcagcggcggcggcggcggcgtgaggggccgggcggtgtaaacagccccggaggcggcggaggcggcggtcgagaccccgagggggaagcggcggctgagtcagggtcgcgcctccgttggaaacttgggctgagtaccgcggcgggcgcgagcgaggcgccctagacatcttctccctcccttgcctcagatttattgctaaacatgggtgcatttttggataaacccaaaactgaaaaacataatgctcatggtgctgggaatggtttacgttatggcctgagcagcatgcaaggatggagagtggaaatggaagatgcacacacagctgttgtaggtattcctcacggcttggaagactggtcattttttgcagtttatgatggtcatgctggatcccgagtggcaaattactgctcaacacatttattagaacacatcactactaacgaagactttagggcagctggaaaatcaggatctgctcttgagctttcagtggaaaatgttaagaatggtatcagaactggatttttgaaaattgatgaatacatgcgtaacttttcagacctcagaaacgggatggacaggagtggttcaactgcagtgggagttatgatttcacctaagcatatctactttatcaactgtggtgattcacgtgctgttctgtataggaatggacaagtctgcttttctacccaggatcacaaaccttgcaatccaagggaaaaggagcgaatccaaaatgcaggaggcagcgtgatgatacaacgtgttaatggttcattagcagtatctcgtgctctgggggactatgattacaagtgtgttgatggcaagggcccaacagaacaacttgtttctccagagcctgaggtttatgaaattttaagagcagaagaggatgaatttatcatcttggcttgtgatgggatctgggatgttatgagtaatgaggagctctgtgaatatgttaaatctaggcttgaggtatctgatgacctggaaaatgtgtgcaattgggtagtggacacttgtttacacaagggaagtcgagataacatgagtattgtactagtttgcttttcaaatgctcccaaggtctcagatgaagcggtgaaaaaagattcagagttggataagcacttggaatcacgggttgaagagattatggagaagtctggcgaggaaggaatgcctgatcttgcccatgtcatgcgcatcttgtctgcagaaaatatcccaaatttgcctcctgggggaggtcttgctggcaagcgtaatgttattgaagctgtttatagtagactgaatccacatagagaaagtgatggggcctccgatgaagcagaggaaagtggatcacagggaaaattggtggaagctctcaggcaaatgagaattaatcataggggaaactaccgacaacttctggaggagatgctgactagttacaggctagctaaagtagagggagaagaaagccctgctgaaccagctgccacagctacttcttcgaacagtgatgctggaaacccagtgacaatgcaggaaagccatactgaatcagaaagtggtcttgctgaattagacagctctaatgaagatgcagggacaaagatgagtggtgaaaaaatatgactttcctttttggtaatatttttgtgatctttgatggtttttaacctaggaagtgtaatgtatgcatttatataactgttttgttatttgaatcttggaaaactagttttattatattcagatagccttgttttttaaaaaggcctttgcatacacctttatgagatagtgtaaaattgactatttatagtactatggatttaatgaaattatatgtcatttcacattgtatgccagaaattaggctaccaattatgaattaaagtcagtagttaaattaatactagatagaattagaaattttgattagagagattatgctatattatggaaaaacttgttaatgtagaattatactgcttcatattattttacctattagtacactcatagttagctttgtaataaatttatgttttctttaataattttagttcttcaaagaatggctgatgctggcctgtaatttttctttcaaggatgataatttgtgtgttgtttgatttgtttatattttacatctctgtagttttatttttagaagttgtgagatattggatgtgtggctatttttcctttctctgtattctttatgaaacataacttttgaaaaacctatgtattattcatacagctttggtttgtatattctgtatagcctaactacacacatcaaaatgtatgtcaaccaagtgtttagaatgaaattataagtgtttaagtccaaataaagcatgtgatgtggaataatctaaaaaaaaaaaaaaaaaaaaaaaaaaaaaaaaaaaaaaaaaaaaaaaaaaaaaaaaaaaaaaaaaaaaaaaaaaaaaaaaaaaaaaaaagaggggggggggggcaagtaaacatacttcccgaggggggcacactgaagtaccaccacaccccagcttttgttcgtcgaagaaagcaggggcccctaattatgatggagaagtatcataactaaagccagcagccggcgggcacgcctgattaaaaacaacgcgcgagcgacgaagaaacacgactgtatggtaggatagaatgtgtgaagagcaacaaacaaataataagagtagggagagaaaacagaagtgacaccactcacaagaaaaaattacacgccaggggggatacataaaacaaccagcgacgagtggatgatggggcaacacagcagtcattagtcaggcagagaagaaagcagccccaggaggtattctcgagaaaatatcaaccgcggggtcgatagtaataagagccgatcgctgccactcgactacaccgaaccaagagccacgacactagccatcagtacacaagacaagcagcgtgagacgacaaacaacaacccagcgaaccagacgacccactcgaaacacgcaatcgcagacacatagaccgaatcgatcgaggatcgagagaatcgaccgccacgcagggaccagccacttaggcacacaccagccagcacaagtgcaacaatgctgtcacacaaaaaact

SEQ ID NO: 456260 - DNA, 2831 bp, Homo sapiens
aggcggggcaccctgaggggcggggaaggactagggtgcggggagggggttgcaaaaggagccgagcggcttctgctcaatggcggaaaagccgccggtgctctgacggcctcgttcccctagcagttgcgggggagtttcctgccggcgcggctggagtctctgattctcagggttcggtggttggaagatgctccagagagacgaggctgcggcggaggaggtggcggcggccgaatcggcaacggcgctagggtggagagaaggcggcagcggcggcggcggcggcgtgaggggccgggcggtgtaaacagccccggaggcggcggaggcggcggtcgagaccccgagggggaagcggcggctgagtcagggtcgcgcctccgttggaaacttgggctgagtaccgcggcgggcgcgagcgaggcgccctagacatcttctccctcccttgcctcagatttattgctaaacatgggtgcatttttggataaacccaaaactgaaaaacataatgctcatggtgctgggaatggtttacgttatggcctgagcagcatgcaaggatggagagtggaaatggaagatgcacacacagctgttgtaggtattcctcacggcttggaagactggtcattttttgcagtttatgatggtcatgctggatcccgagtggcaaattactgctcaacacatttattagaacacatcactactaacgaagactttagggcagctggaaaatcaggatctgctcttgagctttcagtggaaaatgttaagaatggtatcagaactggatttttgaaaattgatgaatacatgcgtaacttttcagacctcagaaacgggatggacaggagtggttcaactgcagtgggagttatgatttcacctaagcatatctactttatcaactgtggtgattcacgtgctgttctgtataggaatggacaagtctgcttttctacccaggatcacaaaccttgcaatccaagggaaaaggagcgaatccaaaatgcaggaggcagcgtgatgatacaacgtgttaatggttcattagcagtatctcgtgctctgggggactatgattacaagtgtgttgatggcaagggcccaacagaacaacttgtttctccagagcctgaggtttatgaaattttaagagcagaagaggatgaatttatcatcttggcttgtgatgggatctgggatgttatgagtaatgaggagctctgtgaatatgttaaatctaggcttgaggtatctgatgacctggaaaatgtgtgcaattgggtagtggacacttgtttacacaagggaagtcgagataacatgagtattgtactagtttgcttttcaaatgctcccaaggtctcagatgaagcggtgaaaaaagattcagagttggataagcacttggaatcacgggttgaagagattatggagaagtctggcgaggaaggaatgcctgatcttgcccatgtcatgcgcatcttgtctgcagaaaatatcccaaatttgcctcctgggggaggtcttgctggcaagcgtaatgttattgaagctgtttatagtagactgaatccacatagagaaagtgatggggcctccgatgaagcagaggaaagtggatcacagggaaaattggtggaagctctcaggcaaatgagaattaatcataggggaaactaccgacaacttctggaggagatgctgactagttacaggctagctaaagtagagggagaagaaagccctgctgaaccagctgccacagctacttcttcgaacagtgatgctggaaacccagtgacaatgcaggaaagccatactgaatcagaaagtggtcttgctgaattagacagctctaatgaagatgcagggacaaagatgagtggtgaaaaaatatgactttcctttttggtaatatttttgtgatctttgatggtttttaacctaggaagtgtaatgtatgcatttatataactgttttgttatttgaatcttggaaaactagttttattatattcagatagccttgttttttaaaaaggcctttgcatacacctttatgagatagtgtaaaattgactatttatagtactatggatttaatgaaattatatgtcatttcacattgtatgccagaaattaggctaccaattatgaattaaagtcagtagttaaattaatactagatagaattagaaattttgattagagagattatgctatattatggaaaaacttgttaatgtagaattatactgcttcatattattttacctattagtacactcatagttagctttgtaataaatttatgttttctttaataattttagttcttcaaagaatggctgatgctggcctgtaatttttctttcaaggatgataatttgtgtgttgtttgatttgtttatattttacatctctgtagttttatttttagaagttgtgagatattggatgtgtggctatttttcctttctctgtattctttatgaaacataacttttgaaaaacctatgtattattcatacagctttggtttgtatattctgtatagcctaactacacacatcaaaatgtatgtcaaccaagtgtttagaatgaaattataagtgtttaagtccaaataaagcatgtgatgtggaataatctaattttaaattatatattataccagaatttttattaaaatgaatctatgtttatttttgtaataataaaaaaaaaatcttggaggggggtcccgttaccaatttccccttttttggagtgctttaaaatttaattggccggttttttaaacctttgtatgtgaa

SEQ ID NO: 456261 - DNA, 2137 bp, Homo sapiens
tcgtctttacgtttatatttatatcatgtgtctaaagttgctttaagttaccataaattgaaacttcggaatctttggatgttatagctgatgttttgatgtatttttccaatgccagaatatttttaagtgctttgagaaaggaaggcatttgatggagaggggaggaaaataacccaacccagttatctatccatattagatacacgtgtacacacacaatatgcaatacacaacatctctctgtaaaagtacccttttcagacaaagaaaggaaggtaatttgttcatcaattttgttttcttttgaaattcaatccaatctggaagtggcataggtaaataataatattcttccttttctcttcctgtagggtgctggagatctagaagacccatggtagccttaaaaaccttctaaaatgcttttgattctgaaaattgggggaaaaaacttttaatcacaattttcttcaatacaaggggaaaatattcttgcggattcccaacgttttgtgatatgagcagaaaatcattagcatttcccatcatttgttcatatttgtgttttctgacagttgccacttgtagcattgcctgtactacagtattttttgccaacctcaggcatactcgttacatctgtattgaactttcggccctagaaaccagtggagttatttcaccacaaatcaacaatgtgcctgaggtgcatgggaaatatagttagctatactctgaaaatacattatgttttttttctttaaacaaaacacacaacatgtaagcatgtaagagtaaagaattgtatgatatgttccttttttcagttcaccaagttggaagccttttgcagctctgtggcttggaatttcatttgagcaatttctataggatatgtatttattattgattgttatttaatttttttccaattttacctgtattaccaaactgggttctccaataatgtccaaattgtaatgttgccttgcttcaagataaagtgtatttgggaataatattataaacccttacaaattttatgcatgtatctactgcatccttcaactctcactagaaaatcttttgaaaccaaatggattaatttatggctatttataatttgctttgacatctcactgttggaaattttttaaagatgagatttgcctttataatgtaaattgtgatttttgttttacatgtgggtttctatagttttaattttttcagcttttaagatacgagttttgtgtaatttggtatttttaatcatttatgttattttaaaagctcagaatatcacattgaaattactataaatacatttaaaattatctattttagatctaaggaaatactacagagatattttcatgggttcagtaacttttcattttataacattgggcacggtacagagtgattgtcacataaggtacttgaagatttattagtttaattctatttttacagtaaccttgaattcttctgagttttgcatgtattaaattcaattaatgctgaacatgaagagtaaagtatttatctgaaagaagtttctgggttaggagaagtaatgaatgtatccatttgtacatggtttacatgttgtggatgctttgtaaacattttcctgtatgtttaaattgtgtttcagcaggatgtaattgcccttgtgtgtagttaaaatgagtcatcatctggtcctttgtgaaatggaattcatggtattttctgtaacgttttcctgaagctgtttctggagagccacacatttaaatacagacagctttcctgatcatttgatttattgtgcacctgatttttggtctaaaaggaattattgccacaatatattttatttattctttagattttagccttgtaagttaaagtgctttacatgatgatgtgaaaagctgtttgtccctttactgggtttggggggttgttaaaagatagggaatgaagaatgcaaaatggtttatcgttcaaactgtccactctgatccaaccctgtactgatagtacttcccagtatgatattgtgatgtttcatacaatgcagtgaacataaccaacttgttacctaaataaagaattgataaaaacagtgtgacatattaaaaaa

SEQ ID NO: 456262 - DNA, 2550 bp, Homo sapiens
aggcggggcaccctgaggggcggggaaggactagggtgcggggagggggttgcaaaaggagccgagcggcttctgctcaatggcggaaaagccgccggtgctctgacggcctcgttcccctagcagttgcgggggagtttcctgccggcgcggctggagtctctgattctcagggttcggtggttggaagatgctccagagagacgaggctgcggcggaggaggtggcggcggccgaatcggcaacggcgctagggtggagagaaggcggcagcggcggcggcggcggcgtgaggggccgggcggtgtaaacagccccggaggcggcggaggcggcggtcgagaccccgagggggaagcggcggctgagtcagggtcgcgcctccgttggaaacttgggctgagtaccgcggcgggcgcgagcgaggcgccctagacatcttctccctcccttgcctcagatttattgctaaacatgggtgcatttttggataaacccaaaactgaaaaacataatgctcatggtgctgggaatggtttacgttatggcctgagcagcatgcaaggatggagagtggaaatggaagatgcacacacagctgttgtaggtattcctcacggcttggaagactggtcattttttgcagtttatgatggtcatgctggatcccgagtggcaaattactgctcaacacatttattagaacacatcactactaacgaagactttagggcagctggaaaatcaggatctgctcttgagctttcagtggaaaatgttaagaatggtatcagaactggatttttgaaaattgatgaatacatgcgtaacttttcagacctcagaaacgggatggacaggagtggttcaactgcagtgggagttatgatttcacctaagcatatctactttatcaactgtggtgattcacgtgctgttctgtataggaatggacaagtctgcttttctacccaggatcacaaaccttgcaatccaagggaaaaggagcgaatccaaaatgcaggaggcagcgtgatgatacaacgtgttaatggttcattagcagtatctcgtgctctgggggactatgattacaagtgtgttgatggcaagggcccaacagaacaacttgtttctccagagcctgaggtttatgaaattttaagagcagaagaggatgaatttatcatcttggcttgtgatgggatctgggatgttatgagtaatgaggagctctgtgaatatgttaaatctaggcttgaggtatctgatgacctggaaaatgtgtgcaattgggtagtggacacttgtttacacaagagattatggagaagtctggcgaggaaggaatgcctgatcttgcccatgtcatgcgcatcttgtctgcagaaaatatcccaaatttgcctcctgggggaggtcttgctggcaagcgtaatgttattgaagctgtttatagtagactgaatccacatagagaaagtgatggggcctccgatgaagcagaggaaagtggatcacagggaaaattggtggaagctctcaggcaaatgagaattaatcataggggaaactaccgacaacttctggaggagatgctgactagttacaggctagctaaagtagagggagaagaaagccctgctgaaccagctgccacagctacttcttcgaacagtgatgctggaaacccagtgacaatgcaggaaagccatactgaatcagaaagtggtcttgctgaattagacagctctaatgaagatgcagggacaaagatgagtggtgaaaaaatatgactttcctttttggtaatatttttgtgatctttgatggtttttaacctaggaagtgtaatgtatgcatttatataactgttttgttatttgaatcttggaaaactagttttattatattcagatagccttgttttttaaaaaggcctttgcatacacctttatgagatagtgtaaaattgactatttatagtactatggatttaatgaaattatatgtcatttcacattgtatgccagaaattaggctaccaattatgaattaaagtcagtagttaaattaatactagatagaattagaaattttgattagagagattatgctatattatggaaaaacttgttaatgtagaattatactgcttcatattattttacctattagtacactcatagttagctttgtaataaatttatgttttctttaataattttagttcttcaaagaatggctgatgctggcctgtaatttttctttcaaggatgataatttgtgtgttgtttgatttgtttatattttacatctctgtagttttatttttagaagttgtgagatattggatgtgtggctatttttcctttctctgtattctttatgaaacataacttttgaaaaacctatgtattattcatacagctttggtttgtatattctgtatagcctaactacacacatcaaaatgtatgtcaaccaagtgtttagaatgaaattataagtgtttaagtccaaataaagcatgtgatgtggaataatcta

SEQ ID NO: 456263 - DNA, 1767 bp, Homo sapiens
aggcggggcaccctgaggggcggggaaggactagggtgcggggagggggttgcaaaaggagccgagcggcttctgctcaatggcggaaaagccgccggtgctctgacggcctcgttcccctagcagttgcgggggagtttcctgccggcgcggctggagtctctgattctcagggttcggtggttggaagatgctccagagagacgaggctgcggcggaggaggtggcggcggccgaatcggcaacggcgctagggtggagagaaggcggcagcggcggcggcggcggcgtgaggggccgggcggtgtaaacagccccggaggcggcggaggcggcggtcgagaccccgagggggaagcggcggctgagtcagggtcgcgcctccgttggaaacttgggctgagtaccgcggcgggcgcgagcgaggcgccctagacatcttctccctcccttgcctcagatttattgctaaacatgggtgcatttttggataaacccaaaactgaaaaacataatgctcatggtgctgggaatggtttacgttatggcctgagcagcatgcaaggatggagagtggaaatggaagatgcacacacagctgttgtaggtattcctcacggcttggaagactggtcattttttgcagtttatgatggtcatgctggatcccgagtggcaaattactgctcaacacatttattagaacacatcactactaacgaagactttagggcagctggaaaatcaggatctgctcttgagctttcagtggaaaatgttaagaatggtatcagaactggatttttgaaaattgatgaatacatgcgtaacttttcagacctcagaaacgggatggacaggagtggttcaactgcagtgggagttatgatttcacctaagcatatctactttatcaactgtggtgattcacgtgctgttctgtataggaatggacaagtctgcttttctacccaggatcacaaaccttgcaatccaagggaaaaggagcgaatccaaaatgcaggaggcagcgtgatgatacaacgtgttaatggttcattagcagtatctcgtgctctgggggactatgattacaagtgtgttgatggcaagggcccaacagaacaacttgtttctccagagcctgaggtttatgaaattttaagagcagaagaggatgaatttatcatcttggcttgtgatgggatctgggatgttatgagtaatgaggagctctgtgaatatgttaaatctaggcttgaggtatctgatgacctggaaaatgtgtgcaattgggtagtggacacttgtttacacaagggaagtcgagataacatgagtattgtactagtttgcttttcaaatgctcccaaggtctcagatgaagcggtgaaaaaagattcagagttggataagcacttggaatcacgggttgaagagattatggagaagtctggcgaggaaggaatgcctgatcttgcccatgtcatgcgcatcttgtctgcagaaaatatcccaaatttgcctcctgggggaggtcttgctggcaagcgtaatgttattgaagctgtttatagtagactgaatccacatagagaaagtgatgggatggcagtcttgggcacgtccatctgtaaacctgctgagagctctggtgacaagaaaggcagtggctggcagaccttccaagcactcagaagcacgcggacaaaaaggtttttttgtaaacccgaacgaaaaataaacccagcattatataattataaa

SEQ ID NO: 456264 - DNA, 1485 bp, Homo sapiens
aggcggggcaccctgaggggcggggaaggactagggtgcggggagggggttgcaaaaggagccgagcggcttctgctcaatggcggaaaagccgccggtgctctgacggcctcgttcccctagcagttgcgggggagtttcctgccggcgcggctggagtctctgattctcagggttcggtggttggaagatgctccagagagacgaggctgcggcggaggaggtggcggcggccgaatcggcaacggcgctagggtggagagaaggcggcagcggcggcggcggcggcgtgaggggccgggcggtgtaaacagccccggaggcggcggaggcggcggtcgagaccccgagggggaagcggcggctgagtcagggtcgcgcctccgttggaaacttgggctgagtaccgcggcgggcgcgagcgaggcgccctagacatcttctccctcccttgcctcagatttattgctaaacatgggtgcatttttggataaacccaaaactgaaaaacataatgctcatggtgctgggaatggtttacgttatggcctgagcagcatgcaaggatggagagtggaaatggaagatgcacacacagctgttgtaggtattcctcacggcttggaagactggtcattttttgcagtttatgatggtcatgctggatcccgagtggcaaattactgctcaacacatttattagaacacatcactactaacgaagactttagggcagctggaaaatcaggatctgctcttgagctttcagtggaaaatgttaagaatggtatcagaactggatttttgaaaattgatgaatacatgcgtaacttttcagacctcagaaacgggatggacaggagtggttcaactgcagtgggagttatgatttcacctaagcatatctactttatcaactgtggtgattcacgtgctgttctgtataggaatggacaagtctgcttttctacccaggatcacaaaccttgcaatccaagggaaaaggagcgaatccaaaatgcaggaggcagcgtgatgatacaacgtgttaatggttcattagcagtatctcgtgctctgggggactatgattacaagtgtgttgatggcaagggcccaacagaacaacttgtttctccagagcctgaggtttatgaaattttaagagcagaagaggatgaatttatcatcttggcttgtgatgggatctgggatgttatgagtaatgaggagctctgtgaatatgttaaatctaggcttgaggtatctgatgacctggaaaatgtgtgcaattgggtagtggacacttgtttacacaagagattatggagaagtctggcgaggaaggaatgcctgatcttgcccatgtcatgcgcatcttgtctgcagaaaatatcccaaatttgcctcctgggggaggtcttgctggcaagcgtaatgctattgaaacttctaaactaggggtccagctcgagttctatatgt

SEQ ID NO: 456265 - DNA, 896 bp, Homo sapiens
atgttatccccaacacctatccccaacacctggaaacccagtgacaatgcaggaaagccatactgaatcagaaagtggtcttgctgaattagacagctctaatgaagatgcagggacaaagatgagtggtgaaaaaatatgactttcctttttggtaatatttttgtgatctttgatggtttttaacctaggaagtgtaatgtatgcatttatataactgttttgttatttgaatcttggaaaactagttttattatattcagatagccttgttttttaaaaaggcctttgcatacacctttatgagatagtgtaaaattgactatttatagtactatggatttaatgaaattatatgtcatttcacattgtatgccagaaattaggctaccaattatgaattaaagtcagtagttaaattaatactagatagaattagaaattttgattagagagattatgctatattatggaaaaacttgttaatgtagaattatactgcttcatattattttacctattagtacactcatagttagctttgtaataaatttatgttttctttaataattttagttcttcaaagaatggctgatgctggcctgtaatttttctttcaaggatgataatttgtgtgttgtttgatttgtttatattttacatctctgtagttttatttttagaagttgtgagatattggatgtgtggctatttttcctttctctgtattctttatgaaacataacttttgaaaaacctatgtattattcatacagctttggtttgtatattctgtatagcctaactacacacatcaaaatgtatgtcaaccaagtgtttagaatgaaattataagtgtttaagtccaaataaagcatgtgatgtggaataatcta

SEQ ID NO: 456266 - DNA, 395 bp, Homo sapiens
caccttgtttcttcaagttgtgtttttagtaattcattggaataaaaatgaatgtgttaaacataaacgttctggatgattaaataaactataattgcttaaagtattttgaagtaaataatagttgattgtagaaatacaattttttttcttttttttctttaatacacagggaagtcgagataacatgagtattgtactagtttgcttttcaaatgctcccaaggtctcagatgaagcggtgaaaaaagattcagagttggataagcacttggaatcacgggttgaaggtaagacaaatgctttttaaaaatatagacaggccaggcacggtagctcatgcctgtaatcctagcacttttgtcgcctgggcgacacaccaaggctctgtctca

SEQ ID NO: 456267 - DNA, 382 bp, Homo sapiens
agttgtgtttttagtaattcattggaataaaaatgaatgtgttaaacataaacgttctggatgattaaataaactataattgcttaaagtattttgaagtaaataatagttgattgtagaaatacaattttttttcttttttttctttaatacacagggaagtcgagataacatgagtattgtactagtttgcttttcaaatgctcccaaggtctcagatgaagcggtgaaaaaagattcagagttggataagcacttggaatcacgggttgaaggtaagacaaatgctttttaaaaatatagacaggccaggcacggtagctcatgcctgtaatcctagcacttttgtcgcctgggcgacacaccaaggctctgtctcaaa

SEQ ID NO: 456268 - DNA, 1808 bp, Homo sapiens
aggcggggcaccctgaggggcggggaaggactagggtgcggggagggggttgcaaaaggagccgagcggcttctgctcaatggcggaaaagccgccggtgctctgacggcctcgttcccctagcagttgcgggggagtttcctgccggcgcggctggagtctctgattctcagggttcggtggttggaagatgctccagagagacgaggctgcggcggaggaggtggcggcggccgaatcggcaacggcgctagggtggagagaaggcggcagcggcggcggcggcggcgtgaggggccgggcggtgtaaacagccccggaggcggcggaggcggcggtcgagaccccgagggggaagcggcggctgagtcagggtcgcgcctccgttggaaacttgggctgagtaccgcggcgggcgcgagcgaggcgccctagacatcttctccctcccttgcctcagggaagtcgagataacatgagtattgtactagtttgcttttcaaatgctcccaaggtctcagatgaagcggtgaaaaaagattcagagttggataagcacttggaatcacgggttgaagagattatggagaagtctggcgaggaaggaatgcctgatcttgcccatgtcatgcgcatcttgtctgcagaaaatatcccaaatttgcctcctgggggaggtcttgctggcaagcgtaatgttattgaagctgtttatagtagactgaatccacatagagaaagtgatggggcctccgatgaagcagaggaaagtggatcacagggaaaattggtggaagctctcaggcaaatgagaattaatcataggggaaactaccgacaacttctggaggagatgctgactagttacaggctagctaaagtagagggagaagaaagccctgctgaaccagctgccacagctacttcttcgaacagtgatgctggaaacccagtgacaatgcaggaaagccatactgaatcagaaagtggtcttgctgaattagacagctctaatgaagatgcagggacaaagatgagtggtgaaaaaatatgactttcctttttggtaatatttttgtgatctttgatggtttttaacctaggaagtgtaatgtatgcatttatataactgttttgttatttgaatcttggaaaactagttttattatattcagatagccttgttttttaaaaaggcctttgcatacacctttatgagatagtgtaaaattgactatttatagtactatggatttaatgaaattatatgtcatttcacattgtatgccagaaattaggctaccaattatgaattaaagtcagtagttaaattaatactagatagaattagaaattttgattagagagattatgctatattatggaaaaacttgttaatgtagaattatactgcttcatattattttacctattagtacactcatagttagctttgtaataaatttatgttttctttaataattttagttcttcaaagaatggctgatgctggcctgtaatttttctttcaaggatgataatttgtgtgttgtttgatttgtttatattttacatctctgtagttttatttttagaagttgtgagatattggatgtgtggctatttttcctttctctgtattctttatgaaacataacttttgaaaaacctatgtattattcatacagctttggtttgtatattctgtatagcctaactacacacatcaaaatgtatgtcaaccaagtgtttagaatgaaattataagtgtttaagtccaaataaagcatgtgatgtggaataatcta

SEQ ID NO: 456269 - DNA, 3253 bp, Homo sapiens
aggcggggcaccctgaggggcggggaaggactagggtgcggggagggggttgcaaaaggagccgagcggcttctgctcaatggcggaaaagccgccggtgctctgacggcctcgttcccctagcagttgcgggggagtttcctgccggcgcggctggagtctctgattctcagggttcggtggttggaagatgctccagagagacgaggctgcggcggaggaggtggcggcggccgaatcggcaacggcgctagggtggagagaaggcggcagcggcggcggcggcggcgtgaggggccgggcggtgtaaacagccccggaggcggcggaggcggcggtcgagaccccgagggggaagcggcggctgagtcagggtcgcgcctccgttggaaacttgggctgagtaccgcggcgggcgcgagcgaggcgccctagacatcttctccctcccttgcctcagatttattgctaaacatgggtgcatttttggataaacccaaaactgaaaaacataatgctcatggtgctgggaatggtttacgttatggcctgagcagcatgcaaggatggagagtggaaatggaagatgcacacacagctgttgtaggtattcctcacggcttggaagactggtcattttttgcagtttatgatggtcatgctggatcccgagtggcaaattactgctcaacacatttattagaacacatcactactaacgaagactttagggcagctggaaaatcaggatctgctcttgagctttcagtggaaaatgttaagaatggtatcagaactggatttttgaaaattgatgaatacatgcgtaacttttcagacctcagaaacgggatggacaggagtggttcaactgcagtgggagttatgatttcacctaagcatatctactttatcaactgtggtgattcacgtgctgttctgtataggaatggacaagtctgcttttctacccaggatcacaaaccttgcaatccaagggaaaaggagcgaatccaaaatgcaggaggcagcgtgatgatacaacgtgttaatggttcattagcagtatctcgtgctctgggggactatgattacaagtgtgttgatggcaagggcccaacagaacaacttgtttctccagagcctgaggtttatgaaattttaagagcagaagaggatgaatttatcatcttggcttgtgatgggatctgggatgttatgagtaatgaggagctctgtgaatatgttaaatctaggcttgaggtatctgatgacctggaaaatgtgtgcaattgggtagtggacacttgtttacacaagagattatggagaagtctggcgaggaaggaatgcctgatcttgcccatgtcatgcgcatcttgtctgcagaaaatatcccaaatttgcctcctgggggaggtcttgctggcaagcgtaatgttattgaagctgtttatagtagactgaatccacatagagaaagtgatgggggtgctggagatctagaagacccatggtagccttaaaaaccttctaaaatgcttttgattctgaaaattgggggaaaaaacttttaatcacaattttcttcaatacaaggggaaaatattcttgcggattcccaacgttttgtgatatgagcagaaaatcattagcatttcccatcatttgttcatatttgtgttttctgacagttgccacttgtagcattgcctgtactacagtattttttgccaacctcaggcatactcgttacatctgtattgaactttcggccctagaaaccagtggagttatttcaccacaaatcaacaatgtgcctgaggtgcatgggaaatatagttagctatactctgaaaatacattatgttttttttctttaaacaaaacacacaacatgtaagcatgtaagagtaaagaattgtatgatatgttccttttttcagttcaccaagttggaagccttttgcagctctgtggcttggaatttcatttgagcaatttctataggatatgtatttattattgattgttatttaatttttttccaattttacctgtattaccaaactgggttctccaataatgtccaaattgtaatgttgccttgcttcaagataaagtgtatttgggaataatattataaacccttacaaattttatgcatgtatctactgcatccttcaactctcactagaaaatcttttgaaaccaaatggattaatttatggctatttataatttgctttgacatctcactgttggaaattttttaaagatgagatttgcctttataatgtaaattgtgatttttgttttacatgtgggtttctatagttttaattttttcagcttttaagatacgagttttgtgtaatttggtatttttaatcatttatgttattttaaaagctcagaatatcacattgaaattactataaatacatttaaaattatctattttagatctaaggaaatactacagagatattttcatgggttcagtaacttttcattttataacattgggcacggtacagagtgattgtcacataaggtacttgaagatttattagtttaattctatttttacagtaaccttgaattcttctgagttttgcatgtattaaattcaattaatgctgaacatgaagagtaaagtatttatctgaaagaagtttctgggttaggagaagtaatgaatgtatccatttgtacatggtttacatgttgtggatgctttgtaaacattttcctgtatgtttaaattgtgtttcagcaggatgtaattgcccttgtgtgtagttaaaatgagtcatcatctggtcctttgtgaaatggaattcatggtattttctgtaacgttttcctgaagctgtttctggagagccacacatttaaatacagacagctttcctgatcatttgatttattgtgcacctgatttttggtctaaaaggaattattgccacaatatattttatttattctttagattttagccttgtaagttaaagtgctttacatgatgatgtgaaaagctgtttgtccctttactgggtttggggggttgttaaaagatagggaatgaagaatgcaaaatggtttatcgttcaaactgtccactctgatccaaccctgtactgatagtacttcccagtatgatattgtgatgtttcatacaatgcagtgaacataaccaacttgttacctaaataaagaattgataaaaacagtgtgacatattaaaaaa

SEQ ID NO: 456270 - DNA, 3315 bp, Homo sapiens
aggcggggcaccctgaggggcggggaaggactagggtgcggggagggggttgcaaaaggagccgagcggcttctgctcaatggcggaaaagccgccggtgctctgacggcctcgttcccctagcagttgcgggggagtttcctgccggcgcggctggagtctctgattctcagggttcggtggttggaagatgctccagagagacgaggctgcggcggaggaggtggcggcggccgaatcggcaacggcgctagggtggagagaaggcggcagcggcggcggcggcggcgtgaggggccgggcggtgtaaacagccccggaggcggcggaggcggcggtcgagaccccgagggggaagcggcggctgagtcagggtcgcgcctccgttggaaacttgggctgagtaccgcggcgggcgcgagcgaggcgccctagacatcttctccctcccttgcctcagatttattgctaaacatgggtgcatttttggataaaccccagcatgcaaggatggagagtggaaatggaagatgcacacacagctgttgtaggtattcctcacggcttggaagactggtcattttttgcagtttatgatggtcatgctggatcccgagtggcaaattactgctcaacacatttattagaacacatcactactaacgaagactttagggcagctggaaaatcaggatctgctcttgagctttcagtggaaaatgttaagaatggtatcagaactggatttttgaaaattgatgaatacatgcgtaacttttcagacctcagaaacgggatggacaggagtggttcaactgcagtgggagttatgatttcacctaagcatatctactttatcaactgtggtgattcacgtgctgttctgtataggaatggacaagtctgcttttctacccaggatcacaaaccttgcaatccaagggaaaaggagcgaatccaaaatgcaggaggcagcgtgatgatacaacgtgttaatggttcattagcagtatctcgtgctctgggggactatgattacaagtgtgttgatggcaagggcccaacagaacaacttgtttctccagagcctgaggtttatgaaattttaagagcagaagaggatgaatttatcatcttggcttgtgatgggatctgggatgttatgagtaatgaggagctctgtgaatatgttaaatctaggcttgaggtatctgatgacctggaaaatgtgtgcaattgggtagtggacacttgtttacacaagggaagtcgagataacatgagtattgtactagtttgcttttcaaatgctcccaaggtctcagatgaagcggtgaaaaaagattcagagttggataagcacttggaatcacgggttgaagagattatggagaagtctggcgaggaaggaatgcctgatcttgcccatgtcatgcgcatcttgtctgcagaaaatatcccaaatttgcctcctgggggaggtcttgctggcaagcgtaatgttattgaagctgtttatagtagactgaatccacatagagaaagtgatgggggtgctggagatctagaagacccatggtagccttaaaaaccttctaaaatgcttttgattctgaaaattgggggaaaaaacttttaatcacaattttcttcaatacaaggggaaaatattcttgcggattcccaacgttttgtgatatgagcagaaaatcattagcatttcccatcatttgttcatatttgtgttttctgacagttgccacttgtagcattgcctgtactacagtattttttgccaacctcaggcatactcgttacatctgtattgaactttcggccctagaaaccagtggagttatttcaccacaaatcaacaatgtgcctgaggtgcatgggaaatatagttagctatactctgaaaatacattatgttttttttctttaaacaaaacacacaacatgtaagcatgtaagagtaaagaattgtatgatatgttccttttttcagttcaccaagttggaagccttttgcagctctgtggcttggaatttcatttgagcaatttctataggatatgtatttattattgattgttatttaatttttttccaattttacctgtattaccaaactgggttctccaataatgtccaaattgtaatgttgccttgcttcaagataaagtgtatttgggaataatattataaacccttacaaattttatgcatgtatctactgcatccttcaactctcactagaaaatcttttgaaaccaaatggattaatttatggctatttataatttgctttgacatctcactgttggaaattttttaaagatgagatttgcctttataatgtaaattgtgatttttgttttacatgtgggtttctatagttttaattttttcagcttttaagatacgagttttgtgtaatttggtatttttaatcatttatgttattttaaaagctcagaatatcacattgaaattactataaatacatttaaaattatctattttagatctaaggaaatactacagagatattttcatgggttcagtaacttttcattttataacattgggcacggtacagagtgattgtcacataaggtacttgaagatttattagtttaattctatttttacagtaaccttgaattcttctgagttttgcatgtattaaattcaattaatgctgaacatgaagagtaaagtatttatctgaaagaagtttctgggttaggagaagtaatgaatgtatccatttgtacatggtttacatgttgtggatgctttgtaaacattttcctgtatgtttaaattgtgtttcagcaggatgtaattgcccttgtgtgtagttaaaatgagtcatcatctggtcctttgtgaaatggaattcatggtattttctgtaacgttttcctgaagctgtttctggagagccacacatttaaatacagacagctttcctgatcatttgatttattgtgcacctgatttttggtctaaaaggaattattgccacaatatattttatttattctttagattttagccttgtaagttaaagtgctttacatgatgatgtgaaaagctgtttgtccctttactgggtttggggggttgttaaaagatagggaatgaagaatgcaaaatggtttatcgttcaaactgtccactctgatccaaccctgtactgatagtacttcccagtatgatattgtgatgtttcatacaatgcagtgaacataaccaacttgttacctaaataaagaattgataaaaacagtgtgacatattaaaaaa

SEQ ID NO: 456271 - DNA, 2444 bp, Homo sapiens
aggcggggcaccctgaggggcggggaaggactagggtgcggggagggggttgcaaaaggagccgagcggcttctgctcaatggcggaaaagccgccggtgctctgacggcctcgttcccctagcagttgcgggggagtttcctgccggcgcggctggagtctctgattctcagggttcggtggttggaagatgctccagagagacgaggctgcggcggaggaggtggcggcggccgaatcggcaacggcgctagggtggagagaaggcggcagcggcggcggcggcggcgtgaggggccgggcggtgtaaacagccccggaggcggcggaggcggcggtcgagaccccgagggggaagcggcggctgagtcagggtcgcgcctccgttggaaacttgggctgagtaccgcggcgggcgcgagcgaggcgccctagacatcttctccctcccttgcctcagatttattgctaaacatgggtgcatttttggataaacccaaaactgaaaaacataatgctcatggtgctgggaatggtttacgttatggcctgagcagcatgcaaggatggagagtggaaatggaagatgcacacacagctgttgtaggtattcctcacggcttggaagactggtcattttttgcagtttatgatggtcatgctggatcccgagtggcaaattactgctcaacacatttattagaacacatcactactaacgaagactttagggcagctggaaaatcaggatctgctcttgagctttcagtggaaaatgttaagaatggtatcagaactggatttttgaaaattgatgaatacatgcgtaacttttcagacctcagaaacgggatggacaggagtggttcaactgcagtgggagttatgatttcacctaagcatatctactttatcaactgtggtgattcacgtgctgttctgtataggaatggacaagtctgcttttctacccaggatcacaaaccttgcaatccaagggaaaaggagcgaatccaaaatgcaggaggcagcgtgatgatacaacgtgttaatggttcattagcagtatctcgtgctctgggggactatgattacaagtgtgttgatggcaagggcccaacagaacaacttgtttctccagagcctgaggtttatgaaattttaagagcagaagaggatgaatttatcatcttggcttgtgatgggatctgggatgttatgagtaatgaggagctctgtgaatatgttaaatctaggcttgaggtatctgatgacctggaaaatgtgtgcaattgggtagtggacacttgtttacacaagggaagtcgagataacatgagtattgtactagtttgcttttcaaatgctcccaaggtctcagatgaagcggtgaaaaaagattcagagttggataagcacttggaatcacgggttgaagagattatggagaagtctggcgaggaaggaatgcctgatcttgcccatgtcatgcgcatcttgtctgcagaaaatatcccaaatttgcctcctgggggaggtcttgctggcaagcgtaatgttattgaagctgtttatagtagactgaatccacatagagaaagtgatgggggtgctggagatctagaagacccatggtagccttaaaaaccttctaaaatgcttttgattctgaaaattgggggaaaaaacttttaatcacaattttcttcaatacaaggggaaaatattcttgcggattcccaacgttttgtgatatgagcagaaaatcattagcatttcccatcatttgttcatatttgtgttttctgacagttgccacttgtagcattgcctgtactacagtattttttgccaacctcaggcatactcgttacatctgtattgaactttcggccctagaaaccagtggagttatttcaccacaaatcaacaatgtgcctgaggtgcatgggaaatatagttagctatactctgaaaatacattatgttttttttctttaaacaaaacacacaacatgtaagcatgtaagagtaaagaattgtatgatatgttccttttttcagttcaccaagttggaagccttttgcagctctgtggcttggaatttcatttgagcaatttctataggatatgtatttattattgattgttatttaatttttttccaattttacctgtattaccaaactgggttctccaataatgtccaaattgtaatgttgccttgcttcaagataaagtgtatttgggaataatattataaacccttacaaattttatgcatgtatctactgcatccttcaactctcactagaaaatcttttgaaacaatttctaaagggagggctagccttatatctgacactgtgcttttgtgtttacctctggctttctaacggctccacgctttcaggcctcaagatagaagctgtagtttattgta

SEQ ID NO: 456272 - DNA, 1632 bp, Homo sapiens
aggcggggcaccctgaggggcggggaaggactagggtgcggggagggggttgcaaaaggagccgagcggcttctgctcaatggcggaaaagccgccggtgctctgacggcctcgttcccctagcagttgcgggggagtttcctgccggcgcggctggagtctctgattctcagggttcggtggttggaagatgctccagagagacgaggctgcggcggaggaggtggcggcggccgaatcggcaacggcgctagggtggagagaaggcggcagcggcggcggcggcggcgtgaggggccgggcggtgtaaacagccccggaggcggcggaggcggcggtcgagaccccgagggggaagcggcggctgagtcagggtcgcgcctccgttggaaacttgggctgagtaccgcggcgggcgcgagcgaggcgccctagacatcttctccctcccttgcctcagatttattgctaaacatgggtgcatttttggataaacccaaaactgaaaaacataatgctcatggtgctgggaatggtttacgttatggcctgagcagcatgcaaggatggagagtggaaatggaagatgcacacacagctgttgtaggtattcctcacggcttggaagactggtcattttttgcagtttatgatggtcatgctggatcccgagtggcaaattactgctcaacacatttattagaacacatcactactaacgaagactttagggcagctggaaaatcaggatctgctcttgagctttcagtggaaaatgttaagaatggtatcagaactggatttttgaaaattgatgaatacatgcgtaacttttcagacctcagaaacgggatggacaggagtggttcaactgcagtgggagttatgatttcacctaagcatatctactttatcaactgtggtgattcacgtgctgttctgtataggaatggacaagtctgcttttctacccaggatcacaaaccttgcaatccaagggaaaaggagcgaatccaaaatgcaggaggcagcgtgatgatacaacgtgttaatggttcattagcagtatctcgtgctctgggggactatgattacaagtgtgttgatggcaagggcccaacagaacaacttgtttctccagagcctgaggtttatgaaattttaagagcagaagaggatgaatttatcatcttggcttgtgatgggatctgggatgttatgagtaatgaggagctctgtgaatatgttaaatctaggcttgaggtatctgatgacctggaaaatgtgtgcaattgggtagtggacacttgtttacacaagggaagtcgagataacatgagtattgtactagtttgcttttcaaatgctcccaaggtctcagatgaagcggtgaaaaaagattcagagttggataagcacttggaatcacgggttgaagagattatggagaagtctggcgaggaaggaatgcctgatcttgcccatgtcatgcgcatcttgtctgcagaaaatatcccaaatttgcctcctgggggaggtcttgctggcaagcgtaatgttattgaagctgtttatagtagactgaatccacatagagaaagtgatggggtaagttttattttatttcataag

SEQ ID NO: 456273 - DNA, 2324 bp, Homo sapiens
gtctccccggggagggcggcgggcggcgggcggcggggaccgggtgcggtggtggctgcggcggcggcggcgggagcagcatggattggggcactgagctgtgggatcagttcgaggtgctcgagcgccacacgcagtgggggctggacctgttggacagatatgtaaagttcgtgaaagaacgcaccgaagtggaacaggcttacgccaaacaactgcggagcctggtgaaaaaatatctgcccaagagacctgccaaggatgatcctgagtccaaattcagccagcaacagtccttcgtacagattctccaggaggtgaatgactttgcaggccagcgggagctggtggctgagaacctcagtgtccgtgtatgtcttgagctgaccaagtactcacaagagatgaaacaggagaggaagatgcacttccaagaagggcggcgggcccagcagcagctggaaaatggctttaaacagctggagaatagtaagcgtaaatttgagcgggactgccgggaggcagagaaggcagcccagactgctgaacggctagaccaggatatcaacgccaccaaggctgatgtggagaaggccaagcagcaagcccaccttcggagtcacatggccgaagaaagcaaaaacgaatatgcggctcaactgcagcgcttcaaccgagaccaagcccacttctatttttcacagatgccccagatattcgataagctccaagacatggatgaacgcagggccacccgcctgggtgccgggtatgggctcctgtcggaggccgagctggaggtggtgcccataatagccaagtgcttggagggcatgaaggtggctgcaaatgctgtggatcccaagaacgactcccacgtccttatagagctgcacaagtcaggttttgcccgcccgggcgacgtggaattcgaggacttcagccagcccatgaaccgtgcaccctccgacagcagtctgggcaccccctcggatggacggcctgaactccgaggcccgggtcgcagccgcaccaagcgctggccttttggcaagaagaacaagacagtggtgaccgaggattttagccacttgcccccagagcagcagcgaaaacggcttcaacagcagttggaagaacgcagtcgtgaacttcagaaggaggttgaccagagggaagccctaaagaaaatgaaggatgtctatgagaagacacctcagatgggggaccccgccagcttggagccccagatcgctgaaaccctgagcaacattgaacggctgaaattggaagtgcagaagtatgaggcgtggctggcagaagctgaaagtcgagtccttagcaaccggggagacagcctgagccggcacgcccggcctcccgacccccccgctagcgccccgccagacagcagcagcaacagcgcatcacaggacaccaaggagagctctgaagagcctccctcagaagagagccaggacacccccatttacacggagtttgatgaggatttcgaggaggaacccacatcccccataggtcactgtgtggccatctaccactttgaagggtccagcgagggcactatctctatggccgagggtgaagacctcagtcttatggaagaagacaaaggggacggctggacccgggtcaggcggaaagagggaggcgagggctacgtgcccacctcctacctccgagtcacgctcaattgaaccctgccagagacgggaagaggggggctgtcggctgctgcttctgggccacggggagccccaggacctatgcactttatttctgaccccgtggcttcggctgagacctgtgtaacctgctgccccctccacccccaacccagtcctacctgtcacaccggacggacccgctgtgccttctaccatcgttccaccattgatgtacatactcatgttttacatcttttctttctgccgctcggctccggccattttgttttatacaaaaatgggaaaaaaaaaaaagaaattatataaagttcctagagtcggtgtcttattagaggatttaaatactgggactggaagtatctaacaccacgtttcttacaggccacacagggaatgaggaaggggaggtgatcttgggcacaccttgggtcaaccctgcccctttctggaagttggcctatgtcattgtcagtgggtgtctgcttgtgactcaggtagggagaaggataccaagtttcttttttttttctttttgagacagtctcacccagttgcccaggctggagtgcagtggcgtacgtgatctcagctcactgcagactccatctcccgagt

SEQ ID NO: 456274 - DNA, 2043 bp, Homo sapiens
gtctccccggggagggcggcgggcggcgggcggcggggaccgggtgcggtggtggctgcggcggcggcggcgggagcagcatggattggggcactgagctgtgggatcagttcgaggtgctcgagcgccacacgcagtgggggctggacctgttggacagatatgtaaagttcgtgaaagaacgcaccgaagtggaacaggcttacgccaaacaactgcggagcctggtgaaaaaatatctgcccaagagacctgccaaggatgatcctgagtccaaattcagccagcaacagtccttcgtacagattctccaggaggtgaatgactttgcaggccagcgggagctggtggctgagaacctcagtgtccgtgtatgtcttgagctgaccaagtactcacaagagatgaaacaggagaggaagatgcacttccaagaagggcggcgggcccagcagcagctggaaaatggctttaaacagctggagaatagtaagcgtaaatttgagcgggactgccgggaggcagagaaggcagcccagactgctgaacggctagaccaggatatcaacgccaccaaggctgatgtggagaaggccaagcagcaagcccaccttcggagtcacatggccgaagaaagcaaaaacgaatatgcggctcaactgcagcgcttcaaccgagaccaagcccacttctatttttcacagatgccccagatattcgataagctccaagacatggatgaacgcagggccacccgcctgggtgccgggtatgggctcctgtcggaggccgagctggaggtggtgcccataatagccaagtgcttggagggcatgaaggtggctgcaaatgctgtggatcccaagaacgactcccacgtccttatagagctgcacaagtcaggttttgcccgcccgggcgacgtggaattcgaggacttcagccagcccatgaaccgtgcaccctccgacagcagtctgggcaccccctcggatggacggcctgaactccgaggcccgggtcgcagccgcaccaagcgctggccttttggcaagaagaacaagacagtggtgaccgaggattttagccacttgcccccagagcagcagcgaaaacggcttcaacagcagttggaagaacgcagtcgtgaacttcagaaggaggttgaccagagggaagccctaaagaaaatgaaggatgtctatgagaagacacctcagatgggggaccccgccagcttggagccccagatcgctgaaaccctgagcaacattgaacggctgaaattggaagtgcagaagtatgaggcgtggctggcagaagctgaaagtcgagtccttagcaaccggggagacagcctgagccggcacgcccggcctcccgacccccccgctagcgccccgccagacagcagcagcaacagcgcatcacaggacaccaaggagagctctgaagagcctccctcagaagagagccaggacacccccatttacacggagtttgatgaggatttcgaggaggaacccacatcccccataggtcactgtgtggccatctaccactttgaagggtccagcgagggcactatctctatggccgagggtgaagacctcagtcttatggaagaagacaaaggggacggctggacccgggtcaggcggaaagagggaggcgagggctacgtgcccacctcctacctccgagtcacgctcaattgaaccctgccagagacgggaagaggggggctgtcggctgctgcttctgggccacggggagccccaggacctatgcactttatttctgaccccgtggcttcggctgagacctgtgtaacctgctgccccctccacccccaacccagtcctacctgtcacaccggacggacccgctgtgccttctaccatcgttccaccattgatgtacatactcatgttttacatcttttctttctgccgctcggctccggccattttgttttatacaaaaatgggttttttttttttctttaatatatttcaagagatttttttttttttttttttt

SEQ ID NO: 456275 - DNA, 2492 bp, Homo sapiens
gtctccccggggagggcggcgggcggcgggcggcggggaccgggtgcggtggtggctgcggcggcggcggcgggagcagcatggattggggcactgagctgtgggatcagttcgaggtgctcgagcgccacacgcagtgggggctggacctgttggacagatatgtaaagttcgtgaaagaacgcaccgaagtggaacaggcttacgccaaacaactgcggagcctggtgaaaaaatatctgcccaagagacctgccaaggatgatcctgagtccaaattcagccagcaacagtccttcgtacagattctccaggaggtgaatgactttgcaggccagcgggagctggtggctgagaacctcagtgtccgtgtatgtcttgagctgaccaagtactcacaagagatgaaacaggagaggaagatgcacttccaagaagggcggcgggcccagcagcagctggaaaatggctttaaacagctggagaatagtaagcgtaaatttgagcgggactgccgggaggcagagaaggcagcccagactgctgaacggctagaccaggatatcaacgccaccaaggctgatgtggagaaggccaagcagcaagcccaccttcggagtcacatggccgaagaaagcaaaaacgaatatgcggctcaactgcagcgcttcaaccgagaccaagcccacttctatttttcacagatgccccagatattcgataagctccaagacatggatgaacgcagggccacccgcctgggtgccgggtatgggctcctgtcggaggccgagctggaggtggtgcccataatagccaagtgcttggagggcatgaaggtggctgcaaatgctgtggatcccaagaacgactcccacgtccttatagagctgcacaagtcaggttttgcccgcccgggcgacgtggaattcgaggacttcagccagcccatgaaccgtgcaccctccgacagcagtctgggcaccccctcggatggacggcctgaactccgaggcccgggtcgcagccgcaccaagcgctggccttttggcaagaagaacaagcctcgccccccacccctctcccccctggggggccccgtaccctcggcattgcctaacggacccccgtccccccgctccggccgtgaccccttggccatactgagcgagatcagtaagtcggtcaaaccgaggctagcatccttccgcagccttcgaggcagccgtgggacagtggtgaccgaggattttagccacttgcccccagagcagcagcgaaaacggcttcaacagcagttggaagaacgcagtcgtgaacttcagaaggaggttgaccagagggaagccctaaagaaaatgaaggatgtctatgagaagacacctcagatgggggaccccgccagcttggagccccagatcgctgaaaccctgagcaacattgaacggctgaaattggaagtgcagaagtatgaggcgtggctggcagaagctgaaagtcgagtccttagcaaccggggagacagcctgagccggcacgcccggcctcccgacccccccgctagcgccccgccagacagcagcagcaacagcgcatcacaggacaccaaggagagctctgaagagcctccctcagaagagagccaggacacccccatttacacggagtttgatgaggatttcgaggaggaacccacatcccccataggtcactgtgtggccatctaccactttgaagggtccagcgagggcactatctctatggccgagggtgaagacctcagtcttatggaagaagacaaaggggacggctggacccgggtcaggcggaaagagggaggcgagggctacgtgcccacctcctacctccgagtcacgctcaattgaaccctgccagagacgggaagaggggggctgtcggctgctgcttctgggccacggggagccccaggacctatgcactttatttctgaccccgtggcttcggctgagacctgtgtaacctgctgccccctccacccccaacccagtcctacctgtcacaccggacggacccgctgtgccttctaccatcgttccaccattgatgtacatactcatgttttacatcttttctttctgccgctcggctccggccattttgttttatacaaaaatgggaaaaaaaaaaaagaaattatataaagttcctagagtcggtgtcttattagaggatttaaatactgggactggaagtatctaacaccacgtttcttacaggccacacagggaatgaggaaggggaggtgatcttgggcacaccttgggtcaaccctgcccctttctggaagttggcctatgtcattgtcagtgggtgtctgcttgtgactcaggtagggagaaggataccaagtttcttttttttttctttttgagacagtctcacccagttgcccaggctggagtgcagtggcgtacgtgatctcagctcactgcagactccatctcccgagt

SEQ ID NO: 456276 - DNA, 2394 bp, Homo sapiens
ggtcggcgggctgtggggtcccaaaatcgtgaccccggcccctctcccctcctcccccaccatgtcccatgtcaggatcagttcgaggtgctcgagcgccacacgcagtgggggctggacctgttggacagatatgtaaagttcgtgaaagaacgcaccgaagtggaacaggcttacgccaaacaactgcggtgagaccctggggtggacgctacggaggacgcgcctggggcgacggggagcggtgggagggctgcgggctcagccctcctacctctgtctccccttaggagcctggtgaaaaaatatctgcccaagagacctgccaaggatgatcctgagtccaaattcagccagcaacagtccttcgtacagattctccaggaggtgaatgactttgcaggccagcgggagctggtggctgagaacctcagtgtccgtgtatgtcttgagctgaccaagtactcacaagagatgaaacaggagaggaagatgcacttccaagaagggcggcgggcccagcagcagctggaaaatggctttaaacagctggagaatagtaagcgtaaatttgagcgggactgccgggaggcagagaaggcagcccagactgctgaacggctagaccaggatatcaacgccaccaaggctgatgtggagaaggccaagcagcaagcccaccttcggagtcacatggccgaagaaagcaaaaacgaatatgcggctcaactgcagcgcttcaaccgagaccaagcccacttctatttttcacagatgccccagatattcgataagctccaagacatggatgaacgcagggccacccgcctgggtgccgggtatgggctcctgtcggaggccgagctggaggtggtgcccataatagccaagtgcttggagggcatgaaggtggctgcaaatgctgtggatcccaagaacgactcccacgtccttatagagctgcacaagtcaggttttgcccgcccgggcgacgtggaattcgaggacttcagccagcccatgaaccgtgcaccctccgacagcagtctgggcaccccctcggatggacggcctgaactccgaggcccgggtcgcagccgcaccaagcgctggccttttggcaagaagaacaagacagtggtgaccgaggattttagccacttgcccccagagcagcagcgaaaacggcttcaacagcagttggaagaacgcagtcgtgaacttcagaaggaggttgaccagagggaagccctaaagaaaatgaaggatgtctatgagaagacacctcagatgggggaccccgccagcttggagccccagatcgctgaaaccctgagcaacattgaacggctgaaattggaagtgcagaagtatgaggcgtggctggcagaagctgaaagtcgagtccttagcaaccggggagacagcctgagccggcacgcccggcctcccgacccccccgctagcgccccgccagacagcagcagcaacagcgcatcacaggacaccaaggagagctctgaagagcctccctcagaagagagccaggacacccccatttacacggagtttgatgaggatttcgaggaggaacccacatcccccataggtcactgtgtggccatctaccactttgaagggtccagcgagggcactatctctatggccgagggtgaagacctcagtcttatggaagaagacaaaggggacggctggacccgggtcaggcggaaagagggaggcgagggctacgtgcccacctcctacctccgagtcacgctcaattgaaccctgccagagacgggaagaggggggctgtcggctgctgcttctgggccacggggagccccaggacctatgcactttatttctgaccccgtggcttcggctgagacctgtgtaacctgctgccccctccacccccaacccagtcctacctgtcacaccggacggacccgctgtgccttctaccatcgttccaccattgatgtacatactcatgttttacatcttttctttctgccgctcggctccggccattttgttttatacaaaaatgggaaaaaaaaaaaagaaattatataaagttcctagagtcggtgtcttattagaggatttaaatactgggactggaagtatctaacaccacgtttcttacaggccacacagggaatgaggaaggggaggtgatcttgggcacaccttgggtcaaccctgcccctttctggaagttggcctatgtcattgtcagtgggtgtctgcttgtgactcaggtagggagaaggataccaagtttcttttttttttctttttgagacagtctcacccagttgcccaggctggagtgcagtggcgtacgtgatctcagctcactgcagactccatctcccgagt

SEQ ID NO: 456277 - DNA, 2561 bp, Homo sapiens
gtctccccggggagggcggcgggcggcgggcggcggggaccgggtgcggtggtggctgcggcggcggcggcgggagcagcatggattggggcactgagctgtgggatcagttcgaggtgctcgagcgccacacgcagtgggggctggacctgttggacagatatgtaaagttcgtgaaagaacgcaccgaagtggaacaggcttacgccaaacaactgcggagcctggtgaaaaaatatctgcccaagagacctgccaaggatgatcctgagtccaaattcagccagcaacagtccttcgtacagattctccaggaggtgaatgactttgcaggccagcgggagctggtggctgagaacctcagtgtccgtgtatgtcttgagctgaccaagtactcacaagagatgaaacaggagaggaagatgcacttccaagaagggcggcgggcccagcagcagctggaaaatggctttaaacagctggagaatgtgagtttgcagaggtagcagtgactgtggcccggaggcatgggggcagggttgcggatccggagtcagggagctgccctctttgtcagacctggaccttccctcccccataggcttccagtactcccttgacccctacttactggatgacatcccaataatccctgaaaccttggtttcccaccctgctgtctttgggatggtggctccctcactccggttctgtcccctacacagagtaagcgtaaatttgagcgggactgccgggaggcagagaaggcagcccagactgctgaacggctagaccaggatatcaacgccaccaaggctgatgtggagaaggccaagcagcaagcccaccttcggagtcacatggccgaagaaagcaaaaacgaatatgcggctcaactgcagcgcttcaaccgagaccaagcccacttctatttttcacagatgccccagatattcgataagctccaagacatggatgaacgcagggccacccgcctgggtgccgggtatgggctcctgtcggaggccgagctggaggtggtgcccataatagccaagtgcttggagggcatgaaggtggctgcaaatgctgtggatcccaagaacgactcccacgtccttatagagctgcacaagtcaggttttgcccgcccgggcgacgtggaattcgaggacttcagccagcccatgaaccgtgcaccctccgacagcagtctgggcaccccctcggatggacggcctgaactccgaggcccgggtcgcagccgcaccaagcgctggccttttggcaagaagaacaagacagtggtgaccgaggattttagccacttgcccccagagcagcagcgaaaacggcttcaacagcagttggaagaacgcagtcgtgaacttcagaaggaggttgaccagagggaagccctaaagaaaatgaaggatgtctatgagaagacacctcagatgggggaccccgccagcttggagccccagatcgctgaaaccctgagcaacattgaacggctgaaattggaagtgcagaagtatgaggcgtggctggcagaagctgaaagtcgagtccttagcaaccggggagacagcctgagccggcacgcccggcctcccgacccccccgctagcgccccgccagacagcagcagcaacagcgcatcacaggacaccaaggagagctctgaagagcctccctcagaagagagccaggacacccccatttacacggagtttgatgaggatttcgaggaggaacccacatcccccataggtcactgtgtggccatctaccactttgaagggtccagcgagggcactatctctatggccgagggtgaagacctcagtcttatggaagaagacaaaggggacggctggacccgggtcaggcggaaagagggaggcgagggctacgtgcccacctcctacctccgagtcacgctcaattgaaccctgccagagacgggaagaggggggctgtcggctgctgcttctgggccacggggagccccaggacctatgcactttatttctgaccccgtggcttcggctgagacctgtgtaacctgctgccccctccacccccaacccagtcctacctgtcacaccggacggacccgctgtgccttctaccatcgttccaccattgatgtacatactcatgttttacatcttttctttctgccgctcggctccggccattttgttttatacaaaaatgggaaaaaaaaaaaagaaattatataaagttcctagagtcggtgtcttattagaggatttaaatactgggactggaagtatctaacaccacgtttcttacaggccacacagggaatgaggaaggggaggtgatcttgggcacaccttgggtcaaccctgcccctttctggaagttggcctatgtcattgtcagtgggtgtctgcttgtgactcaggtagggagaaggataccaagtttcttttttttttctttttgagacagtctcacccagttgcccaggctggagtgcagtggcgtacgtgatctcagctcactgcagactccatctcccgagt

SEQ ID NO: 456278 - DNA, 2370 bp, Homo sapiens
gtctccccggggagggcggcgggcggcgggcggcggggaccgggtgcggtggtggctgcggcggcggcggcgggagcagcatggattggggcactgagctgtgggatcagttcgaggtgctcgagcgccacacgcagtgggggctggacctgttggacagatatgtaaagttcgtgaaagaacgcaccgaagtggaacaggcttacgccaaacaactgcggagcctggtgaaaaaatatctgcccaagagacctgccaaggatgatcctgagtccaaattcagccagcaacagtccttcgtacagattctccaggaggtgaatgactttgcaggccagcgggagctggtggctgagaacctcagtgtccgtgtatgtcttgagctgaccaagtactcacaagagatgaaacaggagaggaagatgcacttccaagaagggcggcgggcccagcagcagctggaaaatggctttaaacagctggagaatagtaagcgtaaatttgagcgggactgccgggaggcagagaaggcagcccagactgctgaacggctagaccaggatatcaacgccaccaaggctgatgtggagaaggccaagcagcaagcccaccttcggagtcacatggccgaagaaagcaaaaacgaatatgcggctcaactgcagcgcttcaaccgagaccaagcccacttctatttttcacagatgccccagatattcgataagctccaagacatggatgaacgcagggccacccgcctgggtgccgggtatgggctcctgtcggaggccgagctggaggtggtgcccataatagccaagtgcttggagggcatgaaggtggctgcaaatgctgtggatcccaagaacgactcccacgtccttatagagctgcacaagtcaggttttgcccgcccgggcgacgtggaattcgaggacttcagccagcccatgaaccgtgcaccctccgacagcagtctgggcaccccctcggatggacggcctgaactccgaggcccgggtcgcagccgcaccaagcgctggccttttggcaagaagaacaagacagtggtgaccgaggattttagccacttgcccccagagcagcagcgaaaacggcttcaacagcagttggaagaacgcagtcgtgaacttcagaaggaggttgaccagagggaagccctaaagaaaatgaaggatgtctatgagaagacacctcagatgggggaccccgccagcttggagccccagatcgctgaaaccctgagcaacattgaacggctgaaattggaagtgcagaagtatgaggcgtggctggcagaagctgaaagtcgagtccttagcaaccggggagacagcctgagccggcacgcccggcctcccgacccccccgctagcgccccgccagacagcagcagcaacagcgcatcacaggacaccaaggagagctctgaagagcctccctcagaagagagccaggacacccccatttacacggagtttgatgaggatttcgaggaggaacccacatcccccataggtcactgtgtggccatctaccactttgaaggtccagcgaagagggggggggggggggccccaaaccctttaatttcggtccagcgagggcactatctctatggccgagggtgaagacctcagtcttatggaagaagacaaaggggacggctggacccgggtcaggcggaaagagggaggcgagggctacgtgcccacctcctacctccgagtcacgctcaattgaaccctgccagagacgggaagaggggggctgtcggctgctgcttctgggccacggggagccccaggacctatgcactttatttctgaccccgtggcttcggctgagacctgtgtaacctgctgccccctccacccccaacccagtcctacctgtcacaccggacggacccgctgtgccttctaccatcgttccaccattgatgtacatactcatgttttacatcttttctttctgccgctcggctccggccattttgttttatacaaaaatgggaaaaaaaaaaaagaaattatataaagttcctagagtcggtgtcttattagaggatttaaatactgggactggaagtatctaacaccacgtttcttacaggccacacagggaatgaggaaggggaggtgatcttgggcacaccttgggtcaaccctgcccctttctggaagttggcctatgtcattgtcagtgggtgtctgcttgtgactcaggtagggagaaggataccaagtttcttttttttttctttttgagacagtctcacccagttgcccaggctggagtgcagtggcgtacgtgatctcagctcactgcagactccatctcccgagt

SEQ ID NO: 456279 - DNA, 954 bp, Homo sapiens
aaacatcctatcatctgtaggctcattcatttctctaacagcagcagcaacagcgcatcacaggacaccaaggagagctctgaagagcctccctcagaagagagccaggacacccccatttacacggagtttgatgaggatttcgaggaggaacccacatcccccataggtcactgtgtggccatctaccactttgaagggtccagcgagggcactatctctatggccgagggtgaagacctcagtcttatggaagaagacaaaggggacggctggacccgggtcaggcggaaagagggaggcgagggctacgtgcccacctcctacctccgagtcacgctcaattgaaccctgccagagacgggaagaggggggctgtcggctgctgcttctgggccacggggagccccaggacctatgcactttatttctgaccccgtggcttcggctgagacctgtgtaacctgctgccccctccacccccaacccagtcctacctgtcacaccggacggacccgctgtgccttctaccatcgttccaccattgatgtacatactcatgttttacatcttttctttctgccgctcggctccggccattttgttttatacaaaaatgggaaaaaaaaaaaagaaattatataaagttcctagagtcggtgtcttattagaggatttaaatactgggactggaagtatctaacaccacgtttcttacaggccacacagggaatgaggaaggggaggtgatcttgggcacaccttgggtcaaccctgcccctttctggaagttggcctatgtcattgtcagtgggtgtctgcttgtgactcaggtagggagaaggataccaagtttcttttttttttctttttgagacagtctcacccagttgcccaggctggagtgcagtggcgtacgtgatctcagctcactgcagactccatctcccgagt

SEQ ID NO: 456280 - DNA, 1322 bp, Homo sapiens
gtctccccggggagggcggcgggcggcgggcggcggggaccgggtgcggtggtggctgcggcggcggcggcgggagcagcatggattggggcactgagctgtgggatcagttcgaggtgctcgagcgccacacgcagtgggggctggacctgttggacagatatgtaaagttcgtgaaagaacgcaccgaagtggaacaggcttacgccaaacaactgcggagcctggtgaaaaaatatctgcccaagagacctgccaaggatgatcctgagtccaaattcagccagcaacagtccttcgtacagattctccaggaggtgaatgactttgcaggccagcgggagctggtggctgagaacctcagtgtccgtgtatgtcttgagctgaccaagtactcacaagagatgaaacaggagaggaagatgcacttccaagaagggcggcgggcccagcagcagctggaaaatggctttaaacagctggagaatagtaagcgtaaatttgagcgggactgccgggaggcagagaaggcagcccagactgctgaacggctagaccaggatatcaacgccaccaaggctgatgtggagaaggccaagcagcaagcccaccttcggagtcacatggccgaagaaagcaaaaacgaatatgcggctcaactgcagcgcttcaaccgagaccaagcccacttctatttttcacagatgccccagatattcgataagctccaagacatggatgaacgcagggccacccgcctgggtgccgggtatgggctcctgtcggaggccgagctggaggtggtgcccataatagccaagtgcttggagggcatgaaggtggctgcaaatgctgtggatcccaagaacgactcccacgtccttatagagctgcacaagtcaggttttgcccgcccgggcgacgtggaattcgaggacttcagccagcccatgaaccgtgcaccctccgacagcagtctgggcaccccctcggatggacggcctgaactccgaggcccgggtcgcagccgcaccaagcgctggccttttggcaagaagaacaagcctcggccccccaaaccctctccccccgtcaaaacacagccaactgcgccactgccacccacaacgacacccaagaacacacacactaccacatccgcagaaaaccgtagaccacagagcaacaacaggaagggcacacgggacccagacaaggactgcaagaaccaaccagaaagaaataggcaccactctcaagccgaacttgcacactagacaccatcgagacaccgggaccaggcccgcacacgcaacacgcgg

SEQ ID NO: 456281 - DNA, 1015 bp, Homo sapiens
gtctccccggggagggcggcgggcggcgggcggcggggaccgggtgcggtggtggctgcggcggcggcggcgggagcagcatggattggggcactgagctgtgggatcagttcgaggtgctcgagcgccacacgcagtgggggctggacctgttggacagatatgtaaagttcgtgaaagaacgcaccgaagtggaacaggcttacgccaaacaactgcggagcctggtgaaaaaatatctgcccaagagacctgccaaggatgatcctgagtccaaattcagccagcaacagtccttcgtacagattctccaggaggtgaatgactttgcaggccagcgggagctggtggctgagaacctcagtgtccgtgtatgtcttgagctgaccaagtactcacaagagatgaaacaggagaggaagatgcacttccaagaagggcggcgggcccagcagcagctggaaaatggctttaaacagctggagaatgtgagtttgcagaggtagcagtgactgtggcccggaggcatgggggcagggttgcggatccggagtcagggagctgccctctttgtcagacctggaccttccctcccccataggcttccagtactcccttgacccctacttactggatgacatcccaataatccctgaaaccttggtttcccaccctgctgtctttgggatggtggctccctcactccggttctgtcccctacacagagtaagcgtaaatttgagcgggactgccgggaggcagagaaggcagcccagactgctgaacggctagaccaggatatcaacgccaccaaggctgatgtggagaaggccaagcagcaagcccaccttcggagtcacatggccgaagaaagcaaaaacgaatatgcggctcaactgcagcgcttcaaccgagaccaagcccacttctatttttcacagatgccccagatattcgatgtgagtgctcccagttctcagacctaccttcgctcgaagcctacaaatgctacccg

SEQ ID NO: 456282 - DNA, 463 bp, Homo sapiens
ggtcggcgggctgtggggtcccaaaatcgtgaccccggcccctctcccctcctcccccaccatgtcccatgtcaggatcagttcgaggtgctcgagcgccacacgcagtgggggctggacctgttggacagatatgtaaagttcgtgaaagaacgcaccgaagtggaacaggcttacgccaaacaactgcggagcctggtgaaaaaatatctgcccaagagacctgccaaggatgatcctgagtccaaattcagccagcaacagtccttcgtacagattctccaggaggtgaatgactttgcaggccagcgggagctggtggctgagaacctcagtgtccgtgtatgtcttgagctgaccaagtactcacaagagaattgcttgaactcgggaggcagaggtttcagtgagttgcaccccagcctgggcaacaagagtgaaactccatctcaaaaaaaaaaaa

SEQ ID NO: 456283 - DNA, 2295 bp, Homo sapiens
ggtcggcgggctgtggggtcccaaaatcgtgaccccggcccctctcccctcctcccccaccatgtcccatgtcaggatcagttcgaggtgctcgagcgccacacgcagtgggggctggacctgttggacagatatgtaaagttcgtgaaagaacgcaccgaagtggaacaggcttacgccaaacaactgcggagcctggtgaaaaaatatctgcccaagagacctgccaaggatgatcctgagtccaaattcagccagcaacagtccttcgtacagattctccaggaggtgaatgactttgcaggccagcgggagctggtggctgagaacctcagtgtccgtgtatgtcttgagctgaccaagtactcacaagagatgaaacaggagaggaagatgcacttccaagaagggcggcgggcccagcagcagctggaaaatggctttaaacagctggagaatagtaagcgtaaatttgagcgggactgccgggaggcagagaaggcagcccagactgctgaacggctagaccaggatatcaacgccaccaaggctgatgtggagaaggccaagcagcaagcccaccttcggagtcacatggccgaagaaagcaaaaacgaatatgcggctcaactgcagcgcttcaaccgagaccaagcccacttctatttttcacagatgccccagatattcgataagctccaagacatggatgaacgcagggccacccgcctgggtgccgggtatgggctcctgtcggaggccgagctggaggtggtgcccataatagccaagtgcttggagggcatgaaggtggctgcaaatgctgtggatcccaagaacgactcccacgtccttatagagctgcacaagtcaggttttgcccgcccgggcgacgtggaattcgaggacttcagccagcccatgaaccgtgcaccctccgacagcagtctgggcaccccctcggatggacggcctgaactccgaggcccgggtcgcagccgcaccaagcgctggccttttggcaagaagaacaagacagtggtgaccgaggattttagccacttgcccccagagcagcagcgaaaacggcttcaacagcagttggaagaacgcagtcgtgaacttcagaaggaggttgaccagagggaagccctaaagaaaatgaaggatgtctatgagaagacacctcagatgggggaccccgccagcttggagccccagatcgctgaaaccctgagcaacattgaacggctgaaattggaagtgcagaagtatgaggcgtggctggcagaagctgaaagtcgagtccttagcaaccggggagacagcctgagccggcacgcccggcctcccgacccccccgctagcgccccgccagacagcagcagcaacagcgcatcacaggacaccaaggagagctctgaagagcctccctcagaagagagccaggacacccccatttacacggagtttgatgaggatttcgaggaggaacccacatcccccataggtcactgtgtggccatctaccactttgaagggtccagcgagggcactatctctatggccgagggtgaagacctcagtcttatggaagaagacaaaggggacggctggacccgggtcaggcggaaagagggaggcgagggctacgtgcccacctcctacctccgagtcacgctcaattgaaccctgccagagacgggaagaggggggctgtcggctgctgcttctgggccacggggagccccaggacctatgcactttatttctgaccccgtggcttcggctgagacctgtgtaacctgctgccccctccacccccaacccagtcctacctgtcacaccggacggacccgctgtgccttctaccatcgttccaccattgatgtacatactcatgttttacatcttttctttctgccgctcggctccggccattttgttttatacaaaaatgggaaaaaaaaaaaagaaattatataaagttcctagagtcggtgtcttattagaggatttaaatactgggactggaagtatctaacaccacgtttcttacaggccacacagggaatgaggaaggggaggtgatcttgggcacaccttgggtcaaccctgcccctttctggaagttggcctatgtcattgtcagtgggtgtctgcttgtgactcaggtagggagaaggataccaagtttcttttttttttctttttgagacagtctcacccagttgcccaggctggagtgcagtggcgtacgtgatctcagctcactgcagactccatctcccgagt

SEQ ID NO: 456284 - DNA, 2355 bp, Homo sapiens
gtctccccggggagggcggcgggcggcgggcggcggggaccgggtgcggtggtggctgcggcggcggcggcgggagcagcatggattggggcactgagctgtgggatcagttcgaggtgctcgagcgccacacgcagtgggggctggacctgttggacagatatgtaaagttcgtgaaagaacgcaccgaagtggaacaggcttacgccaaacaactgcggagcctggtgaaaaaatatctgcccaagagacctgccaaggatgatcctgagtccaaattcagccagcaacagtccttcgtacagattctccaggaggtgaatgactttgcaggccagcgggagctggtggctgagaacctcagtgtccgtgtatgtcttgagctgaccaagtactcacaagagatgaaacaggagaggaagatgcacttccaagaagggcggcgggcccagcagcagctggaaaatggctttaaacagctggagaatagtaagcgtaaatttgagcgggactgccgggaggcagagaaggcagcccagactgctgaacggctagaccaggatatcaacgccaccaaggctgatgtggagaaggccaagcagcaagcccaccttcggagtcacatggccgaagaaagcaaaaacgaatatgcggctcaactgcagcgcttcaaccgagaccaagcccacttctatttttcacagatgccccagatattcgataagctccaagacatggatgaacgcagggccacccgcctgggtgccgggtatgggctcctgtcggaggccgagctggaggtggtgcccataatagccaagtgcttggagggcatgaaggtggctgcaaatgctgtggatcccaagaacgactcccacgtccttatagagctgcacaagtcaggttttgcccgcccgggcgacgtggaattcgaggacttcagccagcccatgaaccgtgcaccctccgacagcagtctgggcaccccctcggatggacggcctgaactccgaggcccgggtcgcagccgcaccaagcgctggccttttggcaagaagaacaagacagtggtgaccgaggattttagccacttgcccccagagcagcagcgaaaacggcttcaacagcagttggaagaacgcagtcgtgaacttcagaaggaggttgaccagagggaagccctaaagaaaatgaaggatgtctatgagaagacacctcagatgggggaccccgccagcttggagccccagatcgctgaaaccctgagcaacattgaacggctgaaattggaagtgcagaagtatgaggcgtggctggcagaagctgaaagtcgagtccttagcaaccggggagacagcctgagccggcacgcccggcctcccgacccccccgctagcgccccgccagacagcagcagcaacagcgcatcacaggacaccaaggagagctctgaagagcctccctcagaagagagccaggacacccccatttacacggagtttgatgaggatttcgaggaggaacccacatcccccataggtcactgtgtggccatctaccactttgaagatctgggcccacccccacccccatcacagggggtccagcgagggcactatctctatggccgagggtgaagacctcagtcttatggaagaagacaaaggggacggctggacccgggtcaggcggaaagagggaggcgagggctacgtgcccacctcctacctccgagtcacgctcaattgaaccctgccagagacgggaagaggggggctgtcggctgctgcttctgggccacggggagccccaggacctatgcactttatttctgaccccgtggcttcggctgagacctgtgtaacctgctgccccctccacccccaacccagtcctacctgtcacaccggacggacccgctgtgccttctaccatcgttccaccattgatgtacatactcatgttttacatcttttctttctgccgctcggctccggccattttgttttatacaaaaatgggaaaaaaaaaaaagaaattatataaagttcctagagtcggtgtcttattagaggatttaaatactgggactggaagtatctaacaccacgtttcttacaggccacacagggaatgaggaaggggaggtgatcttgggcacaccttgggtcaaccctgcccctttctggaagttggcctatgtcattgtcagtgggtgtctgcttgtgactcaggtagggagaaggataccaagtttcttttttttttctttttgagacagtctcacccagttgcccaggctggagtgcagtggcgtacgtgatctcagctcactgcagactccatctcccgagt

SEQ ID NO: 456285 - DNA, 1332 bp, Homo sapiens
atctcagacgggtgcagagtctggcaggctagactccttgatcccaaattcagccctctacccaccttgcagacagtggtgaccgaggattttagccacttgcccccagagcagcagcgaaaacggcttcaacagcagttggaagaacgcagtcgtgaacttcagaaggaggttgaccagagggaagccctaaagaaaatgaaggatgtctatgagaagacacctcagatgggggaccccgccagcttggagccccagatcgctgaaaccctgagcaacattgaacggctgaaattggaagtgcagaagtatgaggcgtggctggcagaagctgaaagtcgagtccttagcaaccggggagacagcctgagccggcacgcccggcctcccgacccccccgctagcgccccgccagacagcagcagcaacagcgcatcacaggacaccaaggagagctctgaagagcctccctcagaagagagccaggacacccccatttacacggagtttgatgaggatttcgaggaggaacccacatcccccataggtcactgtgtggccatctaccactttgaagggtccagcgagggcactatctctatggccgagggtgaagacctcagtcttatggaagaagacaaaggggacggctggacccgggtcaggcggaaagagggaggcgagggctacgtgcccacctcctacctccgagtcacgctcaattgaaccctgccagagacgggaagaggggggctgtcggctgctgcttctgggccacggggagccccaggacctatgcactttatttctgaccccgtggcttcggctgagacctgtgtaacctgctgccccctccacccccaacccagtcctacctgtcacaccggacggacccgctgtgccttctaccatcgttccaccattgatgtacatactcatgttttacatcttttctttctgccgctcggctccggccattttgttttatacaaaaatgggaaaaaaaaaaaagaaattatataaagttcctagagtcggtgtcttattagaggatttaaatactgggactggaagtatctaacaccacgtttcttacaggccacacagggaatgaggaaggggaggtgatcttgggcacaccttgggtcaaccctgcccctttctggaagttggcctatgtcattgtcagtgggtgtctgcttgtgactcaggtagggagaaggataccaagtttcttttttttttctttttgagacagtctcacccagttgcccaggctggagtgcagtggcgtacgtgatctcagctcactgcagactccatctcccgagt

SEQ ID NO: 456286 - DNA, 933 bp, Homo sapiens
  misc_feature (38)..(38): n is a, c, g, or t
  misc_feature (47)..(47): n is a, c, g, or t
tgacctagcaggatcttttagcagcccgacagcgcatnacaggacancaaggagagctctgaagagcctccctcagaagagagccaggacacccccatttacacggagtttgatgaggatttcgaggaggaacccacatcccccataggtcactgtgtggccatctaccactttgaagggtccagcgagggcactatctctatggccgagggtgaagacctcagtcttatggaagaagacaaaggggacggctggacccgggtcaggcggaaagagggaggcgagggctacgtgcccacctcctacctccgagtcacgctcaattgaaccctgccagagacgggaagaggggggctgtcggctgctgcttctgggccacggggagccccaggacctatgcactttatttctgaccccgtggcttcggctgagacctgtgtaacctgctgccccctccacccccaacccagtcctacctgtcacaccggacggacccgctgtgccttctaccatcgttccaccattgatgtacatactcatgttttacatcttttctttctgccgctcggctccggccattttgttttatacaaaaatgggaaaaaaaaaaaagaaattatataaagttcctagagtcggtgtcttattagaggatttaaatactgggactggaagtatctaacaccacgtttcttacaggccacacagggaatgaggaaggggaggtgatcttgggcacaccttgggtcaaccctgcccctttctggaagttggcctatgtcattgtcagtgggtgtctgcttgtgactcaggtagggagaaggataccaagtttcttttttttttctttttgagacagtctcacccagttgcccaggctggagtgcagtggcgtacgtgatctcagctcactgcagactccatctcccgagt

SEQ ID NO: 456287 - DNA, 1070 bp, Homo sapiens
gtctccccggggagggcggcgggcggcgggcggcggggaccgggtgcggtggtggctgcggcggcggcggcgggagcagcatggattggggcactgagctgtgggatcagttcgaggtgctcgagcgccacacgcagtgggggctggacctgttggacagatatgtaaagttcgtgaaagaacgcaccgaagtggaacaggcttacgccaaacaactgcggagcctggtgaaaaaatatctgcccaagagacctgccaaggatgatcctgagtccaaattcagccagcaacagtccttcgtacagattctccaggaggtgaatgactttgcaggccagcgggagctggtggctgagaacctcagtgtccgtgtatgtcttgagctgaccaagtactcacaagagatgaaacaggagaggaagatgcacttccaagaagggcggcgggcccagcagcagctggaaaatggctttaaacagctggagaatagtaagcgtaaatttgagcgggactgccgggaggcagagaaggcagcccagactgctgaacggctagaccaggatatcaacgccaccaaggctgatgtggagaaggccaagcagcaagcccaccttcggagtcacatggccgaagaaagcaaaaacgaatatgcggctcaactgcagcgcttcaaccgagaccaagcccacttctatttttcacagatgccccagatattcgataagctccaagacatggatgaacgcagggccacccgcctgggtgccgggtatgggctcctgtcggaggccgagctggaggtggtgcccataatagccaagtgcttggagggcatgaaggtggctgcaaatgctgtggatcccaagaacgactcccacgtccttatagagctgcacaagtcaggttttgcccgcccgggcgacgtggaattcgaggacttcagccagcccatgaaccgtgcaccctccgacagcagtctgggcaccccctcggatggacggcctgaactccgaggcccgggtcgcagccgcaccaagcgctggcctacagcacatgccggtaccgagctg

SEQ ID NO: 456288 - DNA, 732 bp, Homo sapiens
gctctgaagggagctttcatgtggccgaccaactctactccttgactcctcccttctctcattgaaaaaaaatgtttaaggggacatttctctctcctaaactttttatgttccattgaagacctggaaaacatgttaaataaaaatgctttgccacagctgacctatgtcttctggcttgtaccccacaacatcttatctaatggagccagtcttggtgctctgtgttcacctggttcatctgaggagctgcatctaccctgcccatgccatagatcctgccctgtttgcttctcctgttgctgctagtggacatgagaaggacagaataacgggctcccagattcacaagccccaccaagaggatcaccccaggaacgcttggaggctgaggagttcactgaggctactgcatcttgagactcaggatgaagacccagcttggggctgtcaaaggttttttgcatgtctgacacccatgactccacctggaccttatggctccacccagaagcaattcagcccaacaggaggacagcttcaacccattacgatttcatctctgccccaaccactcagcagcaagcacctgttacctgtccacccccaccccttcccccaaactgcctttgaaaaatccctaacctatgagctttgaataagatgagtacgaacttcatcgcccatgtggcgtggccggcctcgtgtctattaaattctttttctactaca

SEQ ID NO: 456289 - DNA, 1134 bp, Homo sapiens
gctctgaagggagctttcatgtggccgaccaactctactccttgactcctcccttctctcattgaaaaaaaatgtttaaggggacatttctctctcctaaactttttatgttccattgaagacctggaaaacatgttaaataaaaatgctttgccacagctgacctatgtcttctggcttgtaccccacaacatcttatctaatggagccagtcttggtgctctgtgttcacctggttcatctgaggagctgcatctaccctgcccatgccatagatcctgccctgtttgcttctcctgttgctgctagtggacatgagaaggacagaataacgggctcccagattcacaagccccaccaagaggatcaccccaggaacgcttggaggctgaggagttcactgaggctactgcatcttgagactcaggatgaagacccagcttggggctgtcaaaggttttttgcatgtctgacacccatgactccacctggaccttatggctccacccagaagcaattcagcccaacaggaggacagcttcaacccattacgatttcatctctgccccaaccactcagcagcaagcacctgttacctgtccacccccaccccttcccccaaactgcctttgaaaaatccctaacctatgagctttgaataagatgagtacgaacttcatcgcccatgtggcgtggccggcctcgtgtctattaaattctttttctactacagaacaagaaaaaacaactggcctccactggtctaaaagatggagatctccgaccccttcgctttagtgcggcacacacagtgaccctgcgtcactgctgaaatagccctcacacccctgcatcgcccagacgcaccatccccacataggaccatctcacccgatccgcttaattatccgtcgccccctattacccgttctcgtccattctatccaccgaccacccccacccagacgccacactagcccccacgcgtcacggacgcggctagccctccaccaccccccactcacaccatagacaccagcccccctgagactactacgccacaacacgaggacaccctccctccgatacctccctttcagttcgcctacgtctctactccacgcccactatgct

SEQ ID NO: 456290 - DNA, 1132 bp, Homo sapiens
cgccagccccgcgctcctccgggcagagcgcgtgtggcggccgagcacatgggcccgcgggccgggcgggctcggggcggccgggacgaggaggggcgacgacgagctgcgagcaaagatgtgccccgggacccccggcaccttccagtggatttccttgcggaaaggatgttggcggtccctgtgacctgtggagacacggccagatctgccctccaatggcatcaccagaaaccaagaagatggtaaggcctggaggtggcagagctgaagagagtacatgacccagcagaagaaataagcacaaatacaaatggtgacagaaaaataagatgtgtcacaactgacttagattccaacaaccacaacagcacagaggaggaagcgaggtggtgctccctggaatgacccaaacacaacaatatctgagcttgctcttgaaggactagcagtttaccaagcaaaatggaaaacagaaattgagtccaggtctagatatcaagaagcacaaagagatccacaaaagaccatggagaattcaaagaccagcaacaggcttcaaaagccttctatgaatagggcatgcatggacccttctcctctcaccccccagcacatatgaaggggtatggacagtgttggaacaagatggtcttggattcagaaataaaaggagtcagaagctgaagacctaagggtaacacaagacttccgggttctggccgggcgcggtggctcacgcctgtaatcccagcactttgggaggccgaggcgggcggatcacgaggtcaggagatcgagaccatcccggctaaaacggcgaaaccccgtctctactaaaaatacaaaaaattagccgggcgtagtggcgggcgcctgtagtcccagctacttgggaggctgaggcaggagaatggcgtgaacccgggaggcggagcttgcagtgagccgagatcccgccactgcactccagcctgggcgacagagcgagactccgtctcaaaaaaaaaaaaaaaagacttccgggttctgaaagcagtgcagcttggaattttcagaaagtgaattgacttcctgtagctgattgttttttattttaggaaaataaaaattattactttttgtttaaatg

SEQ ID NO: 456291 - DNA, 1034 bp, Homo sapiens
tctttatgtaaatatgcactcatttaaatatcatgtgggcacctcctctgagtggccctgagcttggttcttggatgtagcactgcacaagagaaaccaggtctctgctctcctggagatcgatgcatccagtgtggggcacagactcaaatcaaggcaatagaccaaaacctaagcaggccactaacttgtgtttaagtacaacatccacatggacgggaatgagaattacagggggagcacacttgagctgcggtccagcaaagccctctctggggaggtgacagtcaagcccagacctaaaggaacctgctgcagggaggatgggaaagatgttctgacaaaggccttgagatggggaaggctatggtttagatgaggaacttcagttggtcatcccctctctcatccatcctgttgaaaccacctttgcaaaaggtgtgtcaatgagaaaattataacagtaagctaagccaacccaacctccatcttgcttttctcttaattattcctgggctattgggtcaagctaactttggaagacatttaggctacagtttaaatgataataggccttgcccaaaactcagccacttttgtaaagctgttagggggccatgagggtgcggggaggagaagagcctgaatcctactaagctgcagacattattccgaaggttataagatatgcaactttcccaattgctcctgtgaataacactactattacagattggccttttgaaatatctttccaggttttttgcatgtctgacacccatgactccacctggaccttatggctccacccagaagcaattcagcccaacaggaggacagcttcaacccattacgatttcatctctgccccaaccactcagcagcaagcacctgttacctgtccacccccaccccttcccccaaactgcctttgaaaaatccctaacctatgagctttgaataagatgagtacgaacttcatcgcccatgtggcgtggccggcctcgtgtctattaaattctttttctactaca

SEQ ID NO: 456292 - DNA, 528 bp, Homo sapiens
cgccagccccgcgctcctccgggcagagcgcgtgtggcggccgagcacatgggcccgcgggccgggcgggctcggggcggccgggacgaggaggggcgacgacgagctgcgagcaaagatgtgccccgggacccccggcaccttccagtggatttccttgcggaaaggatgttggcggtccctgtgacctgtggagacacggccagatctgccctccagatttattaggagaaaaaccttcccggaagctgcagaaggacaaatacagaatccgtgtctgggagaaacctcgtggcctggtctccattatttgagatgagttacatcttggaggaccatagctgtctgcagtgcaggaagccaactataaggggaaacaaaagtgttcttaggagtcctgctgtcactgtggattgagccggtgaagccctgagggatttcatcgctgaggtggatggagaagcagctgggggccttggctgtaaggacccctaagggaactgtggctgcaccatctgtcttcatctt

SEQ ID NO: 456293 - DNA, 857 bp, Homo sapiens
acgtaatatactccagtttgcaaatgaaggaatcttcctgcggaacgtatgtgaagcgcatattggtgctctgggcttttgcataatttcaaatgtcctttttttttttaaacttaaggctaatgtttagaagcttttgctaatgagaggaccatttgctaaatcggtataagtgctacacatttgggtatctccatcccaacatacctcttattgccattccccaaagcagacaccttctcctccctccctcaaggacctctgagcttgcactccaattcctctcccacactcacctttctcctttctgttcctcttgggatccaggtttatttgaggagataggaaaagctcctgatccagcaggttttattcttaaatttgtaacaaagtaaatcacagaacctccacccagcatccaggcctctggttctctccctccttcccaggtataggccggctttcagaaaccctgcaccacatagaccctgggcctgaattgctgtgagtaataatgactctgctggtaatttgtgtccttctgcttggaactgtttcctttttagtttggtcaccctcccagagctggtttcaatgggggcatacccattatgggatgcagggcatcctgcatcctgaggaattttttttcctccaaaaatgaaaccttgaaatgaggacattgtcctgtccacggactgcacaacaacactgagcctcaaggactcatactggcatttttcttcttttgcagagtgtgggcaccctggcttcaagctcacgagaaaccaggtcgggatttaaacaatgttgggttaaagcaaagtttcataaagacagaatcaagaaaaaaaaaa

SEQ ID NO: 456294 - DNA, 1401 bp, Homo sapiens
cgccagccccgcgctcctccgggcagagcgcgtgtggcggccgagcacatgggcccgcgggccgggcgggctcggggcggccgggacgaggaggggcgacgacgagctgcgagcaaagatgtgccccgggacccccggcaccttccagtggatttccttgcggaaaggatgttggcggtccctgtgacctgtggagacacggccagatctgccctccataacacaaggaagtgaagcaatttgctcaagataatgtgtctagtcatcaaaaggactggtcagtgcctcgatcttgatgatgatggatactgcttattggatactctcacatctcaacaatccaaacaccttccacaatgacctgcttaatctgacccctggcacatctcaaatcacagtctctgtctgtagtagataaaaaaaaatggacacacactttgcaataccacccatcaagagattaagtaactttcttcatcccttgaatctagtgggctcttgtgactaccaatagaatttggtggaagtgacactctgccttctgcaacaaggcacctgtgctgaaggagacttttagcctctgcccttgcctccctgaatagtgcctccatgtgaagaagaccaagctaacctactagagacatggctccaccaagaaccagtagcagctgcctggacaaggccatcttagaccacccaaccctagtcaagacagcagaatgactgcagctcggtgaattgtgttttaagctgctaagttttcagtggtttattaggcagcaatacataactgaaataccctttcaccctcccgactttaggctccagcctttctgatcttctcttaagccttggaacatgccattgacttttccaccctgagactttgcatgttattccttatgcataaaatacattcctctttccacctgtcaaatggtttaactcccttttatcatttaggccactagcttaaaattcacatgcagagagaattctttactgagcaaccatataccccagatttcttattcttcatatcaggcttttcttattttttcattgcgcatatcacaaagggcaattaattaattaattgtttgtttgtttgttattgcctattttccccctatccagatgtaagctccatgagagtggttggaggcaatgtttattctgttttccacttcaccttaagagagtgcgggaagagggtctcatccatatttctttggatccttttatcattttcctgcatactttcactgagagtgctctcatgtccatcagccagcacttgcttctcttttctgagggctgccccaggctcctgaagtccagcttggattgcctgcatgaaaacatagagagctaaaggctgggaacttgcatagccttagc

SEQ ID NO: 456295 - DNA, 413 bp, Homo sapiens
cgccagccccgcgctcctccgggcagagcgcgtgtggcggccgagcacatgggcccgcgggccgggcgggctcggggcggccgggacgaggaggggcgacgacgagctgcgagcaaagatgtgccccgggacccccggcaccttccagtggatttccttgcggaaaggatgttggcggtccctgtgacctgtggagacacggccagatctgccctccagaccatagctgtctgcagtgcaggaagccaactataaggggaaacaaaagtgttcttaggagtcctgctgtcactgtggattgagccggtgaagccctgagggatttcatcgctgaggtggatggagaagcagctgggggccttggctgtaaggacccctaagggaactgtggctgcaccatctgtcttcatctt

SEQ ID NO: 456296 - DNA, 743 bp, Homo sapiens
cgccagccccgcgctcctccgggcagagcgcgtgtggcggccgagcacatgggcccgcgggccgggcgggctcggggcggccgggacgaggaggggcgacgacgagctgcgagcaaagatgtgccccgggacccccggcaccttccagtggatttccttgcggaaaggatgttggcggtccctgtgacctgtggagacacggccagatctgccctccagatttattaggagaaaaaccttcccggaagctgcagaaggacaaatacagaatccgtgtctgggagaaacctcgtggcctggtctccattatttgagatgagttacatcttggagatggcatcaccagaaaccaagaagatggtaaggcctggaggtggcagagctgaagagagtacatgacccagcagaagaaataagcacaaatacaaatggtgacagaaaaataagatgtgtcacaactgacttagattccaacaaccacaacagcacagaggaggaagcgaggtggtgctccctggaatgacccaaacacaacaatatctgagcttgctcttgaaggactagcagtttaccaagcaaaatggaaaacagaaattgagtccaggtctagatatcaagaagcacaaagagatccacaaaagaccatggagaattcaaagaccagcaacaggcttcaaaagccttctatgaatagggcatgtaaggatttgctgggggcaagggtgggtttgagagctggagat

SEQ ID NO: 456297 - DNA, 1890 bp, Homo sapiens
cgccagccccgcgctcctccgggcagagcgcgtgtggcggccgagcacatgggcccgcgggccgggcgggctcggggcggccgggacgaggaggggcgacgacgagctgcgagcaaagatgtgccccgggacccccggcaccttccagtggatttccttgcggaaaggatgttggcggtccctgtgacctgtggagacacggccagatctgccctccagcctgatcttttggccagaaggagattaaaaagatgcccctcaagatggctgtgcctgtcagctgcatggagcttcgttcaagtattttctgagcctgatggatttacagtgatcttcagtggtctggggaataacgctggtggaaccatgcactggaatgacacacgcccggcacatttcaggatactaaaagtggttttaagggaggctgtggctgaatgcctcatggattcttacagcttggatgtccatgggggacgaaggactgcagctggctgagagggttgagatctctgtttacttagatctctgccaacttcctttgggtctccctatggaatgtaagaccccgactcttcctggtgaagcatctgatgcacgttccatccggcgctcagctgggcttgagctgaccatactccctggagccttctcccgaggtgcgcgggtgaccttggcacatacagccatcatgatggtactttaagtggaggctgaatcatctcccctttgagctgcttggcacgtggctcccttggtgttccccttttactgccaggacactgagatttggagagaatcctgttacacctgggatttaggcactttcaatctgaaaaaatacatatcctttcagcactctggacggacttgagaactgtccttacgtgacctaaagctggagtattttgagattggagaattaagagtgtgggcaccctggcttcaagctcacgagaaaccagaaggaagtcactgtgcatagccatcccctaagaagagggcattcctgctcttccttctccatggctagaggatctacatgaactatttagattttttctacctgggagatttaactcctctctcctatttatttatttatatatcagcatggacttgcaggccaacagagattttgagaaacacattgaaggatctgttaacacttgatatacccaataaaagcagtggttgtgccagtgctgatctgtcttgatgtgaatgtgaacaatgggaacctgagctgagcagttaatgctagggtgacagaaactggacctctcccaagacatgtgacagagtaatacagcagccaacttcttcgccaaattaaagttttacaagatttaacctgtcatcaagacctgggattttggtgatcttggacatgatacctggatgtgcagcagccatctggtaattatgaggtgacaagtcaatagactgagatggtggagcagcaaagatagaaaagaaggacagaataacgggctcccagattcacaagccccaccaagaggatcaccccaggaacgcttggaggctgaggagttcactgaggctactgcatcttgagactcaggatgaagacccagcttggggctgtcaaaggttttttgcatgtctgacacccatgactccacctggaccttatggctccacccagaagcaattcagcccaacaggaggacagcttcaacccattacgatttcatctctgccccaaccactcagcagcaagcacctgttacctgtccacccccaccccttcccccaaactgcctttgaaaaatccctaacctatgagctttgaataagatgagtacgaacttcatcgcccatgtggcgtggccggcctcgtgtctattaaattctttttctactaca

SEQ ID NO: 456298 - DNA, 1704 bp, Homo sapiens
cgccagccccgcgctcctccgggcagagcgcgtgtggcggccgagcacatgggcccgcgggccgggcgggctcggggcggccgggacgaggaggggcgacgacgagctgcgagcaaagatgtgccccgggacccccggcaccttccagtggatttccttgcggaaaggatgttggcggtccctgtgacctgtggagacacggccagatctgccctccagcctgatcttttggccagaaggagattaaaaagatgcccctcaagatggctgtgcctgtcagctgcatggagcttcgttcaagtattttctgagcctgatggatttacagtgatcttcagtggtctggggaataacgctggtggaaccatgcactggaatgacacacgcccggcacatttcaggatactaaaagtggttttaagggaggctgtggctgaatgcctcatggattcttacagcttggatgtccatgggggacgaaggactgcagctggctgagagggttgagatctctgtttacttagatctctgccaacttcctttgggtctccctatggaatgtaagaccccgactcttcctggtgaagcatctgatgcacgttccatccggcgctcagctgggcttgagctgaccatactccctggagccttctcccgaggtgcgcgggtgaccttggcacatacagccatcatgatggtactttaagtggaggctgaatcatctcccctttgagctgcttggcacgtggctcccttggtgttccccttttactgccaggacactgagatttggagagaatcctgttacacctgggatttaggcactttcaatctgaaaaaatacatatcctttcagcactctggacggacttgagaactgtccttacgtgacctaaagctggagtattttgagattggagaattaaggctacagagaaacaaggagacgggagagccttgaaatggaccttcaagattacaatgtgtagctgacattgtcagttaagttgggcagatctgacttcgctgattaagtggatgtatgagccgatcctccccagaagctgggatcagcttccccatctgatgagccagtcttggtgctctgtgttcacctggttcatctgaggagctgcatctaccctgcccatgccatagatcctgccctgtttgcttctcctgttgctgctagtggacatgaggtaaccacagcctagttctgtgataagctcttcacacctgtacccatatggactgtgggagagtttctctgatatggactgtgatgcggaaggacagaataacgggctcccagattcacaagccccaccaagaggatcaccccaggaacgcttggaggctgaggagttcactgaggctactgcatcttgagactcaggatgaagacccagcttggggctgtcaaaggttttttgcatgtctgacacccatgactccacctggaccttatggctccacccagaagcaattcagcccaacaggaggacagcttcaacccattacgatttcatctctgccccaaccactcagcagcaagcacctgttacctgtccacccccaccccttcccccaaactgcctttgaaaaatccctaacctatgagctttgaataagatgagtacgaacttcatcgcccatgtggcgtggccggcctcgtgtctattaaattctttttctactaca

SEQ ID NO: 456299 - DNA, 1704 bp, Homo sapiens
cgccagccccgcgctcctccgggcagagcgcgtgtggcggccgagcacatgggcccgcgggccgggcgggctcggggcggccgggacgaggaggggcgacgacgagctgcgagcaaagatgtgccccgggacccccggcaccttccagtggatttccttgcggaaaggatgttggcggtccctgtgacctgtggagacacggccagatctgccctccagcctgatcttttggccagaaggagattaaaaagatgcccctcaagatggctgtgcctgtcagctgcatggagcttcgttcaagtattttctgagcctgatggatttacagtgatcttcagtggtctggggaataacgctggtggaaccatgcactggaatgacacacgcccggcacatttcaggatactaaaagtggttttaagggaggctgtggctgaatgcctcatggattcttacagcttggatgtccatgggggacgaaggactgcagctggctgagagggttgagatctctgtttacttagatctctgccaacttcctttgggtctccctatggaatgtaagaccccgactcttcctggtgaagcatctgatgcacgttccatccggcgctcagctgggcttgagctgaccatactccctggagccttctcccgaggtgcgcgggtgaccttggcacatacagccatcatgatggtactttaagtggaggctgaatcatctcccctttgagctgcttggcacgtggctcccttggtgttccccttttactgccaggacactgagatttggagagaatcctgttacacctgggatttaggcactttcaatctgaaaaaatacatatcctttcagcactctggacggacttgagaactgtccttacgtgacctaaagctggagtattttgagattggagaattaaggctacagagaaacaaggagacgggagagccttgaaatggaccttcaagattacaatgtgtagctgacattgtcagttaagttgggcagatctgacttcgctgattaagtgaatgtatgagccgatcctccccagaagctgggatcagcttccccatctgatgagccagtcttggtgctctgtgttcacctggttcatctgaggagctgcatctaccctgcccatgccatagatcctgccctgtttgcttctcctgttgctgctagtggacatgaggtaaccacagcctagttctgtgataagctcttcacacctgtacccatatggactgtgggagagtttctctgatatggactgtgatgcggaaggacagaataacgggctcccagattcacaagccccaccaagaggatcaccccaggaacgcttggaggctgaggagttcactgaggctactgcatcttgagactcaggatgaagacccagcttggggctgtcaaaggttttttgcatgtctgacacccatgactccacctggaccttatggctccacccagaagcaattcagcccaacaggaggacagcttcaacccattacgatttcatctctgccccaaccactcagcagcaagcacctgttacctgtccacccccaccccttcccccaaactgcctttgaaaaatccctaacctatgagctttgaataagatgagtacgaacttcatcgcccatgtggcgtggccggcctcgtgtctattaaattctttttctactaca

SEQ ID NO: 456300 - DNA, 2269 bp, Homo sapiens
cgccagccccgcgctcctccgggcagagcgcgtgtggcggccgagcacatgggcccgcgggccgggcgggctcggggcggccgggacgaggaggggcgacgacgagctgcgagcaaagatgtgccccgggacccccggcaccttccagtggatttccttgcggaaaggatgttggcggtccctgtgacctgtggagacacggccagatctgccctccagcctgatcttttggccagaaggagattaaaaagatgcccctcaagatggctgtgcctgtcagctgcatggagcttcgttcaagtattttctgagcctgatggatttacagtgatcttcagtggtctggggaataacgctggtggaaccatgcactggaatgacacacgcccggcacatttcaggatactaaaagtggttttaagggaggctgtggctgaatgcctcatggattcttacagcttggatgtccatgggggacgaaggactgcagctggctgagagggttgagatctctgtttacttagatctctgccaacttcctttgggtctccctatggaatgtaagaccccgactcttcctggtgaagcatctgatgcacgttccatccggcgctcagctgggcttgagctgaccatactccctggagccttctcccgaggtgcgcgggtgaccttggcacatacagccatcatgatggtactttaagtggaggctgaatcatctcccctttgagctgcttggcacgtggctcccttggtgttccccttttactgccaggacactgagatttggagagaatcctgttacacctgggatttaggcactttcaatctgaaaaaatacatatcctttcagcactctggacggacttgagaactgtccttacgtgacctaaagctggagtattttgagattggagaattaagagtgtgggcaccctggcttcaagctcacgagaaaccagaaggaagtcactgtgcatagccatcccctaagaagagggcattcctgctcttccttctccatggctagaggatctacatgaactatttagattttttctacctgggagatttaactcctctctcctatttatttatttatatatcagcatggacttgcaggccaacagagattttgagaaacacattgaaggatctgttaacacttgatatacccaataaaagcagtggttgtgccagtgctgatctgtcttgatgtgaatgtgaacaatgggaacctgagctgagcagttaatgctagggtgacagaaactggacctctcccaagacatgtgacagagtaatacagcagccaacttcttcgccaaattaaagttttacaagatttaacctgtcatcaagacctgggattttggtggacaaccatgtcgtgatgatgatgatgacgacgatgacagcgatggcggtggtgaaagaggaagacatcccttcatttcatgtagcaatctgcttcttgctgggatttcaaatccattttcattgttgatcctgagaacaagccttggaggcggaatcattttgaaatcccaggaaaccgggccttaagagacggctgaagacccgagcagtcattcggtggagtctgtgaggcccagagctgaggaggaggacatgggtgtagaaacggtcgcagcccacactgctgtgcctacagctctggatcctgactgtgtgagtgggcccagggctgctggaacctgtggagctatagcaagaaggagccagtcttggtgctctgtgttcacctggttcatctgaggagctgcatctaccctgcccatgccatagatcctgccctgtttgcttctcctgttgctgctagtggacatgagaaggacagaataacgggctcccagattcacaagccccaccaagaggatcaccccaggaacgcttggaggctgaggagttcactgaggctactgcatcttgagactcaggatgaagacccagcttggggctgtcaaaggttttttgcatgtctgacacccatgactccacctggaccttatggctccacccagaagcaattcagcccaacaggaggacagcttcaacccattacgatttcatctctgccccaaccactcagcagcaagcacctgttacctgtccacccccaccccttcccccaaactgcctttgaaaaatccctaacctatgagctttgaataagatgagtacgaacttcatcgcccatgtggcgtggccggcctcgtgtctattaaattctttttctactaca

SEQ ID NO: 456301 - DNA, 1808 bp, Homo sapiens
gtgttaccagttatggaggattatcgttagggagttacactctgttaggtccaaacacaaggaggaaagagtgactgaatactgctctgagtcagtgactgtgacaagactgtttttttcttcttccctgttgcaggcctgatcttttggccagaaggagattaaaaagatgcccctcaagatggctgtgcctgtcagctgcatggagcttcgttcaagtattttctgagcctgatggatttacagtgatcttcagtggtctggggaataacgctggtggaaccatgcactggaatgacacacgcccggcacatttcaggatactaaaagtggttttaagggaggctgtggctgaatgcctcatggattcttacagcttggatgtccatgggggacgaaggactgcagctggctgagagggttgagatctctgtttacttagatctctgccaacttcctttgggtctccctatggaatgtaagaccccgactcttcctggtgaagcatctgatgcacgttccatccggcgctcagctgggcttgagctgaccatactccctggagccttctcccgaggtgcgcgggtgaccttggcacatacagccatcatgatggtactttaagtggaggctgaatcatctcccctttgagctgcttggcacgtggctcccttggtgttccccttttactgccaggacactgagatttggagagaatcctgttacacctgggatttaggcactttcaatctgaaaaaatacatatcctttcagcactctggacggacttgagaactgtccttacgtgacctaaagctggagtattttgagattggagaattaagagtgtgggcaccctggcttcaagctcacgagaaaccagaaggaagtcactgtgcatagccatcccctaagaagagggcattcctgctcttccttctccatggctagaggatctacatgaactatttagattttttctacctgggagatttaactcctctctcctatttatttatttatatatcagcatggacttgcaggccaacagagattttgagaaacacattgaaggatctgttaacacttgatatacccaataaaagcagtggttgtgccagtgctgatctgtcttgatgtgaatgtgaacaatgggaacctgagctgagcagttaatgctagggtgacagaaactggacctctcccaagacatgtgacagagtaatacagcagccaacttcttcgccaaattaaagttttacaagatttaacctgtcatcaagacctgggattttggtgatcttggacatgatacctggatgtgcagcagccatctggtaattatgaggtgacaagtcaatagactgagatggtggagcagcaaagatagaaaagaaggacagaataacgggctcccagattcacaagccccaccaagaggatcaccccaggaacgcttggaggctgaggagttcactgaggctactgcatcttgagactcaggatgaagacccagcttggggctgtcaaaggttttttgcatgtctgacacccatgactccacctggaccttatggctccacccagaagcaattcagcccaacaggaggacagcttcaacccattacgatttcatctctgccccaaccactcagcagcaagcacctgttacctgtccacccccaccccttcccccaaactgcctttgaaaaatccctaacctatgagctttgaataagatgagtacgaacttcatcgcccatgtggcgtggccggcctcgtgtctattaaattctttttctactaca

SEQ ID NO: 456302 - DNA, 1171 bp, Homo sapiens
cgccagccccgcgctcctccgggcagagcgcgtgtggcggccgagcacatgggcccgcgggccgggcgggctcggggcggccgggacgaggaggggcgacgacgagctgcgagcaaagatgtgccccgggacccccggcaccttccagtggatttccttgcggaaaggatgttggcggtccctgtgacctgtggagacacggccagatctgccctccagcctgatcttttggccagaaggagattaaaaagatgcccctcaagatggctgtgcctgtcagctgcatggagcttcgttcaagtattttctgagcctgatggatttacagtgatcttcagtggtctggggaataacgctggtggaaccatgcactggaatgacacacgcccggcacatttcaggatactaaaagtggttttaagggaggctgtggctgaatgcctcatggattcttacagcttggatgtccatgggggacgaaggactgcagctggctgagagggttgagatctctgtttacttagatctctgccaacttcctttgggtctccctatggaatgtaagaccccgactcttcctggtgaagcatctgatgcacgttccatccggcgctcagctgggcttgagaatcctgttacacctgggatttaggcactttcaatctgaaaaaatacatatcctttcagcactctggacggacttgagaactgtccttacgtgacctaaagctggagtattttgagattggagaattaagaaggacagaataacgggctcccagattcacaagccccaccaagaggatcaccccaggaacgcttggaggctgaggagttcactgaggctactgcatcttgagactcaggatgaagacccagcttggggctgtcaaaggttttttgcatgtctgacacccatgactccacctggaccttatggctccacccagaagcaattcagcccaacaggaggacagcttcaacccattacgatttcatctctgccccaaccactcagcagcaagcacctgttacctgtccacccccaccccttcccccaaactgcctttgaaaaatccctaacctatgagctttgaataagatgagtacgaacttcatcgcccatgtggcgtggccggcctcgtgtctattaaattctttttctactaca

SEQ ID NO: 456303 - DNA, 2121 bp, Homo sapiens
agcttcggcacaagggcccaactggaattccacttacggacggagtctccttctgtcgcccaggctggagtgcagtggcgagatctcggctcactgcaagctccgcctcccgggttcacgccattctcctgcctcagcctcccgagtagctgggactacaggcacccgcccaccacgcccggctaagtttttgtatttttagtagagacgaggtttcaccatgttagccaggatggtttcgatctcctgacctcgtgatccgcccgccttggcctcccaaagtgctgggattacaggcgtgagccgccgcgcccagccccaggcggaaattatttcaactgggtcctgagaactgggcacttttcaaggattgtcagcaaggagcaacttcccaaatatacatctaaaaagatgacaaactcatgtggaatgtggatttaaggaggaaggcctgatcttttggccagaaggagattaaaaagatgcccctcaagatggctgtgcctgtcagctgcatggagcttcgttcaagtattttctgagcctgatggatttacagtgatcttcagtggtctggggaataacgctggtggaaccatgcactggaatgacacacgcccggcacatttcaggatactaaaagtggttttaagggaggctgtggctgaatgcctcatggattcttacagcttggatgtccatgggggacgaaggactgcagctggctgagagggttgagatctctgtttacttagatctctgccaacttcctttgggtctccctatggaatgtaagaccccgactcttcctggtgaagcatctgatgcacgttccatccggcgctcagctgggcttgagctgaccatactccctggagccttctcccgaggtgcgcgggtgaccttggcacatacagccatcatgatggtactttaagtggaggctgaatcatctcccctttgagctgcttggcacgtggctcccttggtgttccccttttactgccaggacactgagatttggagagaatcctgttacacctgggatttaggcactttcaatctgaaaaaatacatatcctttcagcactctggacggacttgagaactgtccttacgtgacctaaagctggagtattttgagattggagaattaagagtgtgggcaccctggcttcaagctcacgagaaaccagaaggaagtcactgtgcatagccatcccctaagaagagggcattcctgctcttccttctccatggctagaggatctacatgaactatttagattttttctacctgggagatttaactcctctctcctatttatttatttatatatcagcatggacttgcaggccaacagagattttgagaaacacattgaaggatctgttaacacttgatatacccaataaaagcagtggttgtgccagtgctgatctgtcttgatgtgaatgtgaacaatgggaacctgagctgagcagttaatgctagggtgacagaaactggacctctcccaagacatgtgacagagtaatacagcagccaacttcttcgccaaattaaagttttacaagatttaacctgtcatcaagacctgggattttggtgatcttggacatgatacctggatgtgcagcagccatctggtaattatgaggtgacaagtcaatagactgagatggtggagcagcaaagatagaaaagaaggacagaataacgggctcccagattcacaagccccaccaagaggatcaccccaggaacgcttggaggctgaggagttcactgaggctactgcatcttgagactcaggatgaagacccagcttggggctgtcaaaggttttttgcatgtctgacacccatgactccacctggaccttatggctccacccagaagcaattcagcccaacaggaggacagcttcaacccattacgatttcatctctgccccaaccactcagcagcaagcacctgttacctgtccacccccaccccttcccccaaactgcctttgaaaaatccctaacctatgagctttgaataagatgagtacgaacttcatcgcccatgtggcgtggccggcctcgtgtctattaaattctttttctactaca

SEQ ID NO: 456304 - DNA, 1842 bp, Homo sapiens
cagtcaagaagggggttgtatcaatcctcagaaccctgagtggaactttctacaggatttattaggagaaaaaccttcccggaagctgcagaaggacaaatacagaatccgtgtctgggagaaacctcgtggcctggtctccattatttgagatgagttacatcttggaggcctgatcttttggccagaaggagattaaaaagatgcccctcaagatggctgtgcctgtcagctgcatggagcttcgttcaagtattttctgagcctgatggatttacagtgatcttcagtggtctggggaataacgctggtggaaccatgcactggaatgacacacgcccggcacatttcaggatactaaaagtggttttaagggaggctgtggctgaatgcctcatggattcttacagcttggatgtccatgggggacgaaggactgcagctggctgagagggttgagatctctgtttacttagatctctgccaacttcctttgggtctccctatggaatgtaagaccccgactcttcctggtgaagcatctgatgcacgttccatccggcgctcagctgggcttgagctgaccatactccctggagccttctcccgaggtgcgcgggtgaccttggcacatacagccatcatgatggtactttaagtggaggctgaatcatctcccctttgagctgcttggcacgtggctcccttggtgttccccttttactgccaggacactgagatttggagagaatcctgttacacctgggatttaggcactttcaatctgaaaaaatacatatcctttcagcactctggacggacttgagaactgtccttacgtgacctaaagctggagtattttgagattggagaattaagagtgtgggcaccctggcttcaagctcacgagaaaccagaaggaagtcactgtgcatagccatcccctaagaagagggcattcctgctcttccttctccatggctagaggatctacatgaactatttagattttttctacctgggagatttaactcctctctcctatttatttatttatatatcagcatggacttgcaggccaacagagattttgagaaacacattgaaggatctgttaacacttgatatacccaataaaagcagtggttgtgccagtgctgatctgtcttgatgtgaatgtgaacaatgggaacctgagctgagcagttaatgctagggtgacagaaactggacctctcccaagacatgtgacagagtaatacagcagccaacttcttcgccaaattaaagttttacaagatttaacctgtcatcaagacctgggattttggtgatcttggacatgatacctggatgtgcagcagccatctggtaattatgaggtgacaagtcaatagactgagatggtggagcagcaaagatagaaaagaaggacagaataacgggctcccagattcacaagccccaccaagaggatcaccccaggaacgcttggaggctgaggagttcactgaggctactgcatcttgagactcaggatgaagacccagcttggggctgtcaaaggttttttgcatgtctgacacccatgactccacctggaccttatggctccacccagaagcaattcagcccaacaggaggacagcttcaacccattacgatttcatctctgccccaaccactcagcagcaagcacctgttacctgtccacccccaccccttcccccaaactgcctttgaaaaatccctaacctatgagctttgaataagatgagtacgaacttcatcgcccatgtggcgtggccggcctcgtgtctattaaattctttttctactaca

SEQ ID NO: 456305 - DNA, 1184 bp, Homo sapiens
agtgatccactcactttggcctttcaacgtgctgggattacaggcgagagtcaccgcacccggacgactctgacatttttgaagagtccagaatcctgttacacctgggatttaggcactttcaatctgaaaaaatacatatcctttcagcactctggacggacttgagaactgtccttacgtgacctaaagctggagtattttgagattggagaattaagagtgtgggcaccctggcttcaagctcacgagaaaccagaaggaagtcactgtgcatagccatcccctaagaagagggcattcctgctcttccttctccatggctagaggatctacatgaactatttagattttttctacctgggagatttaactcctctctcctatttatttatttatatatcagcatggacttgcaggccaacagagattttgagaaacacattgaaggatctgttaacacttgatatacccaataaaagcagtggttgtgccagtgctgatctgtcttgatgtgaatgtgaacaatgggaacctgagctgagcagttaatgctagggtgacagaaactggacctctcccaagacatgtgacagagtaatacagcagccaacttcttcgccaaattaaagttttacaagatttaacctgtcatcaagacctgggattttggtgatcttggacatgatacctggatgtgcagcagccatctggtaattatgaggtgacaagtcaatagactgagatggtggagcagcaaagatagaaaagaaggacagaataacgggctcccagattcacaagccccaccaagaggatcaccccaggaacgcttggaggctgaggagttcactgaggctactgcatcttgagactcaggatgaagacccagcttggggctgtcaaaggttttttgcatgtctgacacccatgactccacctggaccttatggctccacccagaagcaattcagcccaacaggaggacagcttcaacccattacgatttcatctctgccccaaccactcagcagcaagcacctgttacctgtccacccccaccccttcccccaaactgcctttgaaaaatccctaacctatgagctttgaataagatgagtacgaacttcatcgcccatgtggcgtggccggcctcgtgtctattaaattctttttctactaca

SEQ ID NO: 456306 - DNA, 1261 bp, Homo sapiens
tcccttcttttttctttctttttttgacggagtcctgctctttgcccaggctggagtgcagtggtgcaatctcggcttgctgcaacctccatctcccaggcaggttcaagtaattctcctgcctaagcctcccgagtagctgggactacaggcacctaccaccacacctttttttttttttagtagagacaggatttcactgtgttagacaatcctgcctccctccctccctccctttcttccttccttccttctttccttccttccttctttccctccttccttcctctcttctcctctcctctcttaccctcccctccccttctgtctcctctgctcccctgccctcccttctcctccttctccttctcctttttcttcttctctttgttgtccaggctggagtacagtggaaggatcatggcccactgtagcctagacatcccaggctgaaatgatcctctctcctcagcctcccaagtacctgggactacaggccaacagagattttgagaaacacattgaaggatctgttaacacttgatatacccaataaaagcagtggttgtgccagtgctgatctgtcttgatgtgaatgtgaacaatgggaacctgagctgagcagttaatgctagggtgacagaaactggacctctcccaagacatgtgacagagtaatacagcagccaacttcttcgccaaattaaagttttacaagatttaacctgtcatcaagacctgggattttggtgatcttggacatgatacctggatgtgcagcagccatctggtaattatgaggtgacaagtcaatagactgagatggtggagcagcaaagatagaaaagaaggacagaataacgggctcccagattcacaagccccaccaagaggatcaccccaggaacgcttggaggctgaggagttcactgaggctactgcatcttgagactcaggatgaagacccagcttggggctgtcaaaggttttttgcatgtctgacacccatgactccacctggaccttatggctccacccagaagcaattcagcccaacaggaggacagcttcaacccattacgatttcatctctgccccaaccactcagcagcaagcacctgttacctgtccacccccaccccttcccccaaactgcctttgaaaaatccctaacctatgagctttgaataagatgagtacgaacttcatcgcccatgtggcgtggccggcctcgtgtctattaaattctttttctactaca

SEQ ID NO: 456307 - DNA, 1717 bp, Homo sapiens
acgtaatatactccagtttgcaaatgaaggaatcttcctgcggaacgtatgtgaagcgcatattggtgctctgggcttttgcataatttcaaatgtcctttttttttttaaacttaaggctaatgtttagaagcttttgctaatgagaggaccatttgctaaatcggtataagtgctacacatttgggtatctccatcccaacatacctcttattgccattccccaaagcagacaccttctcctccctccctcaaggacctctgagcttgcactccaattcctctcccacactcacctttctcctttctgttcctcttgggatccaggtttatttgaggagataggaaaagctcctgatccagcaggttttattcttaaatttgtaacaaagtaaatcacagaacctccacccagcatccaggcctctggttctctccctccttcccaggtataggccggctttcagaaaccctgcaccacatagaccctgggcctgaattgctgtgagtaataatgactctgctggtaatttgtgtccttctgcttggaactgtttcctttttagtttggtcaccctcccagagctggtttcaatgggggcatacccattatgggatgcagggcatcctgcatcctgaggaattttttttcctccaaaaatgaaaccttgaaatgaggacattgtcctgtccacggactgcacaacaacactgagcctcaaggactcatactggcatttttcttcttttgcagagtgtgggcaccctggcttcaagctcacgagaaaccagaaggaagtcactgtgcatagccatcccctaagaagagggcattcctgctcttccttctccatggctagaggatctacatgaactatttagattttttctacctgggagatttaactcctctctcctatttatttatttatatatcagcatggacttgcaggccaacagagattttgagaaacacattgaaggatctgttaacacttgatatacccaataaaagcagtggttgtgccagtgctgatctgtcttgatgtgaatgtgaacaatgggaacctgagctgagcagttaatgctagggtgacagaaactggacctctcccaagacatgtgacagagtaatacagcagccaacttcttcgccaaattaaagttttacaagatttaacctgtcatcaagacctgggattttggtgatcttggacatgatacctggatgtgcagcagccatctggtaattatgaggtgacaagtcaatagactgagatggtggagcagcaaagatagaaaagaaggacagaataacgggctcccagattcacaagccccaccaagaggatcaccccaggaacgcttggaggctgaggagttcactgaggctactgcatcttgagactcaggatgaagacccagcttggggctgtcaaaggttttttgcatgtctgacacccatgactccacctggaccttatggctccacccagaagcaattcagcccaacaggaggacagcttcaacccattacgatttcatctctgccccaaccactcagcagcaagcacctgttacctgtccacccccaccccttcccccaaactgcctttgaaaaatccctaacctatgagctttgaataagatgagtacgaacttcatcgcccatgtggcgtggccggcctcgtgtctattaaattctttttctactaca

SEQ ID NO: 456308 - DNA, 2017 bp, Homo sapiens
cgccagccccgcgctcctccgggcagagcgcgtgtggcggccgagcacatgggcccgcgggccgggcgggctcggggcggccgggacgaggaggggcgacgacgagctgcgagcaaagatgtgccccgggacccccggcaccttccagtggatttccttgcggaaaggatgttggcggtccctgtgacctgtggagacacggccagatctgccctccagcctgatcttttggccagaaggagattaaaaagatgcccctcaagatggctgtgcctgtcagctgcatggagcttcgttcaagtattttctgagcctgatggatttacagtgatcttcagtggtctggggaataacgctggtggaaccatgcactggaatgacacacgcccggcacatttcaggatactaaaagtggttttaagggaggctgtggctgaatgcctcatggattcttacagcttggatgtccatgggggacgaaggactgcagctggctgagagggttgagatctctgtttacttagatctctgccaacttcctttgggtctccctatggaatgtaagaccccgactcttcctggtgaagcatctgatgcacgttccatccggcgctcagctgggcttgagctgaccatactccctggagccttctcccgaggtgcgcgggtgaccttggcacatacagccatcatgatggtactttaagtggaggctgaatcatctcccctttgagctgcttggcacgtggctcccttggtgttccccttttactgccaggacactgagatttggagagaatcctgttacacctgggatttaggcactttcaatctgaaaaaatacatatcctttcagcactctggacggacttgagaactgtccttacgtgacctaaagctggagtattttgagattggagaattaaggctacagagaaacaaggagacgggagagccttgaaatggaccttcaagattacaatgtgtagctgacattgtcagttaagttgggcagatctgacttcgctgattaagtgaatgtatgagccgatcctccccagaagctgggatcagcttccccatctgatgagccagtcttggtgctctgtgttcacctggttcatctgaggagctgcatctaccctgcccatgccatagatcctgccctgtttgcttctcctgttgctgctagtggacatgagaaggacagaataacgggctcccagattcacaagccccaccaagaggatcaccccaggaacgcttggaggctgaggagttcactgaggctactgcatcttgagactcaggatgaagacccagcttggggctgtcaaaggttttttgcatgtctgacacccatgactccacctggaccttatggctccacccagaagcaattcagcccaacaggaggacagcttcaacccattacgatttcatctctgccccaaccactcagcagcaagcacctgttacctgtccacccccaccccttcccccaaactgcctttgaaaaatccctaacctatgagctttgaataagatgagtacgaacttcatcgcccatgtggcgtggccggcctcgtgtctattaaattctttttctactacagaacaagaaaaaacaactggcctccactggtctaaaagatggagatctccgaccccttcgctttagtgcggcacacacagtgaccctgcgtcactgctgaaatagccctcacacccctgcatcgcccagacgcaccatccccacataggaccatctcacccgatccgcttaattatccgtcgccccctattacccgttctcgtccattctatccaccgaccacccccacccagacgccacactagcccccacgcgtcacggacgcggctagccctccaccaccccccactcacaccatagacaccagcccccctgagactactacgccacaacacgaggacaccctccctccgatacctccctttcagttcgcctacgtctctactccacgcccactatgct

SEQ ID NO: 456309 - DNA, 1819 bp, Homo sapiens
cgccagccccgcgctcctccgggcagagcgcgtgtggcggccgagcacatgggcccgcgggccgggcgggctcggggcggccgggacgaggaggggcgacgacgagctgcgagcaaagatgtgccccgggacccccggcaccttccagtggatttccttgcggaaaggatgttggcggtccctgtgacctgtggagacacggccagatctgccctccagcctgatcttttggccagaaggagattaaaaagatgcccctcaagatggctgtgcctgtcagctgcatggagcttcgttcaagtattttctgagcctgatggatttacagtgatcttcagtggtctggggaataacgctggtggaaccatgcactggaatgacacacgcccggcacatttcaggatactaaaagtggttttaagggaggctgtggctgaatgcctcatggattcttacagcttggatgtccatgggggacgaaggactgcagctggctgagagggttgagatctctgtttacttagatctctgccaacttcctttgggtctccctatggaatgtaagaccccgactcttcctggtgaagcatctgatgcacgttccatccggcgctcagctgggcttgagctgaccatactccctggagccttctcccgaggtgcgcgggtgaccttggcacatacagccatcatgatggtactttaagtggaggctgaatcatctcccctttgagctgcttggcacgtggctcccttggtgttccccttttactgccaggacactgagatttggagagaatcctgttacacctgggatttaggcactttcaatctgaaaaaatacatatcctttcagcactctggacggacttgagaactgtccttacgtgacctaaagctggagtattttgagattggagaattaaggctacagagaaacaaggagacgggagagccttgaaatggaccttcaagattacaatgtgtagctgacattgtcagttaagttgggcagatctgacttcgctgattaagtgaatgtatgagccgatcctccccagaagctgggatcagcttccccatctgatgagccagtcttggtgctctgtgttcacctggttcatctgaggagctgcatctaccctgcccatgccatagatcctgccctgtttgcttctcctgttgctgctagtggacatgagaaggacagaataacgggctcccagattcacaagccccaccaagaggatcaccccaggaacgcttggaggctgaggagttcactgaggctactgcatcttgagactcaggatgaagacccagcttggggctgtcaaagaggcctgaagaggcagaacaccccagaggagcctggggccaccacccagcatcactgtgggaaaacggcagcaggaaatgtcctctcgcctgcgtgctccacctcggtccacgccttccctccttctggaagccttgcctgaccactggcctgccccttctatgggaatcactactgaccttgcagcttattatagacttatatgttttttgcatgtctgacacccatgactccacctggaccttatggctccacccagaagcaattcagcccaacaggaggacagcttcaacccattacgatttcatctctgccccaaccactcagcagcaagcacctgttacctgtccacccccaccccttcccccaaactgcctttgaaaaatccctaacctatgagctttgaataagatgagtacgaacttcatcgcccatgtggcgtggccggcctcgtgtctattaaattctttttctactaca

SEQ ID NO: 456310 - DNA, 1826 bp, Homo sapiens
cgccagccccgcgctcctccgggcagagcgcgtgtggcggccgagcacatgggcccgcgggccgggcgggctcggggcggccgggacgaggaggggcgacgacgagctgcgagcaaagatgtgccccgggacccccggcaccttccagtggatttccttgcggaaaggatgttggcggtccctgtgacctgtggagacacggccagatctgccctccagcctgatcttttggccagaaggagattaaaaagatgcccctcaagatggctgtgcctgtcagctgcatggagcttcgttcaagtattttctgagcctgatggatttacagtgatcttcagtggtctggggaataacgctggtggaaccatgcactggaatgacacacgcccggcacatttcaggatactaaaagtggttttaagggaggctgtggctgaatgcctcatggattcttacagcttggatgtccatgggggacgaaggactgcagctggctgagagggttgagatctctgtttacttagatctctgccaacttcctttgggtctccctatggaatgtaagaccccgactcttcctggtgaagcatctgatgcacgttccatccggcgctcagctgggcttgagctgaccatactccctggagccttctcccgaggtgcgcgggtgaccttggcacatacagccatcatgatggtactttaagtggaggctgaatcatctcccctttgagctgcttggcacgtggctcccttggtgttccccttttactgccaggacactgagatttggagagaatcctgttacacctgggatttaggcactttcaatctgaaaaaatacatatcctttcagcactctggacggacttgagaactgtccttacgtgacctaaagctggagtattttgagattggagaattaaggctacagagaaacaaggagacgggagagccttgaaatggaccttcaagattacaatgtgtagctgacattgtcagttaagttgggcagatctgacttcgctgattaagtgaatgtatgagccgatcctccccagaagctgggatcagcttccccatctgatgagccagtcttggtgctctgtgttcacctggttcatctgaggagctgcatctaccctgcccatgccatagatcctgccctgtttgcttctcctgttgctgctagtggacatgagaaggacagaataacgggctcccagattcacaagccccaccaagaggatcaccccaggaacgcttggaggctgaggagttcactgaggctactgcatcttgagactcaggatgaagacccagcttggggctgtcaaagaggcctgaagaggcagaacaccccagaggagcctggggccaccacccagcatcactgtgggaaaacggcagcaggaaatgtcctctcgcctgcgtgctccacctcggtccacgccttccctccttctggaagccttgcctgaccactggcctgccccttctatgggaatcactactgaccttgcagcttattatagacttatatgtatgcagaaatataattttaattacttttatattgctccgagagtgataccaaatcatgatagaaaatttaaataaacaaaatagccaaattaataccagtaatcaccccagtcaaatatacccagctcacatttcgatgtaaaatcttccagtacagtttctatgtacatatatatatttttaggaaggagattatattttacatgctgttttctagaacgttcttttaaaactgtatcataaacatcttgccctataattcaatagtcttctacaacaaa

SEQ ID NO: 456311 - DNA, 1278 bp, Homo sapiens
tcccttcttttttctttctttttttgacggagtcctgctctttgcccaggctggagtgcagtggtgcaatctcggcttgctgcaacctccatctcccaggcaggttcaagtaattctcctgcctaagcctcccgagtagctgggactacaggcacctaccaccacacctttttttttttttagtagagacaggatttcactgtgttagacaatcctgcctccctccctccctccctttcttccttccttccttctttccttccttccttctttccctccttccttcctctcttctcctctcctctcttaccctcccctccccttctgtctcctctgctcccctgccctcccttctcctccttctccttctcctttttcttcttctctttgttgtccaggctggagtacagtggaaggatcatggcccactgtagcctagacatcccaggctgaaatgatcctctctcctcagcctcccaagtacctgggactacaggccaacagagattttgagaaacacattgaaggatctgttaacacttgatatacccaataaaagcagtggttgtgccagtgctgatctgtcttgatgtgaatgtgaacaatgggaacctgagctgagcagttaatgctagggtgacagaaactggacctctcccaagacatgtgacagagtaatacagcagccaacttcttcgccaaattaaagttttacaagatttaacctgtcatcaagacctgggattttggtgagccagtcttggtgctctgtgttcacctggttcatctgaggagctgcatctaccctgcccatgccatagatcctgccctgtttgcttctcctgttgctgctagtggacatgagaaggacagaataacgggctcccagattcacaagccccaccaagaggatcaccccaggaacgcttggaggctgaggagttcactgaggctactgcatcttgagactcaggatgaagacccagcttggggctgtcaaaggttttttgcatgtctgacacccatgactccacctggaccttatggctccacccagaagcaattcagcccaacaggaggacagcttcaacccattacgatttcatctctgccccaaccactcagcagcaagcacctgttacctgtccacccccaccccttcccccaaactgcctttgaaaaatccctaacctatgagctttgaataagatgagtacgaacttcatcgcccatgtggcgtggccggcctcgtgtctattaaattctttttctactaca

SEQ ID NO: 456312 - DNA, 692 bp, Homo sapiens
gaagggcactggagacctaccaggggctgggccattggagtggtgggtgctggggagcttccgtgggcccctccaggtccactccttgctcttctctgccttgttttgtgcccagaaggctgacctgtgtggatgcattatcagggtggatgcaacacagggctgccatgctctctggtatcagtttggaaggcactggcaggatgggaaggcaggcggggagtgaggtcagggggcctatccttccactgcctccctgctgctccctgactgattcagaaggacagaataacgggctcccagattcacaagccccaccaagaggatcaccccaggaacgcttggaggctgaggagttcactgaggctactgcatcttgagactcaggatgaagacccagcttggggctgtcaaaggttttttgcatgtctgacacccatgactccacctggaccttatggctccacccagaagcaattcagcccaacaggaggacagcttcaacccattacgatttcatctctgccccaaccactcagcagcaagcacctgttacctgtccacccccaccccttcccccaaactgcctttgaaaaatccctaacctatgagctttgaataagatgagtacgaacttcatcgcccatgtggcgtggccggcctcgtgtctattaaattctttttctactaca

SEQ ID NO: 456313 - DNA, 619 bp, Homo sapiens
gctctgaagggagctttcatgtggccgaccaactctactccttgactcctcccttctctcattgaaaaaaaatgtttaaggggacatttctctctcctaaactttttatgttccattgaagacctggaaaacatgttaaataaaaatgctttgccacagctgacctatgtcttctggcttgtaccccacaacatcttatctaatggaaggacagaataacgggctcccagattcacaagccccaccaagaggatcaccccaggaacgcttggaggctgaggagttcactgaggctactgcatcttgagactcaggatgaagacccagcttggggctgtcaaaggttttttgcatgtctgacacccatgactccacctggaccttatggctccacccagaagcaattcagcccaacaggaggacagcttcaacccattacgatttcatctctgccccaaccactcagcagcaagcacctgttacctgtccacccccaccccttcccccaaactgcctttgaaaaatccctaacctatgagctttgaataagatgagtacgaacttcatcgcccatgtggcgtggccggcctcgtgtctattaaattctttttctactaca

SEQ ID NO: 456314 - DNA, 472 bp, Homo sapiens
ccgccactccaccttacgcacctccgttcctcttcaccgcgtatctgccccgcttgattaaggacagaataacgggctcccagattcacaagccccaccaagaggatcaccccaggaacgcttggaggctgaggagttcactgaggctactgcatcttgagactcaggatgaagacccagcttggggctgtcaaaggttttttgcatgtctgacacccatgactccacctggaccttatggctccacccagaagcaattcagcccaacaggaggacagcttcaacccattacgatttcatctctgccccaaccactcagcagcaagcacctgttacctgtccacccccaccccttcccccaaactgcctttgaaaaatccctaacctatgagctttgaataagatgagtacgaacttcatcgcccatgtggcgtggccggcctcgtgtctattaaattctttttctactaca

SEQ ID NO: 456315 - DNA, 471 bp, Homo sapiens
gagtcgcgatggtatgcagtgaagaaggcgcacgggcaaagggtgttggcgaggtacaaaggacagaataacgggctcccagattcacaagccccaccaagaggatcaccccaggaacgcttggaggctgaggagttcactgaggctactgcatcttgagactcaggatgaagacccagcttggggctgtcaaaggttttttgcatgtctgacacccatgactccacctggaccttatggctccacccagaagcaattcagcccaacaggaggacagcttcaacccattacgatttcatctctgccccaaccactcagcagcaagcacctgttacctgtccacccccaccccttcccccaaactgcctttgaaaaatccctaacctatgagctttgaataagatgagtacgaacttcatcgcccatgtggcgtggccggcctcgtgtctattaaattctttttctactaca

SEQ ID NO: 456316 - DNA, 1628 bp, Homo sapiens
cgccagccccgcgctcctccgggcagagcgcgtgtggcggccgagcacatgggcccgcgggccgggcgggctcggggcggccgggacgaggaggggcgacgacgagctgcgagcaaagatgtgccccgggacccccggcaccttccagtggatttccttgcggaaaggatgttggcggtccctgtgacctgtggagacacggccagatctgccctccagcctgatcttttggccagaaggagattaaaaagatgcccctcaagatggctgtgcctgtcagctgcatggagcttcgttcaagtattttctgagcctgatggatttacagtgatcttcagtggtctggggaataacgctggtggaaccatgcactggaatgacacacgcccggcacatttcaggatactaaaagtggttttaagggaggctgtggctgaatgcctcatggattcttacagcttggatgtccatgggggacgaaggactgcagctggctgagagggttgagatctctgtttacttagatctctgccaacttcctttgggtctccctatggaatgtaagaccccgactcttcctggtgaagcatctgatgcacgttccatccggcgctcagctgggcttgagctgaccatactccctggagccttctcccgaggtgcgcgggtgaccttggcacatacagccatcatgatggtactttaagtggaggctgaatcatctcccctttgagctgcttggcacgtggctcccttggtgttccccttttactgccaggacactgagatttggagagaatcctgttacacctgggatttaggcactttcaatctgaaaaaatacatatcctttcagcactctggacggacttgagaactgtccttacgtgacctaaagctggagtattttgagattggagaattaagtagtgtgggcacccgtggcttcaagctcacgagaaaccaggccaacagagattttgagaaacacattgaaggatctgttaacacttgatatacccaataaaagcagtggttgtgccagtgctgatctgtcttgatgtgaatgtgaacaatgggaacctgagctgagcagttaatgctagggtgacagaaactggacctctcccaagacatgtgacagagtaatacagcagccaacttcttcgccaaattaaagttttacaagatttaacctgtcatcaagacctgggattttggtgagccagtcttggtgctctgtgttcacctggttcatctgaggagctgcatctaccctgcccatgccatagatcctgccctgtttgcttctcctgttgctgctagtggacatgaggtaaccacagcctagttctgtgataagctcttcacacctgtacccatatggactgtgggagagtttctctgatatggactgtgatgcggaagacagtgatgcactgtattcaagtgatagccccagcagtaacattgatgcagagaaaatggaatactttttacaagagaccagaagacacatgaagctagaaaaaggagcccagaaaactgccacattttgcccatatagaaaagcatatcccgaccgggcacagtggctcacgcctgtaatcccaggactttggaagccc

SEQ ID NO: 456317 - DNA, 1643 bp, Homo sapiens
cgccagccccgcgctcctccgggcagagcgcgtgtggcggccgagcacatgggcccgcgggccgggcgggctcggggcggccgggacgaggaggggcgacgacgagctgcgagcaaagatgtgccccgggacccccggcaccttccagtggatttccttgcggaaaggatgttggcggtccctgtgacctgtggagacacggccagatctgccctccagcctgatcttttggccagaaggagattaaaaagatgcccctcaagatggctgtgcctgtcagctgcatggagcttcgttcaagtattttctgagcctgatggatttacagtgatcttcagtggtctggggaataacgctggtggaaccatgcactggaatgacacacgcccggcacatttcaggatactaaaagtggttttaagggaggctgtggctgaatgcctcatggattcttacagcttggatgtccatgggggacgaaggactgcagctggctgagagggttgagatctctgtttacttagatctctgccaacttcctttgggtctccctatggaatgtaagaccccgactcttcctggtgaagcatctgatgcacgttccatccggcgctcagctgggcttgagctgaccatactccctggagccttctcccgaggtgcgcgggtgaccttggcacatacagccatcatgatggtactttaagtggaggctgaatcatctcccctttgagctgcttggcacgtggctcccttggtgttccccttttactgccaggacactgagatttggagagaatcctgttacacctgggatttaggcactttcaatctgaaaaaatacatatcctttcagcactctggacggacttgagaactgtccttacgtgacctaaagctggagtattttgagattggagaattaagagtgtgggcaccctggcttcaagctcacgagaaaccagaaggaagtcactgtgcatagccatcccctaagaagagggcattcctgctcttccttctccatggctagaggatctacatgaactatttagattttttctacctgggagatttaactcctctctcctatttatttatttatatatcagcatggacttgcaggccaacagagattttgagaaacacattgaaggatctgttaacacttgatatacccaataaaagcagtggttgtgccagtgctgatctgtcttgatgtgaatgtgaacaatgggaacctgagctgagcagttaatgctagggtgacagaaactggacctctcccaagacatgtgacagagtaatacagcagccaacttcttcgccaaattaaagttttacaagatttaacctgtcatcaagacctgggattttggtggtgagtcatcttcaaaagccaagttcggtccctggtttgccttcttttccgcacaagaacaagggttttgatggctctggtctccaggaccatctgtggctttctattagcaataatcgcacctcggtgaaacctcattggctacgatactgccactgcgcaaagctcatggctttctttaatagcaaatggcctctgacttttaagaagccatgtggctacccctcaccaaagcccataaaaataaaaaattaaaaaaaaa

SEQ ID NO: 456318 - DNA, 863 bp, Homo sapiens
cgccagccccgcgctcctccgggcagagcgcgtgtggcggccgagcacatgggcccgcgggccgggcgggctcggggcggccgggacgaggaggggcgacgacgagctgcgagcaaagatgtgccccgggacccccggcaccttccagtggatttccttgcggaaaggatgttggcggtccctgtgacctgtggagacacggccagatctgccctccagcctgatcttttggccagaaggagattaaaaagatgcccctcaagatggctgtgcctgtcagctgcatggagcttcgttcaagtattttctgagcctgatggatttacagtgatcttcagtggtctggggaataacgctggtggaaccatgcactggaatgacacacgcccggcacatttcaggatactaaaagtggttttaagggaggctgtggctgaatgcctcatggattcttacagcttggatgtccatgggggacgaaggactgcagctggctgagagggttgagatctctgtttacttagatctctgccaacttcctttgggtctccctatggaatgtaagaccccgactcttcctggtgaagcatctgatgcacgttccatccggcgctcagctgggcttgagacttcgcaggtgagcagtaacggaaatcagccccgtttattcctcccagcacctgccttatccaactccccacgctgtggctgagtcccagcctgctatggaagcatcactggactcccattgaactctgtgcagattcgctgttcgtagacatggtacctgatggacaccaagctacgtacagcttcaaggccccttctttctttgctaataaaaaataaaaattaaaaactta

SEQ ID NO: 456319 - DNA, 2544 bp, Homo sapiens
cgccagccccgcgctcctccgggcagagcgcgtgtggcggccgagcacatgggcccgcgggccgggcgggctcggggcggccgggacgaggaggggcgacgacgagctgcgagcaaagatgtgccccgggacccccggcaccttccagtggatttccttgcggaaaggatgttggcggtccctgtgacctgtggagacacggccagatctgccctccaatggcatcaccagaaaccaagaagatggtaaggcctggaggtggcagagctgaagaggttgaactggtttgttgaactttatggatggagccagccaacaggatgacattgtggcagagaaagaagcttgcagcttcttgcatcagaaaatcagatagagcctctctggcaagaagctgcagacacaaaagaagcttgcattgaaggtgactcagctctggcttttcagcaatgccctaacattggctatttaaaaagaggcaaagtagcttcagtgagacctcaaaccaattgcacagctagccactgcccataaagaagctactggtcagaaatgctggctccttcatagacaaaacggcaaagtacattgataggggctgctggtccaggaggatctttatatcctggccaagtatggcatttgtctctgtcacctggaaaatggccctggagcaggcatgtgactgactcgttctgcaaggcctccagacagctaaatgaagatggcttctagctaagaaacagaggggttcatacacatgcaaagataacttccccacttgtctctgatggaaactcaagggccatgtggaaatggcgtggattgggactcagctgatgaacttggaagcccagcccagccagtcagcagtttggtccagaacctgtctgcacctcagtgtctagtaaatggaggaagggagaaggagatgaaactaattgacattgggcctcttttatgaaccaggcactttgctattctcatccagtcttaccttgacggcaggaatgcaaaatggcaagaggctccatccttgaatcaccatttggagaagagttaactgacaaacaagatctgcactgaattatatgccacagggagccaggataggaggacaacatggtggatccagcatggaacttacaactgaggctagtttgatggacatggcaccaaatctcatgagagtgacaataagctagaacagaagttttggaaagccaaagaaaagactgtaactgcacacaataagcagaaaacatttgtgctttctgtctccatctatcacccaaacagtcaaacctggagaaaactacttttcctctctacaccaacatgcatgctatttgcataacacataacacaaggaagtgaagcaatttgctcaagataatgtgtctagtcatcaaaaggactggtcagtgcctcgatcttgatgatgatggatactgcttattggatactctcacatctcaacaatccaaacaccttccacaatgacctgcttaatctgacccctggcacatctcaaatcacagtctctgtctgtagtagataaaaaaaaatggacacacactttgcaataccacccatcaagagattaagtaactttcttcatcccttgaatctagtgggctcttgtgactaccaatagaatttggtggaagtgacactctgccttctgcaacaaggcacctgtgctgaaggagacttttagcctctgcccttgcctccctgaatagtgcctccatgtgaagaagaccaagctaacctactagagacatggctccaccaagaaccagtagcagctgcctggacaaggccatcttagaccacccaaccctagtcaagacagcagaatgactgcagctcggtgaattgtgttttaagctgctaagttttcagtggtttattaggcagcaatacataactgaaataccctttcaccctcccgactttaggctccagcctttctgatcttctcttaagccttggaacatgccattgacttttccaccctgagactttgcatgttattccttatgcataaaatacattcctctttccacctgtcaaatggtttaactcccttttatcatttaggccactagcttaaaattcacatgcagagagaattctttactgagcaaccatataccccagatttcttattcttcatatcaggcttttcttattttttcattgcgcatatcacaaagggcaattaattaattaattgtttgtttgtttgttattgcctattttccccctatccagatgtaagctccatgagagtggttggaggcaatgtttattctgttttccacttcaccttaagagagtgcgggaagagggtctcatccatatttctttggatccttttatcattttcctgcatactttcactgagagtgctctcatgtccatcagccagcacttgcttctcttttctgagggctgccccaggctcctgaagtccagcttggattgcctgcatgaaaacatagagagctaaaggctgggaacttgcatagccttagc

SEQ ID NO: 456320 - DNA, 2487 bp, Homo sapiens
cgccagccccgcgctcctccgggcagagcgcgtgtggcggccgagcacatgggcccgcgggccgggcgggctcggggcggccgggacgaggaggggcgacgacgagctgcgagcaaagatgtgccccgggacccccggcaccttccagtggatttccttgcggaaaggatgttggcggtccctgtgacctgtggagacacggccagatctgccctccagttgaactggtttgttgaactttatggatggagccagccaacaggatgacattgtggcagagaaagaagcttgcagcttcttgcatcagaaaatcagatagagcctctctggcaagaagctgcagacacaaaagaagcttgcattgaaggtgactcagctctggcttttcagcaatgccctaacattggctatttaaaaagaggcaaagtagcttcagtgagacctcaaaccaattgcacagctagccactgcccataaagaagctactggtcagaaatgctggctccttcatagacaaaacggcaaagtacattgataggggctgctggtccaggaggatctttatatcctggccaagtatggcatttgtctctgtcacctggaaaatggccctggagcaggcatgtgactgactcgttctgcaaggcctccagacagctaaatgaagatggcttctagctaagaaacagaggggttcatacacatgcaaagataacttccccacttgtctctgatggaaactcaagggccatgtggaaatggcgtggattgggactcagctgatgaacttggaagcccagcccagccagtcagcagtttggtccagaacctgtctgcacctcagtgtctagtaaatggaggaagggagaaggagatgaaactaattgacattgggcctcttttatgaaccaggcactttgctattctcatccagtcttaccttgacggcaggaatgcaaaatggcaagaggctccatccttgaatcaccatttggagaagagttaactgacaaacaagatctgcactgaattatatgccacagggagccaggataggaggacaacatggtggatccagcatggaacttacaactgaggctagtttgatggacatggcaccaaatctcatgagagtgacaataagctagaacagaagttttggaaagccaaagaaaagactgtaactgcacacaataagcagaaaacatttgtgctttctgtctccatctatcacccaaacagtcaaacctggagaaaactacttttcctctctacaccaacatgcatgctatttgcataacacataacacaaggaagtgaagcaatttgctcaagataatgtgtctagtcatcaaaaggactggtcagtgcctcgatcttgatgatgatggatactgcttattggatactctcacatctcaacaatccaaacaccttccacaatgacctgcttaatctgacccctggcacatctcaaatcacagtctctgtctgtagtagataaaaaaaaatggacacacactttgcaataccacccatcaagagattaagtaactttcttcatcccttgaatctagtgggctcttgtgactaccaatagaatttggtggaagtgacactctgccttctgcaacaaggcacctgtgctgaaggagacttttagcctctgcccttgcctccctgaatagtgcctccatgtgaagaagaccaagctaacctactagagacatggctccaccaagaaccagtagcagctgcctggacaaggccatcttagaccacccaaccctagtcaagacagcagaatgactgcagctcggtgaattgtgttttaagctgctaagttttcagtggtttattaggcagcaatacataactgaaataccctttcaccctcccgactttaggctccagcctttctgatcttctcttaagccttggaacatgccattgacttttccaccctgagactttgcatgttattccttatgcataaaatacattcctctttccacctgtcaaatggtttaactcccttttatcatttaggccactagcttaaaattcacatgcagagagaattctttactgagcaaccatataccccagatttcttattcttcatatcaggcttttcttattttttcattgcgcatatcacaaagggcaattaattaattaattgtttgtttgtttgttattgcctattttccccctatccagatgtaagctccatgagagtggttggaggcaatgtttattctgttttccacttcaccttaagagagtgcgggaagagggtctcatccatatttctttggatccttttatcattttcctgcatactttcactgagagtgctctcatgtccatcagccagcacttgcttctcttttctgagggctgccccaggctcctgaagtccagcttggattgcctgcatgaaaacatagagagctaaaggctgggaacttgcatagccttagc

SEQ ID NO: 456321 - DNA, 580 bp, Homo sapiens
ctttggaatgaaggcagtggaggccaagagacctctaggtcaaagccaggcgggagggtcctctcaggggcccagccgacaagttgcatttctccctcagaggcctgaagaggcagaacaccccagaggagcctggggccaccacccagcatcactgtgggaaaacggcagcaggaaatgtcctctcgcctgcgtgctccacctcggtccacgccttccctccttctggaagccttgcctgaccactggcctgccccttctatgggaatcactactgaccttgcagcttattatagacttatatgttttttgcatgtctgacacccatgactccacctggaccttatggctccacccagaagcaattcagcccaacaggaggacagcttcaacccattacgatttcatctctgccccaaccactcagcagcaagcacctgttacctgtccacccccaccccttcccccaaactgcctttgaaaaatccctaacctatgagctttgaataagatgagtacgaacttcatcgcccatgtggcgtggccggcctcgtgtctattaaattctttttctactaca

SEQ ID NO: 456322 - DNA, 437 bp, Homo sapiens
cgaggcctctcgctcagcgaacagcagcagcgtctattttacaccaacccccctactaagctgcagacattattccgaaggttataagatatgcaactttcccaattgctcctgtgaataacactactattacagattggccttttgaaatatctttccaggttttttgcatgtctgacacccatgactccacctggaccttatggctccacccagaagcaattcagcccaacaggaggacagcttcaacccattacgatttcatctctgccccaaccactcagcagcaagcacctgttacctgtccacccccaccccttcccccaaactgcctttgaaaaatccctaacctatgagctttgaataagatgagtacgaacttcatcgcccatgtggcgtggccggcctcgtgtctattaaattctttttctactaca

SEQ ID NO: 456323 - DNA, 481 bp, Homo sapiens
cctgcccatttgcattggtatctccaaggccaagctagagaaggcacacaataggctttccactaatatttgtgaatgaatgaatgaacagagagaggagttttctttccacagtttccttctacctgctactccttgagcatatgaggctggaatctaagccctgaggtcactcactgctctcctgggtactatccctggcctcccgtccttttccttgagcttctgtgctctgcaaggctttctcattatcctttaggctacagagaaacaaggagacgggagagccttgaaatggaccttcaagattacaatgtgtagctgacattgtcagttaagttgggcagatctgacttcgctgattaagtggatgtatgagccgatcctccccagaagctgggatcagcttccccatctgatggtgagtcagacctgctggggtttgggtcctcgctccagcatggctgcctgtgtgaccttg

SEQ ID NO: 456324 - DNA, 559 bp, Homo sapiens
tcgttagggagttacactctgttaggtccaaacacaaggaggaaagagtgactgaatactgctctgagtcagtgactgtgacaagactgtttttttcttcttccctgttgcaggcctgatcttttggccagaaggagattaaaaagatgcccctcaagatggctgtgcctgtcagctgcatggagcttcgttcaagtattttctgagcctgatggatttacagtgatcttcagtggtctggggaataacgctggtggaaccatgcactggaatgacacacgcccggcacatttcaggatactaaaagtggttttaagggaggctgtggctgaatgcctcatggattcttacagcttggatgtccatgggggacgaaggactgcagctggctgagagggttgagatctctgtttacttagatctctgccaacttcctttgggtctccctatggaatgtaagaccccgactcttcctggtgaagcatctgatgcacgttccatccggcgctcagctgggcttgaggtgaggctgtcctggctggtcacggagggttcactg

SEQ ID NO: 456325 - DNA, 600 bp, Homo sapiens
ttttaatttagacaaatgggattctgctatagatctcaatttggttcttttgcttactcaacactctttttcagagccagtcttggtgctctgtgttcacctggttcatctgaggagctgcatctaccctgcccatgccatagatcctgccctgtttgcttctcctgttgctgctagtggacatgagaaggacagaataacgggctcccagattcacaagccccaccaagaggatcaccccaggaacgcttggaggctgaggagttcactgaggctactgcatcttgagactcaggatgaagacccagcttggggctgtcaaaggttttttgcatgtctgacacccatgactccacctggaccttatggctccacccagaagcaattcagcccaacaggaggacagcttcaacccattacgatttcatctctgccccaaccactcagcagcaagcacctgttacctgtccacccccaccccttcccccaaactgcctttgaaaaatccctaacctatgagctttgaataagatgagtacgaacttcatcgcccatgtggcgtggccggcctcgtgtctattaaattctttttctactaca

SEQ ID NO: 456326 - DNA, 1579 bp, Homo sapiens
cgccagccccgcgctcctccgggcagagcgcgtgtggcggccgagcacatgggcccgcgggccgggcgggctcggggcggccgggacgaggaggggcgacgacgagctgcgagcaaagatgtgccccgggacccccggcaccttccagtggatttccttgcggaaaggatgttggcggtccctgtgacctgtggagacacggccagatctgccctccagcctgatcttttggccagaaggagattaaaaagatgcccctcaagatggctgtgcctgtcagctgcatggagcttcgttcaagtattttctgagcctgatggatttacagtgatcttcagtggtctggggaataacgctggtggaaccatgcactggaatgacacacgcccggcacatttcaggatactaaaagtggttttaagggaggctgtggctgaatgcctcatggattcttacagcttggatgtccatgggggacgaaggactgcagctggctgagagggttgagatctctgtttacttagatctctgccaacttcctttgggtctccctatggaatgtaagaccccgactcttcctggtgaagcatctgatgcacgttccatccggcgctcagctgggcttgagctgaccatactccctggagccttctcccgaggtgcgcgggtgaccttggcacatacagccatcatgatggtactttaagtggaggctgaatcatctcccctttgagctgcttggcacgtggctcccttggtgttccccttttactgccaggacactgagatttggagaggtaagtggcttacctgaggccatgtgctaacagagaagatgaagagatgattgaaacaggcctaagaccagacctaagggtctgtacattttccacatactttccatatctttagaggcctgaccaaagcagatcttttcctttcttctaggtaagtccaaaggcacctgcctgctgggcccactgttttctaactttcctaactttctgatcccttggaggtgataatcaaatattctagtctgaggcattgggatacatggtgctaggttctgagactctgcgtcaggcctgaaccctgcattttgtggaggtgggtgggagaatgttcccctggggaacatgcctagacacgggggacaacagttgccctcatggggaggtacctgtttactcgctgttatgggaccgctttcacaaaaccactgcaggtgagtgagttcctgctgaatatcaggcctggtgtctctagactcattatttcccccacccaacccctatgttagttcatctcgagccacatttttattgccataatccaggcctggacaggccaagatcttttaacaattttaattactgaaaataataactgcatttttttttaaagcccaactttttggtagagtcagcccaaaatacagtctttgtgttgccatctgggaactggatttggaattgttcttccatgagactgcagagcagaacggcagggccagaggtcccacgagctggtcagacccggttctgctccttgctggctgagtgaccttgggcattgt

SEQ ID NO: 456327 - DNA, 694 bp, Homo sapiens
cgccagccccgcgctcctccgggcagagcgcgtgtggcggccgagcacatgggcccgcgggccgggcgggctcggggcggccgggacgaggaggggcgacgacgagctgcgagcaaagatgtgccccgggacccccggcaccttccagtggatttccttgcggaaaggatgttggcggtccctgtgacctgtggagacacggccagatctgccctccagcctgatcttttggccagaaggagattaaaaagatgcccctcaagatggctgtgcctgtcagctgcatggagcttcgttcaagtattttctgagcctgatggatttacagtgatcttcagtggtctggggaataacgctggtggaaccatgcactggaatgacacacgcccggcacatttcaggatactaaaagtggttttaagggaggctgtggctgaatgcctcatggattcttacagcttggatgtccatgggggacgaaggactgcagctggctgagagggttgagatctctgtttacttagatctctgccaacttcctttgggtctccctatggaatgtaagaccccgactcttcctggtgaagcatctgatgcacgttccatccggcgctcagctgggcttgagattcctgggaacaccaccatggagggcctggcctttggcggtggacagtctgtggctgggtgggac

SEQ ID NO: 456328 - DNA, 1543 bp, Homo sapiens
cccctctgctatcagaaaacaagaatggaagattgggaagagatggcatagtgtggatctgcctgaaaaacatgcacaagaccactttgcctccaaactcaatttcaaaatctatggaagctgaatcccaagaatgcctgcagactcaagggttatccatgggaggacatggcaccaaatctcatgagagtgacaataagctagaacagaagttttggaaagccaaagaaaagactgtaactgcacacaataagcagaaaacatttgtgctttctgtctccatctatcacccaaacagtcaaacctggagaaaactacttttcctctctacaccaacatgcatgctatttgcataacacataacacaaggaagtgaagcaatttgctcaagataatgtgtctagtcatcaaaaggactggtcagtgcctcgatcttgatgatgatggatactgcttattggatactctcacatctcaacaatccaaacaccttccacaatgacctgcttaatctgacccctggcacatctcaaatcacagtctctgtctgtagtagataaaaaaaaatggacacacactttgcaataccacccatcaagagattaagtaactttcttcatcccttgaatctagtgggctcttgtgactaccaatagaatttggtggaagtgacactctgccttctgcaacaaggcacctgtgctgaaggagacttttagcctctgcccttgcctccctgaatagtgcctccatgtgaagaagaccaagctaacctactagagacatggctccaccaagaaccagtagcagctgcctggacaaggccatcttagaccacccaaccctagtcaagacagcagaatgactgcagctcggtgaattgtgttttaagctgctaagttttcagtggtttattaggcagcaatacataactgaaataccctttcaccctcccgactttaggctccagcctttctgatcttctcttaagccttggaacatgccattgacttttccaccctgagactttgcatgttattccttatgcataaaatacattcctctttccacctgtcaaatggtttaactcccttttatcatttaggccactagcttaaaattcacatgcagagagaattctttactgagcaaccatataccccagatttcttattcttcatatcaggcttttcttattttttcattgcgcatatcacaaagggcaattaattaattaattgtttgtttgtttgttattgcctattttccccctatccagatgtaagctccatgagagtggttggaggcaatgtttattctgttttccacttcaccttaagagagtgcgggaagagggtctcatccatatttctttggatccttttatcattttcctgcatactttcactgagagtgctctcatgtccatcagccagcacttgcttctcttttctgagggctgccccaggctcctgaagtccagcttggattgcctgcatgaaaacatagagagctaaaggctgggaacttgcatagccttagc

SEQ ID NO: 456329 - DNA, 716 bp, Homo sapiens
cgccagccccgcgctcctccgggcagagcgcgtgtggcggccgagcacatgggcccgcgggccgggcgggctcggggcggccgggacgaggaggggcgacgacgagctgcgagcaaagatgtgccccgggacccccggcaccttccagtggatttccttgcggaaaggatgttggcggtccctgtgacctgtggagacacggccagatctgccctccaatggggaagggtggaagagaggaggagaaacatagggcaccagagtatttgaggacctacagaacagcaggagctcaagacggtctaccactggatacaaaaaaagagccaccaggctggctggatgcagaagagagagatacaagaccacatgatggaaggggccatcctcactgacttcaccacctggaaggaagctatggaggagaattgcccaaacaaatacaactgcatcaaattttgcctctgtaagaaatagatctttgttatgctacaataggtccctgagatttgggattttatttgttatagtagctagcattatttttacttaataaatggttcttaataaatggtttacttaataaatggttctcacggttctgtaaagctgcaacatgcttttaaaatgttcagacacaatgatcaaacaacaggaagccaataccgggactttataaactctacaaaacaccattcggataataacaaaacggg

SEQ ID NO: 456330 - DNA, 1542 bp, Homo sapiens
cgccagccccgcgctcctccgggcagagcgcgtgtggcggccgagcacatgggcccgcgggccgggcgggctcggggcggccgggacgaggaggggcgacgacgagctgcgagcaaagatgtgccccgggacccccggcaccttccagtggatttccttgcggaaaggatgttggcggtccctgtgacctgtggagacacggccagatctgccctccagcctgatcttttggccagaaggagattaaaaagatgcccctcaagatggctgtgcctgtcagctgcatggagcttcgttcaagtattttctgagcctgatggatttacagtgatcttcagtggtctggggaataacgctggtggaaccatgcactggaatgacacacgcccggcacatttcaggatactaaaagtggttttaagggaggctgtggctgaatgcctcatggattcttacagcttggatgtccatgggggacgaaggactgcagctggctgagagggttgagatctctgtttacttagatctctgccaacttcctttgggtctccctatggaatgtaagaccccgactcttcctggtgaagcatctgatgcacgttccatccggcgctcagctgggcttgagctgaccatactccctggagccttctcccgaggtgcgcgggtgaccttggcacatacagccatcatgatggtactttaagtggaggctgaatcatctcccctttgagctgcttggcacgtggctcccttggtgttccccttttactgccaggacactgagatttggagagaatcctgttacacctgggatttaggcactttcaatctgaaaaaatacatatcctttcagcactctggacggacttgagaactgtccttacgtgacctaaagctggagtattttgagattggagaattaagagccagtcttggtgctctgtgttcacctggttcatctgaggagctgcatctaccctgcccatgccatagatcctgccctgtttgcttctcctgttgctgctagtggacatgaggtaaccacagcctagttctgtgataagctcttcacacctgtacccatatggactgtgggagagtttctctgatatggactgtgatgcggaaggacagaataacgggctcccagattcacaagccccaccaagaggatcaccccaggaacgcttggaggctgaggagttcactgaggctactgcatcttgagactcaggatgaagacccagcttggggctgtcaaaggttttttgcatgtctgacacccatgactccacctggaccttatggctccacccagaagcaattcagcccaacaggaggacagcttcaacccattacgatttcatctctgccccaaccactcagcagcaagcacctgttacctgtccacccccaccccttcccccaaactgcctttgaaaaatccctaacctatgagctttgaataagatgagtacgaacttcatcgcccatgtggcgtggccggcctcgtgtctattaaattctttttctactaca

SEQ ID NO: 456331 - DNA, 1615 bp, Homo sapiens
cgccagccccgcgctcctccgggcagagcgcgtgtggcggccgagcacatgggcccgcgggccgggcgggctcggggcggccgggacgaggaggggcgacgacgagctgcgagcaaagatgtgccccgggacccccggcaccttccagtggatttccttgcggaaaggatgttggcggtccctgtgacctgtggagacacggccagatctgccctccagcctgatcttttggccagaaggagattaaaaagatgcccctcaagatggctgtgcctgtcagctgcatggagcttcgttcaagtattttctgagcctgatggatttacagtgatcttcagtggtctggggaataacgctggtggaaccatgcactggaatgacacacgcccggcacatttcaggatactaaaagtggttttaagggaggctgtggctgaatgcctcatggattcttacagcttggatgtccatgggggacgaaggactgcagctggctgagagggttgagatctctgtttacttagatctctgccaacttcctttgggtctccctatggaatgtaagaccccgactcttcctggtgaagcatctgatgcacgttccatccggcgctcagctgggcttgagctgaccatactccctggagccttctcccgaggtgcgcgggtgaccttggcacatacagccatcatgatggtactttaagtggaggctgaatcatctcccctttgagctgcttggcacgtggctcccttggtgttccccttttactgccaggacactgagatttggagagaatcctgttacacctgggatttaggcactttcaatctgaaaaaatacatatcctttcagcactctggacggacttgagaactgtccttacgtgacctaaagctggagtattttgagattggagaattaaggctacagagaaacaaggagacgggagagccttgaaatggaccttcaagattacaatgtgtagctgacattgtcagttaagttgggcagatctgacttcgctgattaagtgaatgtatgagccgatcctccccagaagctgggatcagcttccccatctgatgagccagtcttggtgctctgtgttcacctggttcatctgaggagctgcatctaccctgcccatgccatagatcctgccctgtttgcttctcctgttgctgctagtggacatgagaaggacagaataacgggctcccagattcacaagccccaccaagaggatcaccccaggaacgcttggaggctgaggagttcactgaggctactgcatcttgagactcaggatgaagacccagcttggggctgtcaaaggttttttgcatgtctgacacccatgactccacctggaccttatggctccacccagaagcaattcagcccaacaggaggacagcttcaacccattacgatttcatctctgccccaaccactcagcagcaagcacctgttacctgtccacccccaccccttcccccaaactgcctttgaaaaatccctaacctatgagctttgaataagatgagtacgaacttcatcgcccatgtggcgtggccggcctcgtgtctattaaattctttttctactaca

SEQ ID NO: 456332 - DNA, 1794 bp, Homo sapiens
cgccagccccgcgctcctccgggcagagcgcgtgtggcggccgagcacatgggcccgcgggccgggcgggctcggggcggccgggacgaggaggggcgacgacgagctgcgagcaaagatgtgccccgggacccccggcaccttccagtggatttccttgcggaaaggatgttggcggtccctgtgacctgtggagacacggccagatctgccctccagcctgatcttttggccagaaggagattaaaaagatgcccctcaagatggctgtgcctgtcagctgcatggagcttcgttcaagtattttctgagcctgatggatttacagtgatcttcagtggtctggggaataacgctggtggaaccatgcactggaatgacacacgcccggcacatttcaggatactaaaagtggttttaagggaggctgtggctgaatgcctcatggattcttacagcttggatgtccatgggggacgaaggactgcagctggctgagagggttgagatctctgtttacttagatctctgccaacttcctttgggtctccctatggaatgtaagaccccgactcttcctggtgaagcatctgatgcacgttccatccggcgctcagctgggcttgagctgaccatactccctggagccttctcccgaggtgcgcgggtgaccttggcacatacagccatcatgatggtactttaagtggaggctgaatcatctcccctttgagctgcttggcacgtggctcccttggtgttccccttttactgccaggacactgagatttggagagaatcctgttacacctgggatttaggcactttcaatctgaaaaaatacatatcctttcagcactctggacggacttgagaactgtccttacgtgacctaaagctggagtattttgagattggagaattaagagtgtgggcaccctggcttcaagctcacgagaaaccagaaggaagtcactgtgcatagccatcccctaagaagagggcattcctgctcttccttctccatggctagaggatctacatgaactatttagattttttctacctgggagatttaactcctctctcctatttatttatttatatatcagcatggacttgcaggccaacagagattttgagaaacacattgaaggatctgttaacacttgatatacccaataaaagcagtggttgtgccagtgctgatctgtcttgatgtgaatgtgaacaatgggaacctgagctgagcagttaatgctagggtgacagaaactggacctctcccaagacatgtgacagagtaatacagcagccaacttcttcgccaaattaaagttttacaagatttaacctgtcatcaagacctgggattttggtgaaggacagaataacgggctcccagattcacaagccccaccaagaggatcaccccaggaacgcttggaggctgaggagttcactgaggctactgcatcttgagactcaggatgaagacccagcttggggctgtcaaaggttttttgcatgtctgacacccatgactccacctggaccttatggctccacccagaagcaattcagcccaacaggaggacagcttcaacccattacgatttcatctctgccccaaccactcagcagcaagcacctgttacctgtccacccccaccccttcccccaaactgcctttgaaaaatccctaacctatgagctttgaataagatgagtacgaacttcatcgcccatgtggcgtggccggcctcgtgtctattaaattctttttctactaca

SEQ ID NO: 456333 - DNA, 1944 bp, Homo sapiens
cgccagccccgcgctcctccgggcagagcgcgtgtggcggccgagcacatgggcccgcgggccgggcgggctcggggcggccgggacgaggaggggcgacgacgagctgcgagcaaagatgtgccccgggacccccggcaccttccagtggatttccttgcggaaaggatgttggcggtccctgtgacctgtggagacacggccagatctgccctccagcctgatcttttggccagaaggagattaaaaagatgcccctcaagatggctgtgcctgtcagctgcatggagcttcgttcaagtattttctgagcctgatggatttacagtgatcttcagtggtctggggaataacgctggtggaaccatgcactggaatgacacacgcccggcacatttcaggatactaaaagtggttttaagggaggctgtggctgaatgcctcatggattcttacagcttggatgtccatgggggacgaaggactgcagctggctgagagggttgagatctctgtttacttagatctctgccaacttcctttgggtctccctatggaatgtaagaccccgactcttcctggtgaagcatctgatgcacgttccatccggcgctcagctgggcttgagctgaccatactccctggagccttctcccgaggtgcgcgggtgaccttggcacatacagccatcatgatggtactttaagtggaggctgaatcatctcccctttgagctgcttggcacgtggctcccttggtgttccccttttactgccaggacactgagatttggagagaatcctgttacacctgggatttaggcactttcaatctgaaaaaatacatatcctttcagcactctggacggacttgagaactgtccttacgtgacctaaagctggagtattttgagattggagaattaagagccagtcttggtgctctgtgttcacctggttcatctgaggagctgcatctaccctgcccatgccatagatcctgccctgtttgcttctcctgttgctgctagtggacatgaggtaaccacagcctagttctgtgataagctcttcacacctgtacccatatggactgtgggagagtttctctgatatggactgtgatgcggaaggacagaataacgggctcccagattcacaagccccaccaagaggatcaccccaggaacgcttggaggctgaggagttcactgaggctactgcatcttgagactcaggatgaagacccagcttggggctgtcaaaggttttttgcatgtctgacacccatgactccacctggaccttatggctccacccagaagcaattcagcccaacaggaggacagcttcaacccattacgatttcatctctgccccaaccactcagcagcaagcacctgttacctgtccacccccaccccttcccccaaactgcctttgaaaaatccctaacctatgagctttgaataagatgagtacgaacttcatcgcccatgtggcgtggccggcctcgtgtctattaaattctttttctactacagaacaagaaaaaacaactggcctccactggtctaaaagatggagatctccgaccccttcgctttagtgcggcacacacagtgaccctgcgtcactgctgaaatagccctcacacccctgcatcgcccagacgcaccatccccacataggaccatctcacccgatccgcttaattatccgtcgccccctattacccgttctcgtccattctatccaccgaccacccccacccagacgccacactagcccccacgcgtcacggacgcggctagccctccaccaccccccactcacaccatagacaccagcccccctgagactactacgccacaacacgaggacaccctccctccgatacctccctttcagttcgcctacgtctctactccacgcccactatgct

SEQ ID NO: 456334 - DNA, 826 bp, Homo sapiens
  misc_feature (3)..(3): n is a, c, g, or t
  misc_feature (8)..(8): n is a, c, g, or t
  misc_feature (12)..(12): n is a, c, g, or t
  misc_feature (20)..(20): n is a, c, g, or t
  misc_feature (43)..(43): n is a, c, g, or t
agntcgcngggnctgtcctngtgcctaagctgggtattggatnggattagctacagagaaacaaggagacgggagagccttgaaatggaccttcaagattacaatgtgtagctgacattgtcagttaagttgggcagatctgacttcgctgattaagtgaatgtatgagccgatcctccccagaagctgggatcagcttccccatctgatgagccagtcttggtgctctgtgttcacctggttcatctgaggagctgcatctaccctgcccatgccatagatcctgccctgtttgcttctcctgttgctgctagtggacatgaggtaaccacagcctagttctgtgataagctcttcacacctgtacccatatggactgtgggagagtttctctgatatggactgtgatgcggaaggacagaataacgggctcccagattcacaagccccaccaagaggatcaccccaggaacgcttggaggctgaggagttcactgaggctactgcatcttgagactcaggatgaagacccagcttggggctgtcaaaggttttttgcatgtctgacacccatgactccacctggaccttatggctccacccagaagcaattcagcccaacaggaggacagcttcaacccattacgatttcatctctgccccaaccactcagcagcaagcacctgttacctgtccacccccaccccttcccccaaactgcctttgaaaaatccctaacctatgagctttgaataagatgagtacgaacttcatcgcccatgtggcgtggccggcctcgtgtctattaaattctttttctactaca

SEQ ID NO: 456335 - DNA, 805 bp, Homo sapiens
gaagggcactggagacctaccaggggctgggccattggagtggtgggtgctggggagcttccgtgggcccctccaggtccactccttgctcttctctgccttgttttgtgcccagaaggctgacctgtgtggatgcattatcagggtggatgcaacacagggctgccatgctctctggtatcagtttggaaggcactggcaggatgggaaggcaggcggggagtgaggtcagggggcctatccttccactgcctccctgctgctccctgactgattcagagccagtcttggtgctctgtgttcacctggttcatctgaggagctgcatctaccctgcccatgccatagatcctgccctgtttgcttctcctgttgctgctagtggacatgagaaggacagaataacgggctcccagattcacaagccccaccaagaggatcaccccaggaacgcttggaggctgaggagttcactgaggctactgcatcttgagactcaggatgaagacccagcttggggctgtcaaaggttttttgcatgtctgacacccatgactccacctggaccttatggctccacccagaagcaattcagcccaacaggaggacagcttcaacccattacgatttcatctctgccccaaccactcagcagcaagcacctgttacctgtccacccccaccccttcccccaaactgcctttgaaaaatccctaacctatgagctttgaataagatgagtacgaacttcatcgcccatgtggcgtggccggcctcgtgtctattaaattctttttctactaca

SEQ ID NO: 456336 - DNA, 1030 bp, Homo sapiens
cgccagccccgcgctcctccgggcagagcgcgtgtggcggccgagcacatgggcccgcgggccgggcgggctcggggcggccgggacgaggaggggcgacgacgagctgcgagcaaagatgtgccccgggacccccggcaccttccagtggatttccttgcggaaaggatgttggcggtccctgtgacctgtggagacacggccagatctgccctccagcctgatcttttggccagaaggagattaaaaagatgcccctcaagatggctgtgcctgtcagctgcatggagcttcgttcaagtattttctgagcctgatggatttacagtgatcttcagtggtctggggaataacgctggtggaaccatgcactggaatgacacacgcccggcacatttcaggatactaaaagtggttttaagggaggctgtggctgaatgcctcatggattcttacagcttggatgtccatgggggacgaaggactgcagctggctgagagggttgagatctctgtttacttagatctctgccaacttcctttgggtctccctatggaatgtaagaccccgactcttcctggtgaagcatctgatgcacgttccatccggcgctcagctgggcttgagctgaccatactccctggagccttctcccgaggtgcgcgggtgaccttggcacatacagccatcatgatggtactttaagtggaggctgaatcatctcccctttgagctgcttggcacgtggctcccttggtgttccccttttactgccaggacactgagatttggagagaatcctgttacacctgggatttaggcactttcaatctgaaaaaatacatatcctttcagcactctggacggacttgagaactgtccttacgtgacctaaagctggagtattttgagattggagaattaagagtgtgggcaccctggcttcaagctcacgagaaaccaggtcgggatttaaacaatgttgggttaaagcaaagtttcataaagacagaatcaagaaaaaaaaaa

SEQ ID NO: 456337 - DNA, 1200 bp, Homo sapiens
cgccagccccgcgctcctccgggcagagcgcgtgtggcggccgagcacatgggcccgcgggccgggcgggctcggggcggccgggacgaggaggggcgacgacgagctgcgagcaaagatgtgccccgggacccccggcaccttccagtggatttccttgcggaaaggatgttggcggtccctgtgacctgtggagacacggccagatctgccctccagcctgatcttttggccagaaggagattaaaaagatgcccctcaagatggctgtgcctgtcagctgcatggagcttcgttcaagtattttctgagcctgatggatttacagtgatcttcagtggtctggggaataacgctggtggaaccatgcactggaatgacacacgcccggcacatttcaggatactaaaagtggttttaagggaggctgtggctgaatgcctcatggattcttacagcttggatgtccatgggggacgaaggactgcagctggctgagagggttgagatctctgtttacttagatctctgccaacttcctttgggtctccctatggaatgtaagaccccgactcttcctggtgaagcatctgatgcacgttccatccggcgctcagctgggcttgagctgaccatactccctggagccttctcccgaggtgcgcgggtgaccttggcacatacagccatcatgatggtactttaagtggaggctgaatcatctcccctttgagctgcttggcacgtggctcccttggtgttccccttttactgccaggacactgagatttggagagaatcctgttacacctgggatttaggcactttcaatctgaaaaaatacatatcctttcagcactctggacggacttgagaactgtccttacgtgacctaaagctggagtattttgagattggagaattaagagccagtcttggtgctctgtgttcacctggttcatctgaggagctgcatctaccctgcccatgccatagatcctgccctgtttgcttctcctgttgctgctagtggacatgagaaggacagaataacgggctcccagattcacaagccccaccaagaggatcaccccaggaacgcttggaggctgaggagttcactgaggctactgcatcttgagactcaggatgaagacccagcttggggctgtcaaaggtgcgacctgccagctgagacct

SEQ ID NO: 456338 - DNA, 861 bp, Homo sapiens
cgccagccccgcgctcctccgggcagagcgcgtgtggcggccgagcacatgggcccgcgggccgggcgggctcggggcggccgggacgaggaggggcgacgacgagctgcgagcaaagatgtgccccgggacccccggcaccttccagtggatttccttgcggaaaggatgttggcggtccctgtgacctgtggagacacggccagatctgccctccagcctgatcttttggccagaaggagattaaaaagatgcccctcaagatggctgtgcctgtcagctgcatggagcttcgttcaagtattttctgagcctgatggatttacagtgatcttcagtggtctggggaataacgctggtggaaccatgcactggaatgacacacgcccggcacatttcaggatactaaaagtggttttaagggaggctgtggctgaatgcctcatggattcttacagcttggatgtccatgggggacgaaggactgcagctggctgagagggttgagatctctgtttacttagatctctgccaacttcctttgggtctccctatggaatgtaagaccccgactcttcctggtgaagcatctgatgcacgttccatccggcgctcagctgggcttgagaatcctgttacacctgggatttaggcactttcaatctgaaaaaatacatatcctttcagcactctggacggacttgagaactgtccttacgtgacctaaagctggagtattttgagattggagaattaagagtgtgggcaccctggcttcaagctcacgagaaaccaggtcgggatttaaacaatgttgggttaaagcaaagtttcataaagacagaatcaagaaaaaaaaaa

SEQ ID NO: 456339 - DNA, 783 bp, Homo sapiens
cgccagccccgcgctcctccgggcagagcgcgtgtggcggccgagcacatgggcccgcgggccgggcgggctcggggcggccgggacgaggaggggcgacgacgagctgcgagcaaagatgtgccccgggacccccggcaccttccagtggatttccttgcggaaaggatgttggcggtccctgtgacctgtggagacacggccagatctgccctccagcctgatcttttggccagaaggagattaaaaagatgcccctcaagatggctgtgcctgtcagctgcatggagcttcgttcaagtattttctgagcctgatggatttacagtgatcttcagtggtctggggaataacgctggtggaaccatgcactggaatgacacacgcccggcacatttcaggatactaaaagtggttttaagggaggctgtggctgaatgcctcatggattcttacagcttggatgtccatgggggacgaaggactgcagctggctgagagggttgagatctctgtttacttagatctctgccaacttcctttgggtctccctatggaatgtaagaccccgactcttcctggtgaagcatctgatgcacgttccatccggcgctcagctgggcttgagacttcgcaggtgagcagtaacggaaatcagccccgtttattcctcccagcacctgccttatccaactccccacgctgtggctgagtcccagcctgctatggaagcatcactggactctcgccagggtctggcagtcacgccgttgtgcacgacgg

SEQ ID NO: 456340 - DNA, 1772 bp, Homo sapiens
cgccagccccgcgctcctccgggcagagcgcgtgtggcggccgagcacatgggcccgcgggccgggcgggctcggggcggccgggacgaggaggggcgacgacgagctgcgagcaaagatgtgccccgggacccccggcaccttccagtggatttccttgcggaaaggatgttggcggtccctgtgacctgtggagacacggccagatctgccctccaatggcatcaccagaaaccaagaagatggtaaggcctggaggtggcagagctgaagaggttgaactggtttgttgaactttatggatggagccagccaacaggatgacattgtggcagagaaagaagcttgcagcttcttgcatcagaaaatcagatagagcctctctggcaagaagctgcagacacaaaagaagcttgcattgaagacggcaggaatgcaaaatggcaagaggctccatccttgaatcaccatttggagaagagttaactgacaaacaagatctgcactgaattatatgccacagggagccaggataggaggacaacatggtggatccagcatggaacttacaactgaggctagtttgatgtaacacaaggaagtgaagcaatttgctcaagataatgtgtctagtcatcaaaaggactggtcagtgcctcgatcttgatgatgatggatactgcttattggatactctcacatctcaacaatccaaacaccttccacaatgacctgcttaatctgacccctggcacatctcaaatcacagtctctgtctgtagtagataaaaaaaaatggacacacactttgcaataccacccatcaagagattaagtaactttcttcatcccttgaatctagtgggctcttgtgactaccaatagaatttggtggaagtgacactctgccttctgcaacaaggcacctgtgctgaaggagacttttagcctctgcccttgcctccctgaatagtgcctccatgtgaagaagaccaagctaacctactagagacatggctccaccaagaaccagtagcagctgcctggacaaggccatcttagaccacccaaccctagtcaagacagcagaatgactgcagctcggtgaattgtgttttaagctgctaagttttcagtggtttattaggcagcaatacataactgaaataccctttcaccctcccgactttaggctccagcctttctgatcttctcttaagccttggaacatgccattgacttttccaccctgagactttgcatgttattccttatgcataaaatacattcctctttccacctgtcaaatggtttaactcccttttatcatttaggccactagcttaaaattcacatgcagagagaattctttactgagcaaccatataccccagatttcttattcttcatatcaggcttttcttattttttcattgcgcatatcacaaagggcaattaattaattaattgtttgtttgtttgttattgcctattttccccctatccagatgtaagctccatgagagtggttggaggcaatgtttattctgttttccacttcaccttaagagagtgcgggaagagggtctcatccatatttctttggatccttttatcattttcctgcatactttcactgagagtgctctcatgtccatcagccagcacttgcttctcttttctgagggctgccccaggctcctgaagtccagcttggattgcctgcatgaaaacatagagagctaaaggctgggaacttgcatagccttagc

SEQ ID NO: 456341 - DNA, 823 bp, Homo sapiens
cgccagccccgcgctcctccgggcagagcgcgtgtggcggccgagcacatgggcccgcgggccgggcgggctcggggcggccgggacgaggaggggcgacgacgagctgcgagcaaagatgtgccccgggacccccggcaccttccagtggatttccttgcggaaaggatgttggcggtccctgtgacctgtggagacacggccagatctgccctccaatggcatcaccagaaaccaagaagatggtaaggcctggaggtggcagagctgaagaggcatggacccttctcctctcaccccccagcacatatgaaggggtatggacagtgttggaacaagatggtcttggattcagaaataaaaggagtcagaagctgaagacctaagggtaacacaagacttccgggttctggccgggcgcggtggctcacgcctgtaatcccagcactttgggaggccgaggcgggcggatcacgaggtcaggagatcgagaccatcccggctaaaacggcgaaaccccgtctctactaaaaatacaaaaaattagccgggcgtagtggcgggcgcctgtagtcccagctacttgggaggctgaggcaggagaatggcgtgaacccgggaggcggagcttgcagtgagccgagatcccgccactgcactccagcctgggcgacagagcgagactccgtctcaaaaaaaaaaaaaaaagacttccgggttctgaaagcagtgcagcttggaattttcagaaagtgaattgacttcctgtagctgattgttttttattttaggaaaataaaaattattactttttgtttaaatg

SEQ ID NO: 456342 - DNA, 938 bp, Homo sapiens
cgccagccccgcgctcctccgggcagagcgcgtgtggcggccgagcacatgggcccgcgggccgggcgggctcggggcggccgggacgaggaggggcgacgacgagctgcgagcaaagatgtgccccgggacccccggcaccttccagtggatttccttgcggaaaggatgttggcggtccctgtgacctgtggagacacggccagatctgccctccagatttattaggagaaaaaccttcccggaagctgcagaaggacaaatacagaatccgtgtctgggagaaacctcgtggcctggtctccattatttgagatgagttacatcttggagatggcatcaccagaaaccaagaagatggtaaggcctggaggtggcagagctgaagaggcatggacccttctcctctcaccccccagcacatatgaaggggtatggacagtgttggaacaagatggtcttggattcagaaataaaaggagtcagaagctgaagacctaagggtaacacaagacttccgggttctggccgggcgcggtggctcacgcctgtaatcccagcactttgggaggccgaggcgggcggatcacgaggtcaggagatcgagaccatcccggctaaaacggcgaaaccccgtctctactaaaaatacaaaaaattagccgggcgtagtggcgggcgcctgtagtcccagctacttgggaggctgaggcaggagaatggcgtgaacccgggaggcggagcttgcagtgagccgagatcccgccactgcactccagcctgggcgacagagcgagactccgtctcaaaaaaaaaaaaaaaagacttccgggttctgaaagcagtgcagcttggaattttcagaaagtgaattgacttcctgtagctgattgttttttattttaggaaaataaaaattattactttttgtttaaatg

SEQ ID NO: 456343 - DNA, 1979 bp, Homo sapiens
tctttttagttgttttgtctttttaagcaagatgaaaacctttctattagggattttggggttgggaggggatgggcagagatataaaccccagcctttaagactttgacaattgtacgtaaatacagatgtgtataaatataggcacatgcatatttttatgtgaaagttgattttaaaaaactaaaaaaatctaaactgcactcttattgataccatcataacgcaagtgggaaaaataagagtacgcagtctaatttaatttcatgcagtgggaaaatatatatgtgtgcttctgtaacatcctgaaaacatagctttccatcccctgttggctttgaatggtgggccgagcacccaggtcgtctgtattttggttttcttttgctaagcagagatcttgaattcttcaaggtgctgatagcaactgctggctcctttctgtagtcacacacctaatgctagtttagtgattcaaaatgcatcacatttttaggcaggacctagattttccctgtcaacctaagatgaaaataatttcagtgttgattcagaactgaacattaagtaggccctcgtcctgcagttggccacttgagtgttttgttttgtttttattttttaaggtgggcattttcctttaacctctactttttcaaaagcaacaaaggggcctcaacctgagtttcctatgggcctctcttctgcatccccaaagcggccaagagcaaatcctggggggataagaaaaaagtgtaaactaggtaggattgtgatgctcaaaataaccatctagcaatatcttggagcttgagaatagattttgtgggcttatttcttcttgcctcttccccatcctttcaagagagaacttatttttgaaaagtatctatatatacacacacacacacacacacacatattattatttaggtttttataccatactgtattggcgagaataccactatcattgtcctttacagtctatttcttcccccaagtcttggtctttttttattttctattttttcatgaaccacacaggagactttaacatcctggtcttttctgtttcttctttgtttccccaagtttgtctgtccccctttgccttccctgagtgttgaacatcaggtagtaaaaggctaaacgcaatttcttgcatgtcaatctattctttttctatgtttgactctgatgcagtgtgtttagcgtgtctagtagctggctactcctatttaaaaactcttcctggtagaagacaacccaaagacccttttcgatgaggtggtttctcattctacatcctctgatctctatagactgtaggatgctttgctttcaaagataactgggttagagggtggggtgtgcaataggtgatttatcatggtttttttcattatcaatattacatggatgattttctcagattcttctgaaagaagaaattgacaggcactgctagattcagctattgaatggctgaagagattgagtatttgaccttctctcaaaatcataaagtgagaattcataaggcacccaatgttaagatttatccagatttttacattttgatttcttctctctgtggggtggcaagttgagggagcattcttcattttagcttttacctgacaaccaaacttgcctttaccccatccctagaattggtgctcttggaatattgctgttaccatcatttttggggggccatcttcctaatgctacacacagcctgacaggggagcagcagatgaaagggtatgctattctgtttccagatgtttctttatgtaaatatgacgccaatgtaaatcctgtgtcaagatcatagagaatggtgctttttactacagttagcacatgcatttttagaaactactacatgttttagagaatctttgctgtgtatatgtaaactgtattgttcaactgttaacaaataataaattatttcattattaaagaaa

SEQ ID NO: 456344 - DNA, 575 bp, Homo sapiens
  misc_feature (407)..(407): n is a, c, g, or t
  misc_feature (422)..(423): n is a, c, g, or t
  misc_feature (434)..(436): n is a, c, g, or t
  misc_feature (499)..(500): n is a, c, g, or t
  misc_feature (538)..(538): n is a, c, g, or t
cccggagttgttgcacagttgtttccgggaagcgggactccaaatgggtcgcagtcgcagccgctctccacggagggaacgtaggcgttcccggtccacatcccgggagagagaacgcaggcgccgagaaaggtccaggtctcgggagagagatcggagaaggagccgctcgcgatccccgcaccgaagacgctcccgatctccaagacgacatagatccacatctccttccccttctcgactgaaagaaagaagagatgaggaaaagaaagaaacaaaagaaacaaagagcaaagaacggcagattactgaggaagacttagagggcaaaacagaggaagaaatagaaatgatgaagttaatgggatttgcctcctttgactccacaaaaaaggtggatggctctngtaaatgcccctatnngccataatgtnnnctctcagaaaagagggaagctacagggcagctaccacccccctccccccccccgccccccctnnaaccagtacccttgtgggattttcaattgccatgaaanaaaattgaaagttgtttgaaaggcattgaattttttt

SEQ ID NO: 456345 - DNA, 1792 bp, Homo sapiens
cccggagttgttgcacagttgtttccgggaagcgggactccaaatgggtcgcagtcgcagccgctctccacggagggaacgtaggcgttcccggtccacatcccgggagagagaacgcaggcgccgagaaaggtccaggtctcgggagagagatcggagaaggagccgctcgcgatccccgcaccgaagacgctcccgatctccaagacgacatagatccacatctccttccccttctcgactgaaagaaagaagagatgaggaaaagaaagaaacaaaagaaacaaagagcaaagaacggcagattactgaggaagacttagagggcaaaacagaggaagaaatagaaatgatgaagttaatgggatttgcctcctttgactccacaaaaggtaagaaggtggatggctctgtaaatgcctatgccataaatgtctctcagaagaggaagtacaggcagtacatgaatcgaaaaggtggattcaacagacctttggatttcattgcatgagaattgaagtgttgaaggatgattttttttcccctcatcttggtcagagagtggatttgtattttgtatttaacttgcattcaaaaaacaggatctcagttctcctttcttgtaaagtaagaaaatcttatttatgatatatgcagttaacttaccttgcctcaacagaagaaaggttaaatattacatttttttcttttaggaaatatcatttgtggcaggaccccattttatttgtccttattcctgtggaagcagtatatgttttcttcctgaatgctcattaggacttcttaaaaaacatgaaagtaatttggaagtaagtttatccaataaagcagtatttctacccttttagatttgataaatatttttattactaaagaatctccccagacattttcttttttttttcacacatagatttaagtatcttgattgttagtagtctaaaaatgggaagaatgaaaaagcataactagatttttctatcttctgtggtcgcccgcccccccccaaaaaaataccatttatggttctctccgcaagtataaaagcattacatgcaaaaaaaagatctcagagaaaacaaaagtaaaagaaaagcagaaaatcacctgttatctactcccagaaataatcaatttcaacattttggtatatgtttttccaggcttctttgggttgatcccacctatgagatcagaatatgtatgcagttctttctttaacccttttttctcctatgtactgtgaacatttaaaaagtacttttaaatattctttggaaacttagcttttagtaactacttggttgtatcataatttattaactaatgttttattggtaaacattggcttgcctcccatgacttgccattataattaaaactgtgactactatctgtctccattacatacatatttttgtatgtttccattatttcctcagggtccgtacttagacgtggcattgctgagtgagattaaaagggccatgtatacatgttttaagacatttggtatctctggctaaaaggtaacagccaactctatccagtaaagtatgagcattcttgtttcagatacatgtacaaatattaagtgtaaaatttgttttaaagtttcctacctgatgggtaaaataatggtactatttggttttgtatttttgtttcatttctagggaggatgaatattttttaaatgtattagccatatttcttttgtaacatgctaattttaaatcttggatctattaatatttgtcttttggcaagc

SEQ ID NO: 456346 - DNA, 1152 bp, Homo sapiens
cccggagttgttgcacagttgtttccgggaagcgggactccaaatgggtcgcagtcgcagccgctctccacggagggaacgtaggcgttcccggtccacatcccgggagagagaacgcaggcgccgagaaaggtccaggtctcgggagagagatcggagaaggagccgctcgcgatccccgcaccgaagacgctcccgatctccaagacgacatagatccacatctccttccccttctcgactgaaagaaagaagagatgaggaaaagaaagaaacaaaagaaacaaagagcaaagaacggcagattactgaggaagacttagagggcaaaacagaggaagaaatagaaatgatgaagttaatgggatttgcctcctttgactccacaaaaggtaagaaggtggatggctctgtaaatgcctatgccataaatgtctctcagaagaggaagtacaggcagtacatgaatcgaaaaggtggattcaacagacctttggatttcattgcatgagaattgaagtgttgaaggatgattttttttcccctcatcttggtcagagagtggatttgtattttgtatttaacttgcattcaaaaaacaggatctcagttctcctttcttgtaaagtaagaaaatcttatttatgatatatgcagttaacttaccttgcctcaacagaagaaaggttaaatattacatttttttcttttaggaaatatcatttgtggcaggaccccattttatttgtccttattcctgtggaagcagtatatgttttcttcctgaatgctcattaggacttcttaaaaaacatgaaagtaaggtccgtacttagacgtggcattgctgagtgagattaaaagggccatgtatacatgttttaagacatttggtatctctggctaaaaggtaacagccaactctatccagtaaagtatgagcattcttgtttcagatacatgtacaaatattaagtgtaaaatttgttttaaagtttcctacctgatgggtaaaataatggtactatttggttttgtatttttgtttcatttctagggaggatgaatattttttaaatgtattagccatatttcttttgtaacatgctaattttaaatcttggatctattaatatttgtcttttggcaagc

SEQ ID NO: 456347 - DNA, 1708 bp, Homo sapiens
cccggagttgttgcacagttgtttccgggaagcgggactccaaatgggtcgcagtcgcagccgctctccacggagggaacgtaggcgttcccggtccacatcccgggagagagaacgcaggcgccgagaaaggtccaggtctcgggagagagatcggagaaggagccgctcgcgatccccgcaccgaagacgctcccgatctccaagacgacatagatccacatctccttccccttctcgactgaaagaaagaagagatgaggaaaagaaagaaacaaaagaaacaaagagcaaagaacggcagattactgaggaagacttagagggcaaaacagaggaagaaatagaaatgatgaagttaatgggatttgcctcctttgactccacaaaaggtaagaaggtggatggctctgtaaatgcctatgccataaatgtctctcagaagaggaagtacaggcagtacatgaatcgaaaaggtggattcaacagacctttggatttcattgcatgagaattgaagtgttgaaggatgattttttttcccctcatcttggtcagagagtggatttgtattttgtatttaacttgcattcaaaaaacaggatctcagttctcctttcttgtaaagtgaaatatcatttgtggcaggaccccattttatttgtccttattcctgtggaagcagtatatgttttcttcctgaatgctcattaggacttcttaaaaaacatgaaagtaatttggaagtaagtttatccaataaagcagtatttctacccttttagatttgataaatatttttattactaaagaatctccccagacattttcttttttttttcacacatagatttaagtatcttgattgttagtagtctaaaaatgggaagaatgaaaaagcataactagatttttctatcttctgtggtcgcccgcccccccccaaaaaaataccatttatggttctctccgcaagtataaaagcattacatgcaaaaaaaagatctcagagaaaacaaaagtaaaagaaaagcagaaaatcacctgttatctactcccagaaataatcaatttcaacattttggtatatgtttttccaggcttctttgggttgatcccacctatgagatcagaatatgtatgcagttctttctttaacccttttttctcctatgtactgtgaacatttaaaaagtacttttaaatattctttggaaacttagcttttagtaactacttggttgtatcataatttattaactaatgttttattggtaaacattggcttgcctcccatgacttgccattataattaaaactgtgactactatctgtctccattacatacatatttttgtatgtttccattatttcctcagggtccgtacttagacgtggcattgctgagtgagattaaaagggccatgtatacatgttttaagacatttggtatctctggctaaaaggtaacagccaactctatccagtaaagtatgagcattcttgtttcagatacatgtacaaatattaagtgtaaaatttgttttaaagtttcctacctgatgggtaaaataatggtactatttggttttgtatttttgtttcatttctagggaggatgaatattttttaaatgtattagccatatttcttttgtaacatgctaattttaaatcttggatctattaatatttgtcttttggcaagc

SEQ ID NO: 456348 - DNA, 1735 bp, Homo sapiens
cccggagttgttgcacagttgtttccgggaagcgggactccaaatgggtcgcagtcgcagccgctctccacggagggaacgtaggcgttcccggtccacatcccgggagagagaacgcaggcgccgagaaaggtccaggtctcgggagagagatcggagaaggagccgctcgcgatccccgcaccgaagacgctcccgatctccaagacgacatagatccacatctccttccccttctcgactgaaagaaagaagagatgaggaaaagaaagaaacaaaagaaacaaagagcaaagaacggcagattactgaggaagacttagagggcaaaacagaggaagaaatagaaatgatgaagttaatgggatttgcctcctttgactccacaaaaggtaagaaggtggatggctctgtaaatgcctatgccataaatgtctctcagaagaggaagtacaggcagtacatgaatcgaaaaggtggattcaacagacctttggatttcattgcatgagaattgaagtgttgaaggatgattttttttcccctcatcttggtcagagagtggatttgtattttgtatttaacttgcattcaaaaaacaggatctcagttctcctttcttgtaaagtgttaaatattacatttttttcttttaggaaatatcatttgtggcaggaccccattttatttgtccttattcctgtggaagcagtatatgttttcttcctgaatgctcattaggacttcttaaaaaacatgaaagtaatttggaagtaagtttatccaataaagcagtatttctacccttttagatttgataaatatttttattactaaagaatctccccagacattttcttttttttttcacacatagatttaagtatcttgattgttagtagtctaaaaatgggaagaatgaaaaagcataactagatttttctatcttctgtggtcgcccgcccccccccaaaaaaataccatttatggttctctccgcaagtataaaagcattacatgcaaaaaaaagatctcagagaaaacaaaagtaaaagaaaagcagaaaatcacctgttatctactcccagaaataatcaatttcaacattttggtatatgtttttccaggcttctttgggttgatcccacctatgagatcagaatatgtatgcagttctttctttaacccttttttctcctatgtactgtgaacatttaaaaagtacttttaaatattctttggaaacttagcttttagtaactacttggttgtatcataatttattaactaatgttttattggtaaacattggcttgcctcccatgacttgccattataattaaaactgtgactactatctgtctccattacatacatatttttgtatgtttccattatttcctcagggtccgtacttagacgtggcattgctgagtgagattaaaagggccatgtatacatgttttaagacatttggtatctctggctaaaaggtaacagccaactctatccagtaaagtatgagcattcttgtttcagatacatgtacaaatattaagtgtaaaatttgttttaaagtttcctacctgatgggtaaaataatggtactatttggttttgtatttttgtttcatttctagggaggatgaatattttttaaatgtattagccatatttcttttgtaacatgctaattttaaatcttggatctattaatatttgtcttttggcaagc

SEQ ID NO: 456349 - DNA, 1409 bp, Homo sapiens
gtggctgtgaatgttataattaaggagatttctagggagaatattatagagaggtagagtttttttcgtgattcccgacctggaatttccctgaaaccgtcgacggcttcaacggaactttcatgttttttaagaagtgttgaaggatgattttttttcccctcatcttggtcagagagtggatttgtattttgtatttaacttgcattcaaaaaacaggatctcagttctcctttcttgtaaagtaagaaaatcttatttatgatatatgcagttaacttaccttgcctcaacagaagaaaggttaaatattacatttttttcttttaggaaatatcatttgtggcaggaccccattttatttgtccttattcctgtggaagcagtatatgttttcttcctgaatgctcattaggacttcttaaaaaacatgaaagtaatttggaagtaagtttatccaataaagcagtatttctacccttttagatttgataaatatttttattactaaagaatctccccagacattttcttttttttttcacacatagatttaagtatcttgattgttagtagtctaaaaatgggaagaatgaaaaagcataactagatttttctatcttctgtggtcgcccgcccccccccaaaaaaataccatttatggttctctccgcaagtataaaagcattacatgcaaaaaaaagatctcagagaaaacaaaagtaaaagaaaagcagaaaatcacctgttatctactcccagaaataatcaatttcaacattttggtatatgtttttccaggcttctttgggttgatcccacctatgagatcagaatatgtatgcagttctttctttaacccttttttctcctatgtactgtgaacatttaaaaagtacttttaaatattctttggaaacttagcttttagtaactacttggttgtatcataatttattaactaatgttttattggtaaacattggcttgcctcccatgacttgccattataattaaaactgtgactactatctgtctccattacatacatatttttgtatgtttccattatttcctcagggtccgtacttagacgtggcattgctgagtgagattaaaagggccatgtatacatgttttaagacatttggtatctctggctaaaaggtaacagccaactctatccagtaaagtatgagcattcttgtttcagatacatgtacaaatattaagtgtaaaatttgttttaaagtttcctacctgatgggtaaaataatggtactatttggttttgtatttttgtttcatttctagggaggatgaatattttttaaatgtattagccatatttcttttgtaacatgctaattttaaatcttggatctattaatatttgtcttttggcaagc

SEQ ID NO: 456350 - DNA, 3594 bp, Homo sapiens
cccggagttgttgcacagttgtttccgggaagcgggactccaaatgggtcgcagtcgcagccgctctccacggagggaacgtaggcgttcccggtccacatcccgggagagagaacgcaggcgccgagaaaggtccaggtctcgggagagagatcggagaaggagccgctcgcgatccccgcaccgaagacgctcccgatctccaagacgacatagatccacatctccttccccttctcgactgaaagaaagaagagatgaggaaaagaaagaaacaaaagaaacaaagagcaaagaacggcagattactgaggaagacttagagggcaaaacagaggaagaaatagaaatgatgaagttaatgggatttgcctcctttgactccacaaaaggtaagaaggtggatggctctgtaaatgcctatgccataaatgtctctcagaagaggaagtacaggcagtacatgaatcgaaaaggtggattcaacagacctttggatttcattgcatgagaattgaagtgttgaaggatgattttttttcccctcatcttggtcagagagtggatttgtattttgtatttaacttgcattcaaaaaacaggatctcagttctcctttcttgtaaagtaagctgaacatggttatgcctccatgttaccatacaataacaaggacagagatgccttaaaacggaggaacaaatccaaaaagaataacagcagtagcagatcaactcacaatgaaatggagaagaatagacgggctcatcttcgcttgtgcctggagaagttgaaggggctggtgccactgggacccgaatcaagtcgacacactacgttgagtttattaacaaaagccaaattgcacataaagaaacttgaagattgtgacagaaaagccgttcaccaaatcgaccagcttcagcgagagcagcgacacctgaagaggcagctggagaagctgggcattgagaggatccggatggacagcatcggctccaccgtctcctcggagcgctccgactccgacagggaagaaatcgacgttgacgtggagagcacggactatctcacaggtgatctggactggagcagcagcagtgtgagcgactctgacgagcggggcagcatgcagagcctcggcagtgatgagggctattccagcaccagcatcaagagaataaagctgcaggacagtcacaaggcgtgtcttggtctctaagagagtgggcactgcggctgtctccttgaaggttctccctgttggttctgattaggtaacgtattggacctgcccacaactcccttgcacgtaaacttcagtgtcccaccttgaccaaaatcagctttgtaactgttttcaaggaggtgcttaggattgtgggtttctgattgcatccactagcttctctttttctcgccataaaaatttgtctctgagagactatacattccaatcaatttgaagcatccaagaattcttagaccgaataagcaatgtccacatctcagcaatccccctctttgctctcctcgtgtcctctcccagacctttcttccagttttctggcttactgtgttacttgcctaggaggaatgtccaagtgtgtcttgtacttaggaaactgaaggaaacaaacttttgaaattgagatcctgatctcagaactccaaagtaagctttgaaagcagcatttaagagcacttaaccatggacctcaccaccagtgaggaagtcaggaatacctctagaaaacacgcccttcacaccgcgcatgctcattcccccgacgcgccgcgtgtggatgggagcagtatttctcactttaaaatggacaccttgatagtgtgtctctggggttgcacagctcatcaaagttccaaattgtttgttctcacaaacaaaacggtacaatctatttttgtgcgatgttcttgggacctcgctgtgttctgctatctcgaggcacattctcccctccaactttgttaatgctacttgtctctggaacatttttttttcctacctcagagataaatgagatctccatttcccacttaacacagtgattatccttttttccccccccaaaatagtgacatttggtccaattataatctattttcctattgaactttcagcaataactgagctgtggcactagcagagctagtagccattatcagtgaaagaaaaagtccacatttctactctctgttgcaggtgaacaggagaggatggtacactgttactagaactcctctccttattgattatttttggacacacccagaaacttctttatggaggcttttgggttgatagtttaaaaggctgatttttctttttggttatgatttctcccttaagtggtctccgactttgtagcatttttatttaagctaaaacagagcacatgtatatgtacataagacacattaaatctataaatactatttattcattttatataaactaatgtaatggaaaacaaattcttatgactttgtggttttatagatgttctagaaactttgtatgtaggtatctacaaaattagttcattcccctgaatatttttgcattcatatttttgaggtcttgatgttttcagcctctggcgaatctttttcattgaatttgaaccatttgtaaaatctgtgatgctgaagcagagtgtgtcacaaagtgatgagaacattactaaaatccacggacgcactgcgacctaagggctcaacggctgactcggcagcgggcagccaccccacgctcccctgcggtcactcgcacaccacagcctgaagctcccccagcgcctgcacctcgcacacagctaaggtcaaagttcaaacgcactccacacggaagctcattctatacccgaagagcagtctcagaaagcaagattacttttgtgttttttaaaaaatgattctttaatgtatttttctaaacattctgattggaagtagtggattcctaaatgattccaaagtcacctgtaattcttctgtttttgttttgttctgtcttttcttcattttggctttgggtggggggaggggcaggtgacacaaaggattttttttttttttttaatttttggaatcttttccaataaccagctaaagatttgcactgaaatacaacttgtatgccttttgcatttttaaagcctgcttcctggatttaagcagagtgatagtgttcaaagagccagttcagcctgtaacatatttgaaaaagatatgtctgcactttgaggtcccttttgaatgccattcactagacctctcaagcattttgtttcattgctacatccaagcgcctcacaagtccacaatgcgggacagcatcaaaagctcaagactttggaaaaagcttgtgggcttgcactgggggagggaagggaacaaaatttgtgtacttctttgtttaatttagaaataaggcatccaagagatgccattattttctgtgtttcaattgttgtgcctttgagttaaactgcatttttgtcttttggttgaaatctgaaatgtactgtcccaatataaaacagtaattatttgaccttcagcactgtttgt

SEQ ID NO: 456351 - DNA, 3258 bp, Homo sapiens
aaagaagaggaagaagattatttcaggtagagggaagagctcatgaaaatgccatggtaagaaggtggatggctctgtaaatgcctatgccataaatgtctctcagaagaggaagtacaggcagtacatgaatcgaaaaggtggattcaacagacctttggatttcattgcatgagaattgaagtgttgaaggatgattttttttcccctcatcttggtcagagagtggatttgtattttgtatttaacttgcattcaaaaaacaggatctcagttctcctttcttgtaaagtaagctgaacatggttatgcctccatgttaccatacaataacaaggacagagatgccttaaaacggaggaacaaatccaaaaagaataacagcagtagcagatcaactcacaatgaaatggagaagaatagacgggctcatcttcgcttgtgcctggagaagttgaaggggctggtgccactgggacccgaatcaagtcgacacactacgttgagtttattaacaaaagccaaattgcacataaagaaacttgaagattgtgacagaaaagccgttcaccaaatcgaccagcttcagcgagagcagcgacacctgaagaggcagctggagaagctgggcattgagaggatccggatggacagcatcggctccaccgtctcctcggagcgctccgactccgacagggaagaaatcgacgttgacgtggagagcacggactatctcacaggtgatctggactggagcagcagcagtgtgagcgactctgacgagcggggcagcatgcagagcctcggcagtgatgagggctattccagcaccagcatcaagagaataaagctgcaggacagtcacaaggcgtgtcttggtctctaagagagtgggcactgcggctgtctccttgaaggttctccctgttggttctgattaggtaacgtattggacctgcccacaactcccttgcacgtaaacttcagtgtcccaccttgaccaaaatcagctttgtaactgttttcaaggaggtgcttaggattgtgggtttctgattgcatccactagcttctctttttctcgccataaaaatttgtctctgagagactatacattccaatcaatttgaagcatccaagaattcttagaccgaataagcaatgtccacatctcagcaatccccctctttgctctcctcgtgtcctctcccagacctttcttccagttttctggcttactgtgttacttgcctaggaggaatgtccaagtgtgtcttgtacttaggaaactgaaggaaacaaacttttgaaattgagatcctgatctcagaactccaaagtaagctttgaaagcagcatttaagagcacttaaccatggacctcaccaccagtgaggaagtcaggaatacctctagaaaacacgcccttcacaccgcgcatgctcattcccccgacgcgccgcgtgtggatgggagcagtatttctcactttaaaatggacaccttgatagtgtgtctctggggttgcacagctcatcaaagttccaaattgtttgttctcacaaacaaaacggtacaatctatttttgtgcgatgttcttgggacctcgctgtgttctgctatctcgaggcacattctcccctccaactttgttaatgctacttgtctctggaacatttttttttcctacctcagagataaatgagatctccatttcccacttaacacagtgattatccttttttccccccccaaaatagtgacatttggtccaattataatctattttcctattgaactttcagcaataactgagctgtggcactagcagagctagtagccattatcagtgaaagaaaaagtccacatttctactctctgttgcaggtgaacaggagaggatggtacactgttactagaactcctctccttattgattatttttggacacacccagaaacttctttatggaggcttttgggttgatagtttaaaaggctgatttttctttttggttatgatttctcccttaagtggtctccgactttgtagcatttttatttaagctaaaacagagcacatgtatatgtacataagacacattaaatctataaatactatttattcattttatataaactaatgtaatggaaaacaaattcttatgactttgtggttttatagatgttctagaaactttgtatgtaggtatctacaaaattagttcattcccctgaatatttttgcattcatatttttgaggtcttgatgttttcagcctctggcgaatctttttcattgaatttgaaccatttgtaaaatctgtgatgctgaagcagagtgtgtcacaaagtgatgagaacattactaaaatccacggacgcactgcgacctaagggctcaacggctgactcggcagcgggcagccaccccacgctcccctgcggtcactcgcacaccacagcctgaagctcccccagcgcctgcacctcgcacacagctaaggtcaaagttcaaacgcactccacacggaagctcattctatacccgaagagcagtctcagaaagcaagattacttttgtgttttttaaaaaatgattctttaatgtatttttctaaacattctgattggaagtagtggattcctaaatgattccaaagtcacctgtaattcttctgtttttgttttgttctgtcttttcttcattttggctttgggtggggggaggggcaggtgacacaaaggattttttttttttttttaatttttggaatcttttccaataaccagctaaagatttgcactgaaatacaacttgtatgccttttgcatttttaaagcctgcttcctggatttaagcagagtgatagtgttcaaagagccagttcagcctgtaacatatttgaaaaagatatgtctgcactttgaggtcccttttgaatgccattcactagacctctcaagcattttgtttcattgctacatccaagcgcctcacaagtccacaatgcgggacagcatcaaaagctcaagactttggaaaaagcttgtgggcttgcactgggggagggaagggaacaaaatttgtgtacttctttgtttaatttagaaataaggcatccaagagatgccattattttctgtgtttcaattgttgtgcctttgagttaaactgcatttttgtcttttggttgaaatctgaaatgtactgtcccaatataaaacagtaattatttgaccttcagcactgtttgt

SEQ ID NO: 456352 - DNA, 1068 bp, Homo sapiens
cccggagttgttgcacagttgtttccgggaagcgggactccaaatgggtcgcagtcgcagccgctctccacggagggaacgtaggcgttcccggtccacatcccgggagagagaacgcaggcgccgagaaaggtccaggtctcgggagagagatcggagaaggagccgctcgcgatccccgcaccgaagacgctcccgatctccaagacgacatagatccacatctccttccccttctcgactgaaagaaagaagagatgaggaaaagaaagaaacaaaagaaacaaagagcaaagaacggcagattactgaggaagacttagagggcaaaacagaggaagaaatagaaatgatgaagttaatgggatttgcctcctttgactccacaaaaggtaagaaggtggatggctctgtaaatgcctatgccataaatgtctctcagaagaggaagtacaggcagtacatgaatcgaaaaggtggattcaacagacctttggatttcattgcatgagaattgaagtgttgaaggatgattttttttcccctcatcttggtcagagagtggatttgtattttgtatttaacttgcattcaaaaaacaggatctcagttctcctttcttgtaaagtgaaatatcatttgtggcaggaccccattttatttgtccttattcctgtggaagcagtatatgttttcttcctgaatgctcattaggacttcttaaaaaacatgaaagtaaggtccgtacttagacgtggcattgctgagtgagattaaaagggccatgtatacatgttttaagacatttggtatctctggctaaaaggtaacagccaactctatccagtaaagtatgagcattcttgtttcagatacatgtacaaatattaagtgtaaaatttgttttaaagtttcctacctgatgggtaaaataatggtactatttggttttgtatttttgtttcatttctagggaggatgaatattttttaaatgtattagccatatttcttttgtaacatgctaattttaaatcttggatctattaatatttgtcttttggcaagc

SEQ ID NO: 456353 - DNA, 2190 bp, Homo sapiens
agccgggcatggtggtgcatggctgtaatcctagcaactcaggatgcttcttgacgtcaagaagcatccaagaattcttagaccgaataagcaatgtccacatctcagcaatccccctctttgctctcctcgtgtcctctcccagacctttcttccagttttctggcttactgtgttacttgcctaggaggaatgtccaagtgtgtcttgtacttaggaaactgaaggaaacaaacttttgaaattgagatcctgatctcagaactccaaagtaagctttgaaagcagcatttaagagcacttaaccatggacctcaccaccagtgaggaagtcaggaatacctctagaaaacacgcccttcacaccgcgcatgctcattcccccgacgcgccgcgtgtggatgggagcagtatttctcactttaaaatggacaccttgatagtgtgtctctggggttgcacagctcatcaaagttccaaattgtttgttctcacaaacaaaacggtacaatctatttttgtgcgatgttcttgggacctcgctgtgttctgctatctcgaggcacattctcccctccaactttgttaatgctacttgtctctggaacatttttttttcctacctcagagataaatgagatctccatttcccacttaacacagtgattatccttttttccccccccaaaatagtgacatttggtccaattataatctattttcctattgaactttcagcaataactgagctgtggcactagcagagctagtagccattatcagtgaaagaaaaagtccacatttctactctctgttgcaggtgaacaggagaggatggtacactgttactagaactcctctccttattgattatttttggacacacccagaaacttctttatggaggcttttgggttgatagtttaaaaggctgatttttctttttggttatgatttctcccttaagtggtctccgactttgtagcatttttatttaagctaaaacagagcacatgtatatgtacataagacacattaaatctataaatactatttattcattttatataaactaatgtaatggaaaacaaattcttatgactttgtggttttatagatgttctagaaactttgtatgtaggtatctacaaaattagttcattcccctgaatatttttgcattcatatttttgaggtcttgatgttttcagcctctggcgaatctttttcattgaatttgaaccatttgtaaaatctgtgatgctgaagcagagtgtgtcacaaagtgatgagaacattactaaaatccacggacgcactgcgacctaagggctcaacggctgactcggcagcgggcagccaccccacgctcccctgcggtcactcgcacaccacagcctgaagctcccccagcgcctgcacctcgcacacagctaaggtcaaagttcaaacgcactccacacggaagctcattctatacccgaagagcagtctcagaaagcaagattacttttgtgttttttaaaaaatgattctttaatgtatttttctaaacattctgattggaagtagtggattcctaaatgattccaaagtcacctgtaattcttctgtttttgttttgttctgtcttttcttcattttggctttgggtggggggaggggcaggtgacacaaaggattttttttttttttttaatttttggaatcttttccaataaccagctaaagatttgcactgaaatacaacttgtatgccttttgcatttttaaagcctgcttcctggatttaagcagagtgatagtgttcaaagagccagttcagcctgtaacatatttgaaaaagatatgtctgcactttgaggtcccttttgaatgccattcactagacctctcaagcattttgtttcattgctacatccaagcgcctcacaagtccacaatgcgggacagcatcaaaagctcaagactttggaaaaagcttgtgggcttgcactgggggagggaagggaacaaaatttgtgtacttctttgtttaatttagaaataaggcatccaagagatgccattattttctgtgtttcaattgttgtgcctttgagttaaactgcatttttgtcttttggttgaaatctgaaatgtactgtcccaatataaaacagtaattatttgaccttcagcactgtttgt

SEQ ID NO: 456354 - DNA, 1496 bp, Homo sapiens
cccggagttgttgcacagttgtttccgggaagcgggactccaaatgggtcgcagtcgcagccgctctccacggagggaacgtaggcgttcccggtccacatcccgggagagagaacgcaggcgccgagaaaggtccaggtctcgggagagagatcggagaaggagccgctcgcgatccccgcaccgaagacgctcccgatctccaagacgacatagatccacatctccttccccttctcgactgaaagaaagaagagatgaggaaaagaaagaaacaaaagaaacaaagagcaaagaacggcagattactgaggaagacttagagggcaaaacagaggaagaaatagaaatgatgaagttaatgggatttgcctcctttgactccacaaaaggtaagaaggtggatggctctgtaaatgcctatgccataaatgtctctcagaagaggaagtacaggcagtacatgaatcgaaaaggtggattcaacagacctttggatttcattgcatgagaattgaagtgttgaaggatgattttttttcccctcatcttggtcagagagtggatttgtattttgtatttaacttgcattcaaaaaacaggatctcagttctcctttcttgtaaagtaagctgaacatggttatgcctccatgttaccatacaataacaaggacagagatgccttaaaacggaggaacaaatccaaaaagaataacagcagtagcagatcaactcacaatgaaatggagaagaatagacgggctcatcttcgcttgtgcctggagaagttgaaggggctggtgccactgggacccgaatcaagtcgacacactacgttgagtttattaacaaaagccaaattgcacataaagaaacttgaagattgtgacagaaaagccgttcaccaaatcgaccagcttcagcgagagcagcgacacctgaagaggcagctggagaagctgggcattgagaggatccggatggacagcatcggctccaccgtctcctcggagcgctccgactccgacagggaagaaatcgacgttgacgtggagagcacggactatctcacaggtgatctggactggagcagcagcagtgtgagcgactctgacgagcggggcagcatgcagagcctcggcagtgatgagggctattccagcaccagcatcaagagaataaagctgcaggacagtcacaaggcgtgtcttggtctctaagagagtgggcactgcggctgtctccttgaaggttctccctgttggttctgattagaattggtgctcttggaatattgctgttaccatcatttttggggggccatcttcctaatgctacacacagcctgacaggggagcagcagatgaaagggtatgctattctgtttactgaacgatttcataaacttaaatggaaaaagccaatgacaatcaattagccccggagcgagactcacatagcgtaaacgggaaccatctagagacgaggaaaacc

SEQ ID NO: 456355 - DNA, 576 bp, Homo sapiens
cccggagttgttgcacagttgtttccgggaagcgggactccaaatgggtcgcagtcgcagccgctctccacggagggaacgtaggcgttcccggtccacatcccgggagagagaacgcaggcgccgagaaaggtccaggtctcgggagagagatcggagaaggagccgctcgcgatccccgcaccgaagacgctcccgatctccaagacgacatagatccacatctccttccccttctcgactgaaagaaagaagagatgaggaaaagaaagaaacaaaagaaacaaagagcaaagaacggcagattactgaggaagacttagagggcaaaacagaggaagaaggagaggaatactaaagttaaaacgtcacaaaggtgctgcttttacagggaagcttattctgttttaaacattgaaaagttgtggtctgatcagttaatttgtatgtagcagtgtatgctctcatatacaattactgacctatgctctaaaacatgaatgctttgttacagacccaagctgtccatttctgtgatgggttttgaataaagtattccctgtcttaaaaaaaaaa

SEQ ID NO: 456356 - DNA, 725 bp, Homo sapiens
catcatgagtcagggaccattactgtatatagtatttacacatgtgaatgactatataatagcagatattattccctaccccagcacttgtattatcaatagacttagcttcgaaaaccttggattttgcttctcattggttttcaccagagttgtctggttcaaaatatgtttattcagcaaaaggtcattggtagcatttgccatcgcaaggcctgggcaacttcacactctttgagaactcattctgcctggggtgcttctggcccactgtgaaactctcaaatgctactgtggtcttgttttcatagacgggctcatcttcgcttgtgcctggagaagttgaaggggctggtgccactgggacccgaatcaagtcgacacactacgttgagtttattaacaaaagccaaattgcacataaaggtaagtgtattgttgggatgctgctttatctttacctgttcagtgagggtttgtctgttgttacatctccaggacagtcctctcccctgaactcctccagtctagctattggatgaatcacaggtacctcaaatgcaacatattcaaaacccaactgagtgtttctcactcccatgcaccagaggttaaatggtccatccaactctccatccagttgtacaagccagaattcaggagtccgtgatagctcctgctccttaaccatatatctaggccatctccaaggcctaaatattttg

SEQ ID NO: 456357 - DNA, 561 bp, Homo sapiens
tttttctactggacggcgcagctctagatatttgaggtaattatcagttctgcaatttgtgtgcgtttgcattagaacgtaggcgttcccggtccacatcccgggagagagaacgcaggcgccgagaaaggtccaggtctcgggagagagatcggagaaggagccgctcgcgatccccgcaccgaagacgctcccggtaagggcagaaaataagccaagagttttatttaccgaaagtccctaagaaactggtcgcagctcttaactttgttttcatcgcttataaggggatttacggtttcctgaaatggaggaaacttaatccaaccttattctaaagctaacattcaccttggttaaatggtgctaatagtactctacatcacaaagttgtcttgaaagagtaagtaagaaataatgcatgcaaaccccagagcatggtgcttggcaagaaaaagaaataagtattttatatttttgtttctttcttccgttcctttcctttccttttcttttccttttcctttcttttcctcttttttgagacggagtctcgctctg

SEQ ID NO: 456358 - DNA, 258 bp, Homo sapiens
cccaccttagccttccgccaagtagctgggagtacaggtacatgccactgccaccacacctgctttcatgtatcctgatttaatgtatccttcctgttttttgtctgtttgtttattgtttttcttcagggtaagaaggtggatggctctgtaaatgcctatgccataaatgtctctcagaagaggaagtacaggtatgcatagcccccattattatgtttgaactaataaatcagttttttacttcaaactttatta

SEQ ID NO: 456359 - DNA, 1092 bp, Homo sapiens
cccggagttgttgcacagttgtttccgggaagcgggactccaaatgggtcgcagtcgcagccgctctccacggagggaacgtaggcgttcccggtccacatcccgggagagagaacgcaggcgccgagaaaggtccagatctccaagacgacatagatccacatctccttccccttctcgactgaaagaaagaagagatgaggaaaagaaagaaacaaaagaaacaaagagcaaagaacggcagattactgaggaagacttagagggcaaaacagaggaagaaatagaaatgatgaagttaatgggatttgcctcctttgactccacaaaaggtaagaaggtggatggctctgtaaatgcctatgccataaatgtctctcagaagaggaagtacaggcagtacatgaatcgaaaaggtggattcaacagacctttggatttcattgcatgagaattgaagtgttgaaggatgattttttttcccctcatcttggtcagagagtggatttgtattttgtatttaacttgcattcaaaaaacaggatctcagttctcctttcttgtaaagtaagaaaatcttatttatgatatatgcagttaacttaccttgcctcaacagaagaaaggttaaatattacatttttttcttttaggaaatatcatttgtggcaggaccccattttatttgtccttattcctgtggaagcagtatatgttttcttcctgaatgctcattaggacttcttaaaaaacatgaaagtaaggtccgtacttagacgtggcattgctgagtgagattaaaagggccatgtatacatgttttaagacatttggtatctctggctaaaaggtaacagccaactctatccagtaaagtatgagcattcttgtttcagatacatgtacaaatattaagtgtaaaatttgttttaaagtttcctacctgatgggtaaaataatggtactatttggttttgtatttttgtttcatttctagggaggatgaatattttttaaatgtattagccatatttcttttgtaacatgctaattttaaatcttggatctattaatatttgtcttttggcaagc

SEQ ID NO: 456360 - DNA, 1673 bp, Homo sapiens
cccggagttgttgcacagttgtttccgggaagcgggactccaaatgggtcgcagtcgcagccgctctccacggagggaacgtaggcgttcccggtccacatcccgggagagagaacgcaggcgccgagaaaggtccaggtctcgggagagagatcggagaaggagccgctcgcgatccccgcaccgaagacgctcccgatctccaagacgacatagatccacatctccttccccttctcgactgaaagaaagaagagatgaggaaaagaaagaaacaaaagaaacaaagagcaaagaacggcagattactgaggaagacttagagggcaaaacagaggaagaaatagaaatgatgaagttaatgggatttgcctcctttgactccacaaaaggtaagaaggtggatggctctgtaaatgcctatgccataaatgtctctcagaagaggaagtacaggcagtacatgaatcgaaaaggtggattcaacagacctttggatttcattgcatgagaattgaagtgttgaaggatgattttttttcccctcatcttggtcagagagtggatttgtattttgtatttaacttgcattcaaaaaacaggatctcagttctcctttcttgtaaagtaagaaaatcttatttatgatatatgcagttaacttaccttgcctcaacagaagaaaggttaaatattacatttttttcttttaggaaatatcatttgtggcaggaccccattttatttgtccttattcctgtggaagcagtatatgttttcttcctgaatgctcattaggacttcttaaaaaacatgaaagtaatttggaagtaagtttatccaataaagcagtatttctacccttttagatttgataaatatttttattactaaagaatgcccccccccaaaaaaataccatttatggttctctccgcaagtataaaagcattacatgcaaaaaaaagatctcagagaaaacaaaagtaaaagaaaagcagaaaatcacctgttatctactcccagaaataatcaatttcaacattttggtatatgtttttccaggcttctttgggttgatcccacctatgagatcagaatatgtatgcagttctttctttaacccttttttctcctatgtactgtgaacatttaaaaagtacttttaaatattctttggaaacttagcttttagtaactacttggttgtatcataatttattaactaatgttttattggtaaacattggcttgcctcccatgacttgccattataattaaaactgtgactactatctgtctccattacatacatatttttgtatgtttccattatttcctcagggtccgtacttagacgtggcattgctgagtgagattaaaagggccatgtatacatgttttaagacatttggtatctctggctaaaaggtaacagccaactctatccagtaaagtatgagcattcttgtttcagatacatgtacaaatattaagtgtaaaatttgttttaaagtttcctacctgatgggtaaaataatggtactatttggttttgtatttttgtttcatttctagggaggatgaatattttttaaatgtattagccatatttcttttgtaacatgctaattttaaatcttggatctattaatatttgtcttttggcaagc

SEQ ID NO: 456361 - DNA, 1846 bp, Homo sapiens
cccggagttgttgcacagttgtttccgggaagcgggactccaaatgggtcgcagtcgcagccgctctccacggagggaacgtaggcgttcccggtccacatcccgggagagagaacgcaggcgccgagaaaggtccaggtctcgggagagagatcggagaaggagccgctcgcgatccccgcaccgaagacgctcccgatctccaagacgacatagatccacatctccttccccttctcgactgaaagaaagaagagatgaggaaaagaaagaaacaaaagaaacaaagagcaaagaacggcagattactgaggaagacttagagggcaaaacagaggaagaaatagaaatgatgaagttaatgggatttgcctcctttgactccacaaaaggtaagaaggtggatggctctgtaaatgcctatgccataaatgtctctcagaagaggaagtacagcagtacatgaatcgaaaaggtggattcaacagacctttggatttcattggcatggcagtacatgaatcgaaaaggtggattcaacagacctttggatttcattgcatgagaattgaagtgttgaaggatgattttttttcccctcatcttggtcagagagtggatttgtattttgtatttaacttgcattcaaaaaacaggatctcagttctcctttcttgtaaagtaagaaaatcttatttatgatatatgcagttaacttaccttgcctcaacagaagaaaggttaaatattacatttttttcttttaggaaatatcatttgtggcaggaccccattttatttgtccttattcctgtggaagcagtatatgttttcttcctgaatgctcattaggacttcttaaaaaacatgaaagtaatttggaagtaagtttatccaataaagcagtatttctacccttttagatttgataaatatttttattactaaagaatctccccagacattttcttttttttttcacacatagatttaagtatcttgattgttagtagtctaaaaatgggaagaatgaaaaagcataactagatttttctatcttctgtggtcgcccgcccccccccaaaaaaataccatttatggttctctccgcaagtataaaagcattacatgcaaaaaaaagatctcagagaaaacaaaagtaaaagaaaagcagaaaatcacctgttatctactcccagaaataatcaatttcaacattttggtatatgtttttccaggcttctttgggttgatcccacctatgagatcagaatatgtatgcagttctttctttaacccttttttctcctatgtactgtgaacatttaaaaagtacttttaaatattctttggaaacttagcttttagtaactacttggttgtatcataatttattaactaatgttttattggtaaacattggcttgcctcccatgacttgccattataattaaaactgtgactactatctgtctccattacatacatatttttgtatgtttccattatttcctcagggtccgtacttagacgtggcattgctgagtgagattaaaagggccatgtatacatgttttaagacatttggtatctctggctaaaaggtaacagccaactctatccagtaaagtatgagcattcttgtttcagatacatgtacaaatattaagtgtaaaatttgttttaaagtttcctacctgatgggtaaaataatggtactatttggttttgtatttttgtttcatttctagggaggatgaatattttttaaatgtattagccatatttcttttgtaacatgctaattttaaatcttggatctattaatatttgtcttttggcaagc

SEQ ID NO: 456362 - DNA, 1727 bp, Homo sapiens
cccggagttgttgcacagttgtttccgggaagcgggactccaaatgggtcgcagtcgcagccgctctccacggagggaacgtaggcgttcccggtccacatcccgggagagagaacgcaggcgccgagaaaggtccaggtctcgggagagagatcggagaaggagccgctcgcgatccccgcaccgaagacgctcccgatctccaagacgacatagatccacatctccttccccttctcgactgaaagaaagaagagatgaggaaaagaaagaaacaaaagaaacaaagagcaaagaacggcagattactgaggaagacttagagggcaaaacagaggaagaaatagaaatgatgaagttaatgggatttgcctcctttgactccacaaaagcagtacatgaatcgaaaaggtggattcaacagacctttggatttcattgcatgagaattgaagtgttgaaggatgattttttttcccctcatcttggtcagagagtggatttgtattttgtatttaacttgcattcaaaaaacaggatctcagttctcctttcttgtaaagtaagaaaatcttatttatgatatatgcagttaacttaccttgcctcaacagaagaaaggttaaatattacatttttttcttttaggaaatatcatttgtggcaggaccccattttatttgtccttattcctgtggaagcagtatatgttttcttcctgaatgctcattaggacttcttaaaaaacatgaaagtaatttggaagtaagtttatccaataaagcagtatttctacccttttagatttgataaatatttttattactaaagaatctccccagacattttcttttttttttcacacatagatttaagtatcttgattgttagtagtctaaaaatgggaagaatgaaaaagcataactagatttttctatcttctgtggtcgcccgcccccccccaaaaaaataccatttatggttctctccgcaagtataaaagcattacatgcaaaaaaaagatctcagagaaaacaaaagtaaaagaaaagcagaaaatcacctgttatctactcccagaaataatcaatttcaacattttggtatatgtttttccaggcttctttgggttgatcccacctatgagatcagaatatgtatgcagttctttctttaacccttttttctcctatgtactgtgaacatttaaaaagtacttttaaatattctttggaaacttagcttttagtaactacttggttgtatcataatttattaactaatgttttattggtaaacattggcttgcctcccatgacttgccattataattaaaactgtgactactatctgtctccattacatacatatttttgtatgtttccattatttcctcagggtccgtacttagacgtggcattgctgagtgagattaaaagggccatgtatacatgttttaagacatttggtatctctggctaaaaggtaacagccaactctatccagtaaagtatgagcattcttgtttcagatacatgtacaaatattaagtgtaaaatttgttttaaagtttcctacctgatgggtaaaataatggtactatttggttttgtatttttgtttcatttctagggaggatgaatattttttaaatgtattagccatatttcttttgtaacatgctaattttaaatcttggatctattaatatttgtcttttggcaagc

SEQ ID NO: 456363 - DNA, 3519 bp, Homo sapiens
aggcggagttgcgaatcctgtcaccagttggaaagagggggtggagcccgggccttgtcaagtgtgaccaaccagcgagaggagcggactttgcggggtggagccctgaagccctctcccaatcgcacaagtgtaggggcggggcattctttggggggcccaatgaggaacgcggccgaagctggcctgtcaagagaaggggctgggggcggggagatggtgagtcggggataaacactccgcggcggtggcggctgctgctctgctccgggttctgtcactgtgtcggcggtgcccagctcactggccccctccctctcttgtcgagcgtggttgccagagaggctccctcagccctgctccgcggggtccacagcgggctccacagcgggctccatagcgggctccacagcggtccggcggcggcagcgagcccgtgggcagtgggggttggtcccgtggctccggcccccggtgcagaatggcggcggcggttcggatgaacatccagatgctgctggaggcggccgactatctggagcggcgggagagagaagctgaacatggttatgcctccatgttaccatacaataacaaggacagagatgccttaaaacggaggaacaaatccaaaaagaataacagcagtagcagatcaactcacaatgaaatggagaagaatagacgggctcatcttcgcttgtgcctggagaagttgaaggggctggtgccactgggacccgaatcaagtcgacacactacgttgagtttattaacaaaagccaaattgcacataaagaaacttgaagattgtgacagaaaagccgttcaccaaatcgaccagcttcagcgagagcagcgacacctgaagaggcagctggagaagctgggcattgagaggatccggatggacagcatcggctccaccgtctcctcggagcgctccgactccgacagggaagaaatcgacgttgacgtggagagcacggactatctcacaggtgatctggactggagcagcagcagtgtgagcgactctgacgagcggggcagcatgcagagcctcggcagtgatgagggctattccagcaccagcatcaagagaataaagctgcaggacagtcacaaggcgtgtcttggtctctaagagagtgggcactgcggctgtctccttgaaggttctccctgttggttctgattaggtaacgtattggacctgcccacaactcccttgcacgtaaacttcagtgtcccaccttgaccaaaatcagctttgtaactgttttcaaggaggtgcttaggattgtgggtttctgattgcatccactagcttctctttttctcgccataaaaatttgtctctgagagactatacattccaatcaatttgaagcatccaagaattcttagaccgaataagcaatgtccacatctcagcaatccccctctttgctctcctcgtgtcctctcccagacctttcttccagttttctggcttactgtgttacttgcctaggaggaatgtccaagtgtgtcttgtacttaggaaactgaaggaaacaaacttttgaaattgagatcctgatctcagaactccaaagtaagctttgaaagcagcatttaagagcacttaaccatggacctcaccaccagtgaggaagtcaggaatacctctagaaaacacgcccttcacaccgcgcatgctcattcccccgacgcgccgcgtgtggatgggagcagtatttctcactttaaaatggacaccttgatagtgtgtctctggggttgcacagctcatcaaagttccaaattgtttgttctcacaaacaaaacggtacaatctatttttgtgcgatgttcttgggacctcgctgtgttctgctatctcgaggcacattctcccctccaactttgttaatgctacttgtctctggaacatttttttttcctacctcagagataaatgagatctccatttcccacttaacacagtgattatccttttttccccccccaaaatagtgacatttggtccaattataatctattttcctattgaactttcagcaataactgagctgtggcactagcagagctagtagccattatcagtgaaagaaaaagtccacatttctactctctgttgcaggtgaacaggagaggatggtacactgttactagaactcctctccttattgattatttttggacacacccagaaacttctttatggaggcttttgggttgatagtttaaaaggctgatttttctttttggttatgatttctcccttaagtggtctccgactttgtagcatttttatttaagctaaaacagagcacatgtatatgtacataagacacattaaatctataaatactatttattcattttatataaactaatgtaatggaaaacaaattcttatgactttgtggttttatagatgttctagaaactttgtatgtaggtatctacaaaattagttcattcccctgaatatttttgcattcatatttttgaggtcttgatgttttcagcctctggcgaatctttttcattgaatttgaaccatttgtaaaatctgtgatgctgaagcagagtgtgtcacaaagtgatgagaacattactaaaatccacggacgcactgcgacctaagggctcaacggctgactcggcagcgggcagccaccccacgctcccctgcggtcactcgcacaccacagcctgaagctcccccagcgcctgcacctcgcacacagctaaggtcaaagttcaaacgcactccacacggaagctcattctatacccgaagagcagtctcagaaagcaagattacttttgtgttttttaaaaaatgattctttaatgtatttttctaaacattctgattggaagtagtggattcctaaatgattccaaagtcacctgtaattcttctgtttttgttttgttctgtcttttcttcattttggctttgggtggggggaggggcaggtgacacaaaggattttttttttttttttaatttttggaatcttttccaataaccagctaaagatttgcactgaaatacaacttgtatgccttttgcatttttaaagcctgcttcctggatttaagcagagtgatagtgttcaaagagccagttcagcctgtaacatatttgaaaaagatatgtctgcactttgaggtcccttttgaatgccattcactagacctctcaagcattttgtttcattgctacatccaagcgcctcacaagtccacaatgcgggacagcatcaaaagctcaagactttggaaaaagcttgtgggcttgcactgggggagggaagggaacaaaatttgtgtacttctttgtttaatttagaaataaggcatccaagagatgccattattttctgtgtttcaattgttgtgcctttgagttaaactgcatttttgtcttttggttgaaatctgaaatgtactgtcccaatataaaacagtaattatttgaccttcagcactgtttgt

SEQ ID NO: 456364 - DNA, 1647 bp, Homo sapiens
cccggagttgttgcacagttgtttccgggaagcgggactccaaatgggtcgcagtcgcagccgctctccacggagggaacgtaggcgttcccggtccacatcccgggagagagaacgcaggcgccgagaaaggtccaggtctcgggagagagatcggagaaggagccgctcgcgatccccgcaccgaagacgctcccgatctccaagacgacatagatccacatctccttccccttctcgactgaaagaaagaagagatgaggaaaagaaagaaacaaaagaaacaaagagcaaagaacggcagattactgaggaagacttagagggcaaaacagaggaagaaatagaaatgatgaagttaatgggatttgcctcctttgactccacaaaaggtaagaaggtggatggctctgtaaatgcctatgccataaatgtctctcagaagaggaagtacaggcagtacatgaatcgaaaaggtggattcaacagacctttggatttcattgcatgagaattgaagtgttgaaggatgattttttttcccctcatcttggtcagagagtggatttgtattttgtatttaacttgcattcaaaaaacaggatctcagttctcctttcttgtaaagtaagctgaacatggttatgcctccatgttaccatacaataacaaggacagagatgccttaaaacggaggaacaaatccaaaaagaataacagcagtagcagatcaactcacaatgaaatggagaagaatagacgggctcatcttcgcttgtgcctggagaagttgaaggggctggtgccactgggacccgaatcaagtcgacacactacgttgagtttattaacaaaagccaaattgcacataaagaaacttgaagattgtgacagaaaagccgttcaccaaatcgaccagcttcagcgagagcagcgacacctgaagaggcagctggagaagctgggcattgagaggatccggatggacagcatcggctccaccgtctcctcggagcgctccgactccgacagggaagaaatcgacgttgacgtggagagcacggactatctcacaggtgatctggactggagcagcagcagtgtgagcgactctgacgagcggggcagcatgcagagcctcggcagtgatgagggctattccagcaccagcatcaagagaataaagctgcaggacagtcacaaggcgtgtcttggtctctaagagagtgggcactgcggctgtctccttgaaggttctccctgttggttctgattaggtaacgtattggacctgcccacaactcccttgcacgtaaacttcagtgtcccaccttgaccaaaatcagctttgtaactgttttcaaggaggtgcttaggattgtgggtttctgattgcatccactagcttctctttttctcgccataaaaatttgtctctgagagactatacattccaatcaatttgaagcatccaagaattcttagaccgaataagcaatgtccacatctcagcaatccccctctttgctctcctcgtgtcctctcccagtgacgttcctcatcccagtgacgttcctcatcccagtgacgttcctcatcccagtgacgttcctcatcccagtgacgttcctcatcccgggtaccgag

SEQ ID NO: 456365 - DNA, 618 bp, Homo sapiens
cccggagttgttgcacagttgtttccgggaagcgggactccaaatgggtcgcagtcgcagccgctctccacggagggaacgtaggcgttcccggtccacatcccgggagagagaacgcaggcgccgagaaaggtccaggtctcgggagagagatcggagaaggagccgctcgcgatccccgcaccgaagacgctcccgatctccaagacgacatagatccacatctccttccccttctcgactgaaagaaagaagagatgaggaaaagaaagaaacaaaagaaacaaagagcaaagaacggcagattactgaggaagacttagagggcaaaacagaggaagaaatagaaatgatgaagttaatgggatttgcctcctttgactccacaaaaggtaagaaggtggatggctctgtaaatgcctatgccataaatgtctctcagaagaggaagtacaggtatgcatagcccccattattatgtttgaactaataaatcagttttttacttcaaactttattatgagataatcatgtttgtaggaaatgtagcagttttccatactgttccttgtttgaatgaaatattcattgcttatattctggtgtgttaaaattgtt

SEQ ID NO: 456366 - DNA, 228 bp, Homo sapiens
gcggccgcctactactactactgctcgaattcaagcttctaacgatgtacggggacatgtatcctttcacacatttgccttgacaaacttctttcactcacatctttttcactgactttttttgtggggggcggggccggggggactctggtatctaattctttaatgattcctataaatctaatgacattcaataaagttgagcaaacattttacttaaaaaaaaaa

SEQ ID NO: 456367 - DNA, 1223 bp, Homo sapiens
ttcggcacttgggagaagatgtttgaaaaaactgactctgctaatgagcctggactcagagctcaagtctgaactctacctccagacagaatgaagttcatctcgacatctctgcttctcatgctgctggtcagcagcctctctccagtccaaggtgttctggaggtctattacacaagcttgaggtgtagatgtgtccaagagagctcagtctttatccctagacgcttcattgatcgaattcaaatcttgccccgtgggaatggttgtccaagaaaagaaatcatagtctggaagaagaacaagtcaattgtgtgtgtggaccctcaagctgaatggatacaaagaatgatggaagtattgagaaaaagaagttcttcaactctaccagttccagtgtttaagagaaagattccctgatgctgatatttccactaagaacacctgcattcttcccttatccctgctctggattttagttttgtgcttagttaaatcttttccaggaaaaagaacttccccatacaaataagcatgagactatgtaaaaataaccttgcagaagctgatggggcaaactcaagcttcttcactcacagcaccctatatacacttggagtttgcattcttattcatcagggaggaaagtttctttgaaaatagttattcagttataagtaatacaggattattttgattatatacttgttgtttaatgtttaaaatttcttagaaaacaatggaatgagaatttaagcctcaaatttgaacatgtggcttgaattaagaagaaaattatggcatatattaaaagcaggcttctatgaaagactcaaaaagctgcctgggaggcagatggaacttgagcctgtcaagaggcaaaggaatccatgtagtagatatcctctgcttaaaaactcactacggaggagaattaagtcctacttttaaagaatttctttataaaatttactgtctaagattaatagcattcgaagatccccagacttcatagaatactcagggaaagcatttaaagggtgatgtacacatgtatcctttcacacatttgccttgacaaacttctttcactcacatctttttcactgactttttttgtggggggcggggccggggggactctggtatctaattctttaatgattcctataaatctaatgacattcaataaagttgagcaaacattttacttaaaaaaaaaa

SEQ ID NO: 456368 - DNA, 1623 bp, Homo sapiens
cagcttattttgttctcccgattgcagtgcaacagataagcacattttaaagatattgtgatataactttagaagtgagccaatcttggagtaagttatttggttgttctccaatgcacgtaaatgttatcaacaaaacactaacctctgacatgtgaggccctcgcagctttggattcaaccccaccagctcacacatactgttccacaaatggttgttctcttattcctctgaccccatactacaaatcacctattccagatcccaaactgcccagctccaatttcacttcatctaggaataattattttcataccaaactcttttctttattaaaagtataggattgactaaaaagtaagactgaattatttaatttttattttcccccagagtctggaagaagaacaagtcaattgtgtgtgtggaccctcaagctgaatggatacaaagaatgatggaagtattgagaaagtaagttaggcataacaaggggtttcagattccaacttgtactgaagagtttccctttcctgggcagtcaaaatagggactagcttgaatttatgagaagttcctaagacaaatgtgtgtttttcactgttattgcttatcagatggagtaggggtagctcattccagcagctcagtaaaccaaactagatgccagtatacataagagtccttgcccggtatctccagaggaaagccacagtttcttgtgtttctctaaacatgacaattttgtttttgtttctgcttcacagaagaagttcttcaactctaccagttccagtgtttaagagaaagattccctgatgctgatatttccactaagaacacctgcattcttcccttatccctgctctggattttagttttgtgcttagttaaatcttttccaggaaaaagaacttccccatacaaataagcatgagactatgtaaaaataaccttgcagaagctgatggggcaaactcaagcttcttcactcacagcaccctatatacacttggagtttgcattcttattcatcagggaggaaagtttctttgaaaatagttattcagttataagtaatacaggattattttgattatatacttgttgtttaatgtttaaaatttcttagaaaacaatggaatgagaatttaagcctcaaatttgaacatgtggcttgaattaagaagaaaattatggcatatattaaaagcaggcttctatgaaagactcaaaaagctgcctgggaggcagatggaacttgagcctgtcaagaggcaaaggaatccatgtagtagatatcctctgcttaaaaactcactacggaggagaattaagtcctacttttaaagaatttctttataaaatttactgtctaagattaatagcattcgaagatccccagacttcatagaatactcagggaaagcatttaaagggtgatgtacacatgtatcctttcacacatttgccttgacaaacttctttcactcacatctttttcactgactttttttgtggggggcggggccggggggactctggtatctaattctttaatgattcctataaatctaatgacattcaataaagttgagcaaacattttacttaaaaaaaaaa

SEQ ID NO: 456369 - DNA, 1175 bp, Homo sapiens
ttcggcacttgggagaagatgtttgaaaaaactgactctgctaatgagcctggactcagagctcaagtctgaactctacctccagacagaatgaagttcatctcgacatctctgcttctcatgctgctggtcagcagcctctctccagtccaaggtgttctggaggtctattacacaagcttgaggtgtagatgtgtccaagagagctcagtctttatccctagacgcttcattgatcgaattcaaatcttgccccgtgggaatggttgtccaagaaaagaaatcatagtctggaagaagaacaagtcaattgtgtgtgtggaccctcaagctgaatggatacaaagaatgatggaagtattgagaaaaagaagttcttcaactctaccagttccagtgtttaagagaaagattccctgatgctgatatttccactaagaacacctgcattcttcccttatccctgctctggattttagttttgtgcttagttaaatcttttccaggaaaaagaacttccccatacaaataagcatgagactatgtaaaaataaccttgcagaagctgatggggcaaactcaagcttcttcactcacagcaccctatatacacttggagtttgcattcttattcatcagggaggaaagtttctttgaaaatagttattcagttataagtaatacaggattattttgattatatacttgttgtttaatgtttaaaatttcttagaaaacaatggaatgagaatttaagcctcaaatttgaacatgtggcttgaattaagaagaaaattatggcatatattaaaagcaggcttctatgaaagactcaaaaagctgcctgggaggcagatggaacttgagcctgtcaagaggcaaaggaatccatgtagtagatatcctctgcttaaaaactcactacggaggagaattaagtcctacttttaaagaatttctttataaaatttactgtctaagattaatagcattcgaagatccccagacttcatagaatactcagggaaagcatttaaagggtgatgtacacatgtatcctttcacacatttgccttgacaaacttctttcactcacatctttttcactgacttttttagatggaaagctgtgctcgacggtatatatacagtactcaaggtgcttaaataggtat

SEQ ID NO: 456370 - DNA, 724 bp, Homo sapiens
ttcggcacttgggagaagatgtttgaaaaaactgactctgctaatgagcctggactcagagctcaagtctgaactctacctccagacagaatgaagttcatctcgacatctctgcttctcatgctgctggtcagcagcctctctccagtccaaggtgttctggaggtctattacacaagcttgaggtgtagatgtgtccaagagagctcagtctttatccctagacgcttcattgatcgaattcaaatcttgccccgtgggaatggttgtccaagaaaagaaatcatagtctggaagaagaacaagtcaattgtgtgtgtggaccctcaagctgaatggatacaaagaatgatggaagtattgagaaaaagaagttcttcaactctaccagttccagtgtttaagagaaagattccctgatgctgatatttccactaagaacacctgcattcttcccttatccctgctctggattttagttttgtgcttagttaaatcttttccaggaaaaagaacttccccatacaaataagcatgagactatgtaaaaataaccttgcagaagctgatggggcaaactcaagcttcttcactcacatctttttcactgactttttttgtggggggcggggccggggggactctggtatctaattctttaatgattcctataaatctaatgacattcaataaagttgagcaaacattttacttaaaaaaaaaa

SEQ ID NO: 456371 - DNA, 507 bp, Homo sapiens
tgcatgagtaaacatccttctaataatgaacagaccaataatgtcttaagagagaaaaagaacaatcttttcctttttgctgtttctggagagagctgtttgaatttggaaacccatgttggctgtcccaaatatgagatttggcatctttcttttgtggtggggatgggttttggccactgaaagcagaatgcactggcccggaagagaagtccacgagatgtctaagaaaggcagatgaaatagtcagcaaggtgaagtgtaacttatcagatgctcggccattagctgaatgagccttccagcagacctccctcatcacaaacccccatccgtgctccagctcacctccaagaaagttctgacacctcttttgggaaaacatccatgcacagactaagaactagaacaagcagacatcaagaagaagtcttgtaggttggaatttgtcatttgatccaaaataaaagtgggtgttcaacaaatgtacaccctatgttcagttca

SEQ ID NO: 456372 - DNA, 2822 bp, Homo sapiens
tgcatgagtaaacatccttctaataatgaacagaccaataatgtcttaagagagaaaaagaacaatcttttcctttttgctgtttctggagagagctgtttgaatttggaaacccatgttggctgtcccaaatatgagatttggcatctttcttttgtggtggggatgggttttggccactgaaagcagaatgcactggcccggaagagaagtccacgagatgtctaagaaaggcaggccccaaagacaaagacgagaagtacatgaagatgcccacaagcaagtcagcccaattctgagacgaagtcctgacatcaccaaatcgcctctgacaaagtcagaacagcttctgaggatagatgaccatgatttcagcatgaggcctggctttggaggccctgccattcctgttggtgtggatgtgcaggtggagagtttggatagcatctcagaggttgacatggactttacgatgaccctctacctgaggcactactggaaggacgagaggctgtcttttccaagcaccaacaacctcagcatgacgtttgatggccggctggtcaagaagatctgggtccctgacatgtttttcgtgcactccaaacgctccttcatccacgacaccaccacagacaacgtcatgttgcgggtccagcctgatgggaaagtgctctatagtctcagggttacagtaactgcaatgtgcaacatggacttcagccgatttcccttggacacacaaacgtgctctcttgaaattgaaagctatgcctatacagaagatgacctcatgctgtactggaaaaagggcaatgactccttaaagacagatgaacggatctcactctcccagttcctcattcaggaattccacaccaccaccaaactggctttctacagcagcacaggctggtacaaccgtctctacattaatttcacgttgcgtcgccacatcttcttcttcttgctccaaacttatttccccgctaccctgatggtcatgctgtcctgggtgtccttctggatcgaccgcagagccgtgcctgccagagtccccttaggtatcacaacggtgctgaccatgtccaccatcatcacgggcgtgaatgcctccatgccgcgcgtctcctacatcaaggccgtggacatctacctctgggtcagctttgtgttcgtgttcctctcggtgctggagtatgcggccgtcaactacctgaccactgtgcaggagaggaaggaacagaagctgcgggagaagcttccctgcaccagcggattacctccgccccgcactgcaatgctggacggcaactacagtgatggggaggtgaatgacctggacaactacatgccagagaatggagagaagcccgacaggatgatggtgcagctgaccctggcctcagagaggagctccccacagaggaaaagtcagagaagcagctatgtgagcatgagaatcgacacccacgccattgataaatactccaggatcatctttccagcagcatacattttattcaatttaatatactggtctattttctcctagatgcttgtaattctacaaatttcacatttccatggcatgcactacagaaataactgtataatgaaaaagtatttaaggatatggttaaaaaaaaatcccaggacccacccatgttttcactatcccttctgcagctttccaaagctacattgacgagacacttactggtttaatttgcacttattaaccatctattgaatacacagcattatattaggtgctgcaggaaatacgacactgtagcgactgatgttagttgttacccagatcccctggaaaagcacactaccagtgttgtgggcacatttagttccacccgttagacccttgatgctattcacatgaataatttattttcctcaagtgtcattacattgttcaggctacgtgaacttggaagcacctacaggccatttgcatgaaattcacatgcacctaaatcctcactttgacagaaactcatgcttcagtttataacctattacctattttgtatgcgactccacctccgcatgtttattttaataaaaggcaatgataacattcacattatttttctttatatgctgtggttcacaggctttaccccttcacaagaaaagctctttagattggcgcaattgcttctgattttggtgaaattttccctggtagggaaactttgaagataagagtacacacatgcattttgtctgttgtgtcatagaggtaactaggctagaaaatttgtgtttaaatgttccctattttatataatcaccacttcatgtttcttcttcttggagcatgtccttgttcaaagagaagtgctttctcagtgatgtgatatcttcactgaggaacttgggtagagaatgatttcttctgcataaacacttcaaggaaatacataatttgggactacttgtaactcattagaatgagaaatactcacatggtttcttaagagaaaaagaacatcggaaagcaaaataaatgggaagatatcactggacatctgcatttatactcgaaataccagcattttctatggaccagaaaactgccatcacctagaccacacagcccagataccaggcagacggatggcccaatggcaactgatgtcagggcatggggtaaaggagagggttctaatctggtgtatcacttaaaaacagttatttatattatatatctgctatatagatcaacctccaccaaacttacccaaacagcatttgttttatttgaaactcactttaataaagtgaattatatacacaaa

SEQ ID NO: 456373 - DNA, 2921 bp, Homo sapiens
tgcatgagtaaacatccttctaataatgaacagaccaataatgtcttaagagagaaaaagaacaatcttttcctttttgctgtttctggagagagctgtttgaatttggaaacccatgttggctgtcccaaatatgagatttggcatctttcttttgtggtggggatgggttttggccactgaaagcagaatgcactggcccggaagagaagtccacgagatgtctaagaaaggcagaatcgaggcttcatgaaggcaaaggcagtggcatctcagaatttgacaaacctcctttcatcagtgactggttccatttcaggctggcccaaagtcaaagccccaaagacaaagacgagaagtacatgaagatgcccacaagcaagtcagcccaattctgagacgaagtcctgacatcaccaaatcgcctctgacaaagtcagaacagcttctgaggatagatgaccatgatttcagcatgaggcctggctttggaggccctgccattcctgttggtgtggatgtgcaggtggagagtttggatagcatctcagaggttgacatggactttacgatgaccctctacctgaggcactactggaaggacgagaggctgtcttttccaagcaccaacaacctcagcatgacgtttgatggccggctggtcaagaagatctgggtccctgacatgtttttcgtgcactccaaacgctccttcatccacgacaccaccacagacaacgtcatgttgcgggtccagcctgatgggaaagtgctctatagtctcagggttacagtaactgcaatgtgcaacatggacttcagccgatttcccttggacacacaaacgtgctctcttgaaattgaaagctatgcctatacagaagatgacctcatgctgtactggaaaaagggcaatgactccttaaagacagatgaacggatctcactctcccagttcctcattcaggaattccacaccaccaccaaactggctttctacagcagcacaggctggtacaaccgtctctacattaatttcacgttgcgtcgccacatcttcttcttcttgctccaaacttatttccccgctaccctgatggtcatgctgtcctgggtgtccttctggatcgaccgcagagccgtgcctgccagagtccccttaggtatcacaacggtgctgaccatgtccaccatcatcacgggcgtgaatgcctccatgccgcgcgtctcctacatcaaggccgtggacatctacctctgggtcagctttgtgttcgtgttcctctcggtgctggagtatgcggccgtcaactacctgaccactgtgcaggagaggaaggaacagaagctgcgggagaagcttccctgcaccagcggattacctccgccccgcactgcaatgctggacggcaactacagtgatggggaggtgaatgacctggacaactacatgccagagaatggagagaagcccgacaggatgatggtgcagctgaccctggcctcagagaggagctccccacagaggaaaagtcagagaagcagctatgtgagcatgagaatcgacacccacgccattgataaatactccaggatcatctttccagcagcatacattttattcaatttaatatactggtctattttctcctagatgcttgtaattctacaaatttcacatttccatggcatgcactacagaaataactgtataatgaaaaagtatttaaggatatggttaaaaaaaaatcccaggacccacccatgttttcactatcccttctgcagctttccaaagctacattgacgagacacttactggtttaatttgcacttattaaccatctattgaatacacagcattatattaggtgctgcaggaaatacgacactgtagcgactgatgttagttgttacccagatcccctggaaaagcacactaccagtgttgtgggcacatttagttccacccgttagacccttgatgctattcacatgaataatttattttcctcaagtgtcattacattgttcaggctacgtgaacttggaagcacctacaggccatttgcatgaaattcacatgcacctaaatcctcactttgacagaaactcatgcttcagtttataacctattacctattttgtatgcgactccacctccgcatgtttattttaataaaaggcaatgataacattcacattatttttctttatatgctgtggttcacaggctttaccccttcacaagaaaagctctttagattggcgcaattgcttctgattttggtgaaattttccctggtagggaaactttgaagataagagtacacacatgcattttgtctgttgtgtcatagaggtaactaggctagaaaatttgtgtttaaatgttccctattttatataatcaccacttcatgtttcttcttcttggagcatgtccttgttcaaagagaagtgctttctcagtgatgtgatatcttcactgaggaacttgggtagagaatgatttcttctgcataaacacttcaaggaaatacataatttgggactacttgtaactcattagaatgagaaatactcacatggtttcttaagagaaaaagaacatcggaaagcaaaataaatgggaagatatcactggacatctgcatttatactcgaaataccagcattttctatggaccagaaaactgccatcacctagaccacacagcccagataccaggcagacggatggcccaatggcaactgatgtcagggcatggggtaaaggagagggttctaatctggtgtatcacttaaaaacagttatttatattatatatctgctatatagatcaacctccaccaaacttacccaaacagcatttgttttatttgaaactcactttaataaagtgaattatatacacaaa

SEQ ID NO: 456374 - DNA, 2771 bp, Homo sapiens
tgcatgagtaaacatccttctaataatgaacagaccaataatgtcttaagagagaaaaagaacaatcttttcctttttgctgtttctggagagagctgtttgaatttggaaacccatgttggctgtcccaaatatgagatttggcatctttcttttgtggtggggatgggttttggccactgaaagcagaatgcactggcccggaagagaagtccacgagatgtctaagaaaggcagcccaattctgagacgaagtcctgacatcaccaaatcgcctctgacaaagtcagaacagcttctgaggatagatgaccatgatttcagcatgaggcctggctttggaggccctgccattcctgttggtgtggatgtgcaggtggagagtttggatagcatctcagaggttgacatggactttacgatgaccctctacctgaggcactactggaaggacgagaggctgtcttttccaagcaccaacaacctcagcatgacgtttgatggccggctggtcaagaagatctgggtccctgacatgtttttcgtgcactccaaacgctccttcatccacgacaccaccacagacaacgtcatgttgcgggtccagcctgatgggaaagtgctctatagtctcagggttacagtaactgcaatgtgcaacatggacttcagccgatttcccttggacacacaaacgtgctctcttgaaattgaaagctatgcctatacagaagatgacctcatgctgtactggaaaaagggcaatgactccttaaagacagatgaacggatctcactctcccagttcctcattcaggaattccacaccaccaccaaactggctttctacagcagcacaggctggtacaaccgtctctacattaatttcacgttgcgtcgccacatcttcttcttcttgctccaaacttatttccccgctaccctgatggtcatgctgtcctgggtgtccttctggatcgaccgcagagccgtgcctgccagagtccccttaggtatcacaacggtgctgaccatgtccaccatcatcacgggcgtgaatgcctccatgccgcgcgtctcctacatcaaggccgtggacatctacctctgggtcagctttgtgttcgtgttcctctcggtgctggagtatgcggccgtcaactacctgaccactgtgcaggagaggaaggaacagaagctgcgggagaagcttccctgcaccagcggattacctccgccccgcactgcaatgctggacggcaactacagtgatggggaggtgaatgacctggacaactacatgccagagaatggagagaagcccgacaggatgatggtgcagctgaccctggcctcagagaggagctccccacagaggaaaagtcagagaagcagctatgtgagcatgagaatcgacacccacgccattgataaatactccaggatcatctttccagcagcatacattttattcaatttaatatactggtctattttctcctagatgcttgtaattctacaaatttcacatttccatggcatgcactacagaaataactgtataatgaaaaagtatttaaggatatggttaaaaaaaaatcccaggacccacccatgttttcactatcccttctgcagctttccaaagctacattgacgagacacttactggtttaatttgcacttattaaccatctattgaatacacagcattatattaggtgctgcaggaaatacgacactgtagcgactgatgttagttgttacccagatcccctggaaaagcacactaccagtgttgtgggcacatttagttccacccgttagacccttgatgctattcacatgaataatttattttcctcaagtgtcattacattgttcaggctacgtgaacttggaagcacctacaggccatttgcatgaaattcacatgcacctaaatcctcactttgacagaaactcatgcttcagtttataacctattacctattttgtatgcgactccacctccgcatgtttattttaataaaaggcaatgataacattcacattatttttctttatatgctgtggttcacaggctttaccccttcacaagaaaagctctttagattggcgcaattgcttctgattttggtgaaattttccctggtagggaaactttgaagataagagtacacacatgcattttgtctgttgtgtcatagaggtaactaggctagaaaatttgtgtttaaatgttccctattttatataatcaccacttcatgtttcttcttcttggagcatgtccttgttcaaagagaagtgctttctcagtgatgtgatatcttcactgaggaacttgggtagagaatgatttcttctgcataaacacttcaaggaaatacataatttgggactacttgtaactcattagaatgagaaatactcacatggtttcttaagagaaaaagaacatcggaaagcaaaataaatgggaagatatcactggacatctgcatttatactcgaaataccagcattttctatggaccagaaaactgccatcacctagaccacacagcccagataccaggcagacggatggcccaatggcaactgatgtcagggcatggggtaaaggagagggttctaatctggtgtatcacttaaaaacagttatttatattatatatctgctatatagatcaacctccaccaaacttacccaaacagcatttgttttatttgaaactcactttaataaagtgaattatatacacaaa

SEQ ID NO: 456375 - DNA, 1539 bp, Homo sapiens
tgcatgagtaaacatccttctaataatgaacagaccaataatgtcttaagagagaaaaagaacaatcttttcctttttgctgtttctggagagagctgtttgaatttggaaacccatgttggctgtcccaaatatgagatttggcatctttcttttgtggtggggatgggttttggccactgaaagcagaatgcactggcccggaagagaagtccacgagatgtctaagaaaggcaggccccaaagacaaagacgagaagtacatgaagatgcccacaagcaagtcagcccaattctgagacgaagtcctgacatcaccaaatcgcctctgacaaagtcagaacagcttctgaggatagatgaccatgatttcagcatgaggcctggctttggaggccctgccattcctgttggtgtggatgtgcaggtggagagtttggatagcatctcagaggttgacatggactttacgatgaccctctacctgaggcactactggaaggacgagaggctgtcttttccaagcaccaacaacctcagcatgacgtttgatggccggctggtcaagaagatctgggtccctgacatgtttttcgtgcactccaaacgctccttcatccacgacaccaccacagacaacgtcatgttgcgggtccagcctgatgggaaagtgctctatagtctcagggttacagtaactgcaatgtgcaacatggacttcagccgatttcccttggacacacaaacgtgctctcttgaaattgaaagctatgcctatacagaagatgacctcatgctgtactggaaaaagggcaatgactccttaaagacagatgaacggatctcactctcccagttcctcattcaggaattccacaccaccaccaaactggctttctacagcagcacaggctggtacaaccgtctctacattaatttcacgttgcgtcgccacatcttcttcttcttgctccaaacttatttccccgctaccctgatggtcatgctgtcctgggtgtccttctggatcgaccgcagagccgtgcctgccagagtccccttaggtatcacaacggtgctgaccatgtccaccatcatcacgggcgtgaatgcctccatgccgcgcgtctcctacatcaaggccgtggacatctacctctgggtcagctttgtgttcgtgttcctctcggtgctggagtatgcggccgtcaactacctgaccactgtgcaggagaggaaggaacagaagctgcgggagaagcttccctgcaccagcggattacctccgccccgcactgcaatgctggacggcaactacagtgatggggaggtgaatgacctggacaactacatgccagagaatggagagaagcccgacaggatgatggtgcagctgaccctggcctcagagaggagctccccacagaggaaaagtcagagaagcagctatgtgagcatgagaatttaacccccccgccttggtaaaaaaccccgggtattttttcccagcctccattttttaaaataaaaaaccgggtg

SEQ ID NO: 456376 - DNA, 298 bp, Homo sapiens
cggtagggaatatataacgtggtgataaccgctctgtacaggaagcttgcaaattttctgtacaatgtgctgtgaaaaatctgatgactttaattttaaaatcttgtgacattttgcttatactaaaagttatctatctttagttgaatattttcttttggagagattgtatattttaaaatactgtttagagtttatgagcatatattgcatttaaagaaagataaagcttctgaaatactactgcaattgcttcccttcttaaacagtataataaatgcttagttgtgatatgtta

SEQ ID NO: 456377 - DNA, 884 bp, Homo sapiens
ggtttagtatgataatgtatgtctggaacttaataaagactcaaatgctatttaatatatttttaaagtatagcagttttccatttgtctttctgaaacatttctaacagtttatgttaaaattagcatgtggcccgtaagtacttcactgggtggaatttaaaatgtaattaattaatgactgaatagtaaaatgaagaataatagcacttaatctcagttgtctttcttcagctaatgtcttctatctattaagcaaatatttgagtgtctatactgcccagagttctttaaagttttggagggggctgctagtcacatgtctgtatttaccatcattggacacaaataccaggtcttcttgttaactctttttagagggtttgcaattcatggttaacattatgtttaagcttccttaaaaaacaaaacaaaacaaaaaaaaaacattgtgggacaagtttgggcgtattcatactattcttatttttaacattggagacttaaaattgtaagactataaggaaatatatttactttcttcgtctaacaaataattgtttgtcacttagaaaaagcagagagatcttgctaagatgagaaaatgtctcagaccagaagaactgacaaaccagatgaaccaaatagaaataagcatgcaacatgaacagctggaagagagttttcaggaactagtggaagattaccggcgtgttattgaacgacttgctcaagagtaaagattatactgctctgtacaggaagcttgcaaattttctgtacaatgtgctgtgaaaaatctctgatgactctaatttttttctttggagagatagatatttttactgttagagtgatgagatatattgctttaagaagtgctt

SEQ ID NO: 456378 - DNA, 247 bp, Homo sapiens
gcctactactactaaattcgcggccgctcgtgatgactttaattttaaaatcttgtgacattttgcttatactaaaagttatctatctttagttgaatattttcttttggagagattgtatattttaaaatactgtttagagtttatgagcatatattgcatttaaagaaagataaagcttctgaaatactactgcaattgcttcccttcttaaacagtataataaatgcttagttgtgatatgtta

SEQ ID NO: 456379 - DNA, 1512 bp, Homo sapiens
gagcgcgcgggttgatcgtccttcctcagccgcgggtgatcgtagctcggaaatggcgggatttggtgctatggagaaatttttggtagaatataagagtgcagtggagaagaaactggcagagtacaaatgtaacaccaacacagcaattgaactaaaatttgaaactgcttttggttacaagggtctaaagatcctgttatactatattgctggtagcctgtcaacaatgttccgtgttgaatatgcatctaaagttgatgagaactttgactgtgtagaggcagatgatgttgagggcaaaattagacaaatcattccacctggattttgcacaaacacgaatgatttcctttctttactggaaaaggaagttgatttcaagccattcggaaccttacttcatacctactcagttctcagtccaacaggaggagaaaactttacctttcagatatataaggctgacatgacatgtagaggctttcgagaatatcatgaaaggcttcagacctttttgatgtggtttattgaaactgctagctttattgacgtggatgatgaaagatggcactactttctagtatttgagaagtataataaggatggagctacgctctttgcgaccgtaggctacatgacagtctataattactatgtgtacccagacaaaacccggccacgtgtaagtcagatgctgattttgactccatttcaaggtcaaggccatggtgctcaacttcttgaaacagttcatagatactacactgaatttcctacagttcttgatattacagcggaagatccatccaaaagctatgtgaaattacgagactttgtgcttgtgaagctttgtcaagatttgccctgtttttcccgggaaaaattaatgcaaggattcaatgaagatatggcgatagaggcacaacagaagttcaaaataaataagcaacacgctagaagggtttatgaaattcttcgactactggtaactgacatgagtgatgccgaacaatacagaagctacagactggatattaaaagaagactaattagcccatataagaaaaagcagagagatcttgctaagatgagaaaatgtctcagaccagaagaactgacaaaccagatgaaccaaatagaaataagcatgcaacatgaacagctggaagagagttttcaggaactagtggaagattaccggcgtgttattgaacgacttgctcaagagtaaagattatactgctctgtacaggaagcttgcaaattttctgtacaatgtgctgtgaaaaatctgatgactttaattttaaaatcttgtgacattttgcttatactaaaagttatctatctttagttgaatattttcttttggagagattgtatattttaaaatactgtttagagtttatgagcatatattgcatttaaagaaagataaagcttctgaaatactactgcaattgcttcccttcttaaacagtataataaatgcttagttgtgatatgtta

SEQ ID NO: 456380 - DNA, 1417 bp, Homo sapiens
ggacgcgtgggtcgacccacgcgtccgctttctttcctgagtatacccatcaactctttggggatgatgaaactgcttttggttacaagggtctaaagatcctgttatactatattgctggtagcctgtcaacaatgttccgtgttgaatatgcatctaaagttgatgagaactttgactgtgtagaggcagatgatgttgagggcaaaattagacaaatcattccacctggattttgcacaaacacgaatgatttcctttctttactggaaaaggaagttgatttcaagccattcggaaccttacttcatacctactcagttctcagtccaacaggaggagaaaactttacctttcagatatataaggctgacatgacatgtagaggctttcgagaatatcatgaaaggcttcagacctttttgatgtggtttattgaaactgctagctttattgacgtggatgatgaaagatggcactactttctagtatttgagaagtataataaggatggagctacgctctttgcgaccgtaggctacatgacagtctataattactatgtgtacccagacaaaacccggccacgtgtaagtcagatgctgattttgactccatttcaaggtcaaggccatggtgctcaacttcttgaaacagttcatagatactacactgaatttcctacagttcttgatattacagcggaagatccatccaaaagctatgtgaaattacgagactttgtgcttgtgaagctttgtcaagatttgccctgtttttcccgggaaaaattaatgcaaggattcaatgaagatatggcgatagaggcacaacagaagttcaaaataaataagcaacacgctagaagggtttatgaaattcttcgactactggtaactgacatgagtgatgccgaacaatacagaagctacagactggatattaaaagaagactaattagcccatataagaaaaagcagagagatcttgctaagatgagaaaatgtctcagaccagaagaactgacaaaccagatgaaccaaatagaaataagcatgcaacatgaacagctggaagagagttttcaggaactagtggaagattaccggcgtgttattgaacgacttgctcaagagtaaagattatactgctctgtacaggaagcttgcaaattttctgtacaatgtgctgtgaaaaatctgatgactttaattttaaaatcttgtgacattttgcttatactaaaagttatctatctttagttgaatattttcttttggagagattgtatattttaaaatactgtttagagtttatgagcatatattgcatttaaagaaagataaagcttctgaaatactactgcaattgcttcccttcttaaacagtataataaatgcttagttgtgatatgtta

SEQ ID NO: 456381 - DNA, 1099 bp, Homo sapiens
  misc_feature (39)..(39): n is a, c, g, or t
tcagggctcatatcagtaggggagagtacttggactttnagatatataaggctgacatgacatgtagaggctttcgagaatatcatgaaaggcttcagacctttttgatgtggtttattgaaactgctagctttattgacgtggatgatgaaagatggcactactttctagtatttgagaagtataataaggatggagctacgctctttgcgaccgtaggctacatgacagtctataattactatgtgtacccagacaaaacccggccacgtgtaagtcagatgctgattttgactccatttcaaggtcaaggccatggtgctcaacttcttgaaacagttcatagatactacactgaatttcctacagttcttgatattacagcggaagatccatccaaaagctatgtgaaattacgagactttgtgcttgtgaagctttgtcaagatttgccctgtttttcccgggaaaaattaatgcaaggattcaatgaagatatggcgatagaggcacaacagaagttcaaaataaataagcaacacgctagaagggtttatgaaattcttcgactactggtaactgacatgagtgatgccgaacaatacagaagctacagactggatattaaaagaagactaattagcccatataagaaaaagcagagagatcttgctaagatgagaaaatgtctcagaccagaagaactgacaaaccagatgaaccaaatagaaataagcatgcaacatgaacagctggaagagagttttcaggaactagtggaagattaccggcgtgttattgaacgacttgctcaagagtaaagattatactgctctgtacaggaagcttgcaaattttctgtacaatgtgctgtgaaaaatctgatgactttaattttaaaatcttgtgacattttgcttatactaaaagttatctatctttagttgaatattttcttttggagagattgtatattttaaaatactgtttagagtttatgagcatatattgcatttaaagaaagataaagcttctgaaatactactgcaattgcttcccttcttaaacagtataataaatgcttagttgtgatatgtta

SEQ ID NO: 456382 - DNA, 1133 bp, Homo sapiens
caacagcgaggcagaaacactttaccctttcacgatatactaacggcctgacactgcacactgctacgacgcgccttctccgagcaactactcactgcaacaggccttcagcaacccttctctccgactgctggcttctactctgaacacctgcctacgctttattgacgctggactgatgaaacgatggcactacctttctagctatttgagaagtataataaggatggagctacgctctttgcgaccgtaggctacatgacagtctataattactatgtgtacccagacaaaacccggccacgtgtaagtcagatgctgattttgactccatttcaaggtcaaggccatggtgctcaacttcttgaaacagttcatagatactacactgaatttcctacagttcttgatattacagcggaagatccatccaaaagctatgtgaaattacgagactttgtgcttgtgaagctttgtcaagatttgccctgtttttcccgggaaaaattaatgcaaggattcaatgaagatatggcgatagaggcacaacagaagttcaaaataaataagcaacacgctagaagggtttatgaaattcttcgactactggtaactgacatgagtgatgccgaacaatacagaagctacagactggatattaaaagaagactaattagcccatataagaaaaagcagagagatcttgctaagatgagaaaatgtctcagaccagaagaactgacaaaccagatgaaccaaatagaaataagcatgcaacatgaacagctggaagagagttttcaggaactagtggaagattaccggcgtgttattgaacgacttgctcaagagtaaagattatactgctctgtacaggaagcttgcaaattttctgtacaatgtgctgtgaaaaatctgatgactttaattttaaaatcttgtgacattttgcttatactaaaagttatctatctttagttgaatattttcttttggagagattgtatattttaaaatactgtttagagtttatgagcatatattgcatttaaagaaagataaagcttctgaaatactactgcaattgcttcccttcttaaacagtataataaatgcttagttgtgatatgtta

SEQ ID NO: 456383 - DNA, 1539 bp, Homo sapiens
gagcgcgcgggttgatcgtccttcctcagccgcgggtgatcgtagctcggaaatggcgggatttggtgctatggagaaatttttggtagaatataagagtgcagtggagaagaaactggcagagtacaaatgtaacaccaacacagcaattgaactaaaattagttcgttttcctgaagatcttgaaaatgacattagaactttctttcctgagtatacccatcaactctttggggatgatgaaactgcttttggttacaagggtctaaagatcctgttatactatattgctggtagcctgtcaacaatgttccgtgttgaatatgcatctaaagttgatgagaactttgactgtgtagaggcagatgatgttgagggcaaaattagacaaatcattccacctggattttgcacaaacacgaatgatttcctttctttactggaaaaggaagttgatttcaagccattcggaaccttacttcatacctactcagttctcagtccaacaggaggagaaaactttacctttcagatatataaggctgacatgacatgtagaggctttcgagaatatcatgaaaggcttcagacctttttgatgtggtttattgaaactgctagctttattgacgtggatgatgaaagatggcactactttctagtatttgagaagtataataaggatggagctacgctctttgcgaccgtaggctacatgacagtctataattactatgtgtacccagacaaaggccatggtgctcaacttcttgaaacagttcatagatactacactgaatttcctacagttcttgatattacagcggaagatccatccaaaagctatgtgaaattacgagactttgtgcttgtgaagctttgtcaagatttgccctgtttttcccgggaaaaattaatgcaaggattcaatgaagatatggcgatagaggcacaacagaagttcaaaataaataagcaacacgctagaagggtttatgaaattcttcgactactggtaactgacatgagtgatgccgaacaatacagaagctacagactggatattaaaagaagactaattagcccatataagaaaaagcagagagatcttgctaagatgagaaaatgtctcagaccagaagaactgacaaaccagatgaaccaaatagaaataagcatgcaacatgaacagctggaagagagttttcaggaactagtggaagattaccggcgtgttattgaacgacttgctcaagagtaaagattatactgctctgtacaggaagcttgcaaattttctgtacaatgtgctgtgaaaaatctgatgactttaattttaaaatcttgtgacattttgcttatactaaaagttatctatctttagttgaatattttcttttggagagattgtatattttaaaatactgtttagagtttatgagcatatattgcatttaaagaaagataaagcttctgaaatactactgcaattgcttcccttcttaaacagtataataaatgcttagttgtgatatgtta

SEQ ID NO: 456384 - DNA, 1284 bp, Homo sapiens
gagcgcgcgggttgatcgtccttcctcagccgcgggtgatcgtagctcggaaatggcgggatttggtgctatggagaaatttttggtagaatataagagtgcagtggagaagaaactggcagagtacaaatgtaacaccaacacagcaattgaactaaaattgcagatgatgttgagggcaaaattagacaaatcattccacctggattttgcacaaacacgaatgatttcctttctttactggaaaaggaagttgatttcaagccattcggaaccttacttcatacctactcagttctcagtccaacaggaggagaaaactttacctttcagatatataaggctgacatgacatgtagaggctttcgagaatatcatgaaaggcttcagacctttttgatgtggtttattgaaactgctagctttattgacgtggatgatgaaagatggcactactttctagtatttgagaagtataataaggatggagctacgctctttgcgaccgtaggctacatgacagtctataattactatgtgtacccagacaaaacccggccacgtgtaagcggaagatccatccaaaagctatgtgaaattacgagactttgtgcttgtgaagctttgtcaagatttgccctgtttttcccgggaaaaattaatgcaaggattcaatgaagatatggcgatagaggcacaacagaagttcaaaataaataagcaacacgctagaagggtttatgaaattcttcgactactggtaactgacatgagtgatgccgaacaatacagaagctacagactggatattaaaagaagactaattagcccatataagaaaaagcagagagatcttgctaagatgagaaaatgtctcagaccagaagaactgacaaaccagatgaaccaaatagaaataagcatgcaacatgaacagctggaagagagttttcaggaactagtggaagattaccggcgtgttattgaacgacttgctcaagagtaaagattatactgctctgtacaggaagcttgcaaattttctgtacaatgtgctgtgaaaaatctgatgactttaattttaaaatcttgtgacattttgcttatactaaaagttatctatctttagttgaatattttcttttggagagattgtatattttaaaatactgtttagagtttatgagcatatattgcatttaaagaaagataaagcttctgaaatactactgcaattgcttcccttcttaaacagtataataaatgcttagttgtgatatgtta

SEQ ID NO: 456385 - DNA, 1089 bp, Homo sapiens
gagcgcgcgggttgatcgtccttcctcagccgcgggtgatcgtagctcggaaatggcgggatttggtgctatggagaaatttttggtagaatataagagtgcagtggagaagaaactggcagagtacaaatgtaacaccaacacagcaattgaactaaaattagttcgttttcctgaagatcttgaaaatgacattagaactttctttcctgagtatacccatcaactctttggggatgatgaaactgcttttggttacaagggtctaaagatcctgttatactatattgctggtagcctgtcaacaatgttccgtgttgaatatgcatctaaagttgatgagaactttgactgtgtagaggcagatgatgttgagggcaaaattagacaaatcattccacctggattttgcacaaacacgaatgatttcctttctttactggaaaaggaagttgatttcaagccattcggaaccttacttcatacctactcagttctcagtccaacaggaggagaaaactttacctttcagatatataaggctgacatgacatgtagaggctttcgagaatatcatgaaaggcttcagacctttttgatgtggtttattgaaactgctagctttattgacgtggatgatgaaagatggcactactttctagtatttgagaagtataataaggatggagctacgctctttgcgaccgtaggctacatgacagtctataattactatgtgtacccagacaaaacccggccacgtgtaagtcagatgctgattttgactccatttcaaggtcaaggccatggtgctcaacttcttgaaacagttcatagatactacactgaatttcctacagttcttgatattacagcggaagatccatccaaaagctatgtgaaattacgagactttgtgcttgtgaagctttgtcaagatttgccctgtttttcccgggaaaaattaatgcaaggattcaatgaagatatggcgatagaggcacaacagaagttcaaaataaataagcaacacgctagaagggtttatgaaattcttcgactactgttacgtcagtcgggccccggttt

SEQ ID NO: 456386 - DNA, 1018 bp, Homo sapiens
ggtttagtatgataatgtatgtctggaacttaataaagactcaaatgctatttaatatatttttaaagtatagcagttttccatttgtctttctgaaacatttctaacagtttatgttaaaattagcatgtggcccgtaagtacttcactgggtggaatttaaaatgtaattaattaatgactgaatagtaaaatgaagaataatagcacttaatctcagttgtctttcttcagctaatgtcttctatctattaagcaaatatttgagtgtctatactgcccagagttctttaaagttttggagggggctgctagtcacatgtctgtatttaccatcattggacacaaataccaggtcttcttgttaactctttttagagggtttgcaattcatggttaacattatgtttaagcttccttaaaaaacaaaacaaaacaaaaaaaaaacattgtgggacaagtttgggcgtattcatactattcttatttttaacattggagacttaaaattgtaagactataaggaaatatatttactttcttcgtctaacaaataattgtttgtcacttagaaaaagcagagagatcttgctaagatgagaaaatgtctcagaccagaagaactgacaaaccagatgaaccaaatagaaataagcatgcaacatgaacagctggaagagagttttcaggaactagtggaagattaccggcgtgttattgaacgacttgctcaagagtaaagattatactgctctgtacaggaagcttgcaaattttctgtacaatgtgctgtgaaaaatctgatgactttaattttaaaatcttgtgacattttgcttatactaaaagttatctatctttagttgaatattttcttttggagagattgtatattttaaaatactgtttagagtttatgagcatatattgcatttaaagaaagataaagcttctgaaatactactgcaattgcttcccttcttaaacagtataataaatgcttagttgtgatatgtta

SEQ ID NO: 456387 - DNA, 484 bp, Homo sapiens
tgcagtaaacaagttttaatcagcattataaaccaagatctattttgtgtgtatgtctgtatctatgttcacatcttaatctgagacttctaaacattttcccacaggataattttgtgttctgcggactttcacttacctttgtgatgagtttcacctgacttttcctggctttttccctaggctgacatgacatgtagaggctttcgagaatatcatgaaaggcttcagacctttttgatgtggtttattgaaactgctagctttattgacgtggatgatgaaagatggcactactttctagtgtaagtacagttctaaagcaacagtagaccttattacctccacaaagccagcattttaattgtggcagcccaattattgggacagtataatgatatttttcccaggaaagaaaaactattgtttatgaggcttgagttttccttcattatgctttgggagaccttgagaatagagctga

SEQ ID NO: 456388 - DNA, 1590 bp, Homo sapiens
gagcgcgcgggttgatcgtccttcctcagccgcgggtgatcgtagctcggaaatggcgggatttggtgctatggagaaatttttggtagaatataagagtgcagtggagaagaaactggcagagtacaaatgtaacaccaacacagcaattgaactaaaattagttcgttttcctgaagatcttgaaaatgacattagaactttctttcctgagtatacccatcaactctttggggatgatgaaactgcttttggttacaagggtctaaagatcctgttatactatattgctggtagcctgtcaacaatgttccgtgttgaatatgcatctaaagttgatgagaactttgactgtgtagaggcagatgatgttgagggcaaaattagacaaatcattccacctggattttgcacaaacacgaatgatttcctttctttactggaaaaggaagttgatttcaagccattcggaaccttacttcatacctactcagttctcagtccaacaggaggagaaaactttacctttcagatatataaggctgacatgacatgtagaggctttcgagaatatcatgaaaggcttcagacctttttgatgtggtttattgaaactgctagctttattgacgtggatgatgaaagatggcactactttctagtatttgagaagtataataaggatggagctacgctctttgcgaccgtaggctacatgacagtctataattactatgtgtacccagacaaaacccggccacgtgtaagtcagatgctgattttgactccatttcaaggtcaaggccatggtgctcaacttcttgaaacagttcatagatactacactgaatttcctacagttcttgatattacagcggaagatccatccaaaagctatgtgaaattacgagactttgtgcttgtgaagctttgtcaagatttgccctgtttttcccgggaaaaattaatgcaaggattcaatgaagatatggcgatagaggcacaacagaagttcaaaataaataagcaacacgctagaagggtttatgaaattcttcgactactggtaactgacatgagtgatgccgaacaatacagaagctacagactggatattaaaagaagactaattagcccatataagaaaaagcagagagatcttgctaagatgagaaaatgtctcagaccagaagaactgacaaaccagatgaaccaaatagaaataagcatgcaacatgaacagctggaagagagttttcaggaactagtggaagattaccggcgtgttattgaacgacttgctcaagagtaaagattatactgctctgtacaggaagcttgcaaattttctgtacaatgtgctgtgaaaaatctgatgactttaattttaaaatcttgtgacattttgcttatactaaaagttatctatctttagttgaatattttcttttggagagattgtatattttaaaatactgtttagagtttatgagcatatattgcatttaaagaaagataaagcttctgaaatactactgcaattgcttcccttcttaaacagtataataaatgcttagttgtgatatgtta

SEQ ID NO: 456389 - DNA, 1642 bp, Homo sapiens
gagcgcgcgggttgatcgtccttcctcagccgcgggtgatcgtagctcggaaatggcgggatttggtgctatggagaaatttttggtagaatataagagtgcagtggagaagaaactggcagagtacaaatgtaacaccaacacagcaattgaactaaaattagttcgttttcctgaagatcttgaaaatgacattagaactttctttcctgagtatacccatcaactctttggggatgatgaaactgcttttggttacaagggtctaaagatcctgttatactatattgctggtagcctgtcaacaatgttccgtgttgaatatgcatctaaagttgatgagaactttgactgtgtagaggcagatgatgttgagggcaaaattagacaaatcattccacctggattttgcacaaacacgaatgatttcctttctttactggaaaaggaagttgatttcaagccattcggaaccttacttcatacctactcagttctcagtccaacaggaggagaaaactttacctttcagatatataaggctgacatgacatgtagaggctttcgagaatatcatgaaaggcttcagacctttttgatgtggtttattgaaactgctagctttattgacgtggatgatgaaagatggcactactttctagtatttgagaagtataataaggatggagctacgctctttgcgaccgtaggctacatgacagtctataattactatgtgtacccagacaaaacccggccacgtgtaagtcagatgctgattttgactccatttcaaggtcaaggccatggtgctcaacttcttgaaacagttcatagatactacactgaatttcctacagttcttgatattacagcggaagatccatccaaaagctatgtgaaattacgagactttgtgcttgtgaagctttgtcaagatttgccctgtttttcccgggaaaaattaatgcaaggattcaatgaagatatggcgatagaggcacaacagaagttcaaaataaataagcaacacgctagaagggtttatgaaattcttcgactactggtaactgacatgagtgatgccgaacaatacagaagctacagactggatattaaaagaagactaattagcccatataagaaaaagcagagagatcttgctaagatgagaaaatgtctcagaccagaagaactgacaaaccagatgaaccaaatagaaataagcatgcaacatgaacagctggaagagagttttcaggaactagtggaagattaccggcgtgttattgaacgacttgctcaagagtaaagattatactgctctgtacaggaagcttgcaaattttctgtacaatgtgctgtgaaaaatctgatgactttaattttaaaatcttgtgacattttgcttatactaaaagttatctatctttagttgaatattttcttttggagagattgtatattttaaaatactgtttagagtttatgagcatatattgcatttaaagaaagataaagcttctgaaatactactgcaattgcttcccttcttaaacagtataataaatgcttagttgtgatatgttaatgtgtgatgatatgattcttaaatacttacaataaacctcattcttaaata

SEQ ID NO: 456390 - DNA, 1536 bp, Homo sapiens
gagcgcgcgggttgatcgtccttcctcagccgcgggtgatcgtagctcggaaatggcgggatttggtgctatggagaaatttttggtagaatataagagtgcagtggagaagaaactggcagagtacaaatgtaacaccaacacagcaattgaactaaaattagttcgttttcctgaagatcttgaaaatgacattagaactttctttcctgagtatacccatcaactctttggggatgatgaaactgcttttggttacaagggtctaaagatcctgttatactatattgctggtagcctgtcaacaatgttccgtgttgaatatgcatctaaagttgatgagaactttgactgtgtagaggcagatgatgttgagggcaaaattagacaaatcattccacctggattttgcacaaacacgaatgatttcctttctttactggaaaaggaagttgatttcaagccattcggaaccttacttcatacctactcagttctcagtccaacaggaggagaatatcatgaaaggcttcagacctttttgatgtggtttattgaaactgctagctttattgacgtggatgatgaaagatggcactactttctagtatttgagaagtataataaggatggagctacgctctttgcgaccgtaggctacatgacagtctataattactatgtgtacccagacaaaacccggccacgtgtaagtcagatgctgattttgactccatttcaaggtcaaggccatggtgctcaacttcttgaaacagttcatagatactacactgaatttcctacagttcttgatattacagcggaagatccatccaaaagctatgtgaaattacgagactttgtgcttgtgaagctttgtcaagatttgccctgtttttcccgggaaaaattaatgcaaggattcaatgaagatatggcgatagaggcacaacagaagttcaaaataaataagcaacacgctagaagggtttatgaaattcttcgactactggtaactgacatgagtgatgccgaacaatacagaagctacagactggatattaaaagaagactaattagcccatataagaaaaagcagagagatcttgctaagatgagaaaatgtctcagaccagaagaactgacaaaccagatgaaccaaatagaaataagcatgcaacatgaacagctggaagagagttttcaggaactagtggaagattaccggcgtgttattgaacgacttgctcaagagtaaagattatactgctctgtacaggaagcttgcaaattttctgtacaatgtgctgtgaaaaatctgatgactttaattttaaaatcttgtgacattttgcttatactaaaagttatctatctttagttgaatattttcttttggagagattgtatattttaaaatactgtttagagtttatgagcatatattgcatttaaagaaagataaagcttctgaaatactactgcaattgcttcccttcttaaacagtataataaatgcttagttgtgatatgtta

SEQ ID NO: 456391 - DNA, 995 bp, Homo sapiens
gtcggaggaatactatttgcctcacaagacctggacgtggatgatgaaagatggcactactttctagtatttgagaagtataataaggatggagctacgctctttgcgaccgtaggctacatgacagtctataattactatgtgtacccagacaaaacccggccacgtgtaagtcagatgctgattttgactccatttcaaggtcaaggccatggtgctcaacttcttgaaacagttcatagatactacactgaatttcctacagttcttgatattacagcggaagatccatccaaaagctatgtgaaattacgagactttgtgcttgtgaagctttgtcaagatttgccctgtttttcccgggaaaaattaatgcaaggattcaatgaagatatggcgatagaggcacaacagaagttcaaaataaataagcaacacgctagaagggtttatgaaattcttcgactactggtaactgacatgagtgatgccgaacaatacagaagctacagactggatattaaaagaagactaattagcccatataagaaaaagcagagagatcttgctaagatgagaaaatgtctcagaccagaagaactgacaaaccagatgaaccaaatagaaataagcatgcaacatgaacagctggaagagagttttcaggaactagtggaagattaccggcgtgttattgaacgacttgctcaagagtaaagattatactgctctgtacaggaagcttgcaaattttctgtacaatgtgctgtgaaaaatctgatgactttaattttaaaatcttgtgacattttgcttatactaaaagttatctatctttagttgaatattttcttttggagagattgtatattttaaaatactgtttagagtttatgagcatatattgcatttaaagaaagataaagcttctgaaatactactgcaattgcttcccttcttaaacagtataataaatgcttagttgtgatatgtta

SEQ ID NO: 456392 - DNA, 1052 bp, Homo sapiens
  misc_feature (1)..(1): n is a, c, g, or t
nattcggaacgaggtttacctttcagatatataaggctgacatgacatgtagaggctttcgagaatatcatgaaaggcttcagacctttttgatgtggtttattgaaactgctagctttattgacgtggatgatgaaagatggcactactttctagtatttgagaagtataataaggatggagctacgctctttgcgaccgtaggctacatgacagtctataattactatgtgtacccagacaaaacccggccacgtgtaagaaggccatggtgctcaacttcttgaaacagttcatagatactacactgaatttcctacagttcttgatattacagcggaagatccatccaaaagctatgtgaaattacgagactttgtgcttgtgaagctttgtcaagatttgccctgtttttcccgggaaaaattaatgcaaggattcaatgaagatatggcgatagaggcacaacagaagttcaaaataaataagcaacacgctagaagggtttatgaaattcttcgactactggtaactgacatgagtgatgccgaacaatacagaagctacagactggatattaaaagaagactaattagcccatataagaaaaagcagagagatcttgctaagatgagaaaatgtctcagaccagaagaactgacaaaccagatgaaccaaatagaaataagcatgcaacatgaacagctggaagagagttttcaggaactagtggaagattaccggcgtgttattgaacgacttgctcaagagtaaagattatactgctctgtacaggaagcttgcaaattttctgtacaatgtgctgtgaaaaatctgatgactttaattttaaaatcttgtgacattttgcttatactaaaagttatctatctttagttgaatattttcttttggagagattgtatattttaaaatactgtttagagtttatgagcatatattgcatttaaagaaagataaagcttctgaaatactactgcaattgcttcccttcttaaacagtataataaatgcttagttgtgatatgtta

SEQ ID NO: 456393 - DNA, 917 bp, Homo sapiens
ggtgggcgctatggccttggcgggcgctatggccttggtgggcgctatggccttggtgggcgctatggccttggtgggcgctatggccttggcgggcgctatggccttggtgggcgctatggccttggtgggcgctatggccttgaccttgaaagggagtcaaaatcaggatctgaatttcctacagttcttaatattacagcggaagatccatccaaaagctatgtgaaattacgagactttgtgcttgtgaagctttgtcaagatttgccctgtttttcccgggaaaaattaatgcaaggattcaatgaagatatggcgatagaggcacaacagaagttcaaaataaataagcaacacgctagaagggtttatgaaattcttcgactactggtaactgacatgagtgatgccgaacaatacagaagctacagactggatattaaaagaagactaattagcccatataagaaaaagcagagagatcttgctaagatgagaaaatgtctcagaccagaagaactgacaaaccagatgaaccaaatagaaataagcatgcaacatgaacagctggaagagagttttcaggaactagtggaagattaccggcgtgttattgaacgacttgctcaagagtaaagattatactgctctgtacaggaagcttgcaaattttctgtacaatgtgctgtgaaaaatctgatgactttaattttaaaatcttgtgacattttgcttatactaaaagttatctatctttagttgaatattttcttttggagagattgtatattttaaaatactgtttagagtttatgagcatatattgcatttaaagaaagataaagcttctgaaatactactgcaattgcttcccttcttaaacagtataataaatgcttagttgtgatatgtta

SEQ ID NO: 456394 - DNA, 5651 bp, Homo sapiens
  misc_feature (77)..(77): n is a, c, g, or t
gggtgtcccctccgcgccgttaaaatgaaactctagtggctggagtccgggcagagcttgagggcagttggtgcggncgggttggttcttacaccccggcgggagcgcccagacaagccgagctgactggacttctccggccggccccattcccgaggctgcggcagcttcggttccgagaccgaccggagaggagcccgagtcccggcctctgggggattcgctctctgcagaccagtgggaccccgaaacttgaacgcaatctccagcccccttttttgccttcctttgtcacttgcccgggtttctcccaacgtgttcttttttttcctcttcattctccctccttcgaaggacacaaaagtggcttccgcggaaagatttggaggcggtgggagcttttctccccggagagcgactgtgtagaaaggatttttgggaagccgctttttaacacctctgctctccgtcccccaagcctctgtgtaatcctctgaggagaaaagcccatagcttgaaagttcgggggcattttgttgtgttctgtaggagagagggggaggaccctgttcgggtagtttggccggactggtactggccgttggaaaacccgaagtacatttccgtgtggaacttttgcagatatatatttttagatttttaaataccagataaaaaatatatgccttctatatatctcctggcgacctgcccctgacagcgcgatgtacaatacggtgtggagtatggaccgcgatgacgcagactggagggaggtgatgatgccctattcgacagaactgatattttatattgaaatggatcctccagctcttccaccaaagccacctaagccaatgacttcagcagttccaaatggaatgaaggacagttctgtttctcttcaggatgcagaatggtactggggggatatttcaagggaggaggtaaatgacaaattgcgggatatgccagatgggaccttcttggtccgagatgcctcaacaaaaatgcagggagattatactttgactttgcggaagggaggcaataataagttaataaagatctatcaccgggatggtaaatatggcttttctgatcctctgacatttaattccgtggtggagctcattaaccactatcaccatgaatctcttgctcagtacaatcccaaacttgatgtgaagctgatgtacccagtgtccagataccaacaggatcagttggtaaaagaagataatattgatgcagtaggtaaaaaactgcaagaataccactctcagtatcaggagaagagtaaagagtatgataggctgtatgaagaatatactagaacatcccaggaaatacagatgaagaggactgcaatagaagcttttaatgaaacaattaaaatatttgaagagcagtgtcacacacaagaacaacatagcaaagaatatattgagcgatttcgcagagaggggaatgaaaaggagattgaacgaattatgatgaattatgataaattgaaatcacgtctgggtgagattcatgatagcaaaatgcgtctagagcaggatttgaagaaacaagctttggacaaccgagaaatagataaaaaaatgaatagtatcaaacctgacctgatccagctgcgaaagatccgagatcaacaccttgtatggctcaatcacaaaggagtgagacagaaacgcctgaatgtctggctgggaattaagaatgaggatgctgatgagaactattttatcaatgaggaagatgaaaacctgccccattatgatgagaaaacctggtttgttgaggatatcaatcgagtacaagcagaggacttgctttatgggaaacctgatggtgcattcttaattcgtgagagtagcaagaaaggatgctatgcttgctctgtggtggccgatggggaagtgaagcactgtgtgatctacagcactgctcggggctatggctttgcagagccctacaacctgtacagctctctgaaggagctagtgctccattaccagcagacatccttggttcagcacaacgactccctcaacgtcaggcttgcctaccctgttcatgcacagatgccctcgctttgcagataaagaggaagtgggaagagaggtggttctctggcatttttttctacagtttttattagactacgatgagggcattctttctacatagactgcttgttttgcacaagaagtgattttgtgaatgtgaagtggagaggccgagcagcagccggccgggatgggggcattagaggcctgaggttctctaggactcagccatgccgctgcactgacatactaagctggaagcagatgttttttttgaaagtctgtttcattggggtttttgttttgtttagccagacaccctcaacagaatattaggcttgatggttatagcgggtggggttgtatttggaagcctctgaagagaccatgtctttttaaaatctaactcttgagagtgcagcaggggcatggctctgctgggagttgtgttttgctttggcagtctctcttccccccacgaagaaggctgtttaggttttgtgatagaatgggatttgatgaaaaagacaaccaaaggaaaatggggaggcttgggatttcatttaaataatctaagccaagatgataaaaaaaaccttcaactgaaggtactttgtttcttaccaacataatttaggcttcagcatctcaccagcccctccctctgaagaagtattatgttcagaagccaacaaaacagtttgttgccagaccaatgtttgatgggaaaacgtggcactcatagttgaatgtatacttctgtaccaaaacttgaacataaaagactagaatttgtgagttttagcaaacgctaaaattgatcactgtaactaaccccttctgtccttcctgcctgtttctctgagatgaggaatagcattctttttgtggggatggtgagctttgaatcataaaatgaagttggtgcttgtatggtgtttccttagcctaaagaatgatctgttgtttgaaacctttgtaacttgtttgtatgagtaaagaaaaggtgcaatgcagtgcttttagatggcttgatataccaaataacaatatagaacaacattattatatgtgcttccccaagtttaaaggccctgcagaaatagtaaacatggtttaatttcccttcatttccccctcctttgctggatggggttttgggagctataggttgctaaggaggggagtcagattgtggtcaggtgcctcagtaaatcacagacccaggggccctgtggtccagggtgagagtcacaccacattacacatgtgcttccatacagtggtttctgaagcttttgcagggagagaagatggcttagtgtttagactgttagtagaagccatctggaagcttttctctttgcctttttttgtgatcctgccattaaggctatgtgcagtctgccctcctgctccagtggccttgattttaggccaggaatcttctgctccatgtggcttaagccttccagctgagtgaagctaggcaaatggagtgggggcaggcatctattcctgcccccatcatgccccacacccatcagtcaacactcatttgacaaatagagtccagctgcctctgagccaatcctgggaccataataggctcagagtgagtcagctgtttgaacccaaagctgtgcagtcaggcaccctggctgagctagagaagccagtacctgcatcttggtttataaggcttacagctaggaaagctctagttctgggggtgaaagaaaaatattagtttacctgagcacttatttccatgacagggtctaaaatatggaccatgatgtagacacagatttttaattttggaaaaacctccagttactagtgacgaggatagaaagggaagtgcttctctttggctttttcttggttacactgcagtttcaggattgggtgagacagagacaaatgaacccccctctaaagtcatttaactaatagccagcacatcccttccccaaactgtcaattgaaatcttaactgaaagttttactgaataataccaagctaattgctgttgggcacacctggatggctttgcacctggtgttgaacctgctgaagcaggtggatgctcaagattacgtgcaaggaatccctcccatctggtactaaaatttcagtgtgttctgagtgtcttttaaaccaaaatggaaatacagatacagggctgtagtattcagtaatgtgtctgctccttgttgggcagacaccagcggtgtgcagggagagaccaagtaccatctttatctacacttgggctggcttgtggagaagggctgctttttttcagtcctacattccttcattttttttttcattcttgaattcattgttttgtgggatctaagacccaggggtcatttgagaggtttgacagtatcttttctgaccagttgccacatgacttgcttgaccctgagcctgtggaaatggcatagggaccagtctactacccactgggcctggtgtgtagagggggagagggtagcaaggtgcttctctacgcccatgacttgggagcaggtcttggcctccttcatgagagtctagtgccatgtcctgtcccatgatctggaccctgggactgtcttggcatcttaactgcagtttcaatgaggcagagggcaaagagagaccaagatcagaggggttcattatacccctggctagagaacccagctactgacatgcaagcagcttggggctggctggacacaggtactaggcccattgtttccaggtgaagctttcatcacagaacagtgttgtctccacctggccttagatggcacgccatgattcgggcctggatagactgcctgcgtccttaccactgatctggccaagaatgaggccctcccaacactttcactccctctccaagccttgatgggacctccacttatttaggcctcatgtgctttgaagaagctttgagagccaatgtgtcttccacgggtctcttttttgctacaagtaatcagccccatgtgttctcttaaactgagaattgcacctgggcaattcctgttttctaaggtggtctctgctgctatttaacaacccagagtaggcctctgtgaggcttcagtggcctcagaaaccagagggtccagatagggggcctgcttgggccctctgctgccaactgctcaaacctgctttagctccagccacttgtggcaaacaacctcgtttccttacaaattccagcatgtgactttggtgccgttacttgtgaaaaatctattctgttgtctttgatgtgtccaagaaaattcgtgtagtttacgtaaaaatatctgactcacaagaaagccaactgtatgtcttgtgatgggacagttcataatgtagttgctagaccactttacaaattgttcttgtcaccagatgtgttcagacattgctgtgcaattgttggggagggtagggggaaaggcgagaggagatacttattggtctttttgtttaataccttccccaagaggggacagtctggccaacttgctccagtaatgcaataaagacattgcaataaagtaaaaaaaaaa

SEQ ID NO: 456395 - DNA, 5474 bp, Homo sapiens
  misc_feature (77)..(77): n is a, c, g, or t
gggtgtcccctccgcgccgttaaaatgaaactctagtggctggagtccgggcagagcttgagggcagttggtgcggncgggttggttcttacaccccggcgggagcgcccagacaagccgagctgactggacttctccggccggccccattcccgaggctgcggcagcttcggttccgagaccgaccggagaggagcccgagtcccggcctctgggggattcgctctctgcagaccagtgggaccccgaaacttgaacgcaatctccagcccccttttttgccttcctttgtcacttgcccgggtttctcccaacgtgttcttttttttcctcttcattctccctccttcgaaggacacaaaagtggcttccgcggaaagatttggaggcggtgggagcttttctccccggagagcgactgtgtagaaaggatttttgggaagccgctttttaacacctctgctctccgtcccccaagcctctgtgtaatcctctgaggagaaaagcccatagcttgaaagttcgggggcattttgttgtgttctgtaggagagagggggaggaccctgttcgggtagtttggccggactggtactggccgttggaaaacccgaagtacatttccgtgtggaacttttgcagatatatatttttagatttttaaataccagataaaaaatatatgccttctatatatctcctggcgacctgcccctgacagcgcgatgtacaatacggtgtggagtatggaccgcgatgacgcagactggagggaggtgatgatgccctattcgacagaactgatattttatattgaaatggatcctccagctcttccaccaaagccacctaagccaatgacttcagcagttccaaatggaatgaaggacagttctgtttctcttcaggatgcagaatggtactggggggatatttcaagggaggaggtaaatgacaaattgcgggatatgccagatgggaccttcttggtccgagatgcctcaacaaaaatgcagggagattatactttgactttgcggaagggaggcaataataagttaataaagatctatcaccgggatggtaaatatggcttttctgatcctctgacatttaattccgtggtggagctcattaaccactatcaccatgaatctcttgctcagtacaatcccaaacttgatgtgaagctgatgtacccagtgtccagataccaacaggatcagttggtaaaagaagataatattgatgcagtaggtaaaaaactgcaagaataccactctcagtatcaggagaagagtaaagagtatgataggctgtatgaagaatatactagaacatcccaggaaatacagatgaagaggactgcaatagaagcttttaatgaaacaattaaaatatttgaagagcagtgtcacacacaagaacaacatagcaaagaatatattgagcgatttcgcagagaggggaatgaaaaggagattgaacgatggctcaatcacaaaggagtgagacagaaacgcctgaatgtctggctgggaattaagaatgaggatgctgatgagaactattttatcaatgaggaagatgaaaacctgccccattatgatgagaaaacctggtttgttgaggatatcaatcgagtacaagcagaggacttgctttatgggaaacctgatggtgcattcttaattcgtgagagtagcaagaaaggatgctatgcttgctctgtggtggccgatggggaagtgaagcactgtgtgatctacagcactgctcggggctatggctttgcagagccctacaacctgtacagctctctgaaggagctagtgctccattaccagcagacatccttggttcagcacaacgactccctcaacgtcaggcttgcctaccctgttcatgcacagatgccctcgctttgcagataaagaggaagtgggaagagaggtggttctctggcatttttttctacagtttttattagactacgatgagggcattctttctacatagactgcttgttttgcacaagaagtgattttgtgaatgtgaagtggagaggccgagcagcagccggccgggatgggggcattagaggcctgaggttctctaggactcagccatgccgctgcactgacatactaagctggaagcagatgttttttttgaaagtctgtttcattggggtttttgttttgtttagccagacaccctcaacagaatattaggcttgatggttatagcgggtggggttgtatttggaagcctctgaagagaccatgtctttttaaaatctaactcttgagagtgcagcaggggcatggctctgctgggagttgtgttttgctttggcagtctctcttccccccacgaagaaggctgtttaggttttgtgatagaatgggatttgatgaaaaagacaaccaaaggaaaatggggaggcttgggatttcatttaaataatctaagccaagatgataaaaaaaaccttcaactgaaggtactttgtttcttaccaacataatttaggcttcagcatctcaccagcccctccctctgaagaagtattatgttcagaagccaacaaaacagtttgttgccagaccaatgtttgatgggaaaacgtggcactcatagttgaatgtatacttctgtaccaaaacttgaacataaaagactagaatttgtgagttttagcaaacgctaaaattgatcactgtaactaaccccttctgtccttcctgcctgtttctctgagatgaggaatagcattctttttgtggggatggtgagctttgaatcataaaatgaagttggtgcttgtatggtgtttccttagcctaaagaatgatctgttgtttgaaacctttgtaacttgtttgtatgagtaaagaaaaggtgcaatgcagtgcttttagatggcttgatataccaaataacaatatagaacaacattattatatgtgcttccccaagtttaaaggccctgcagaaatagtaaacatggtttaatttcccttcatttccccctcctttgctggatggggttttgggagctataggttgctaaggaggggagtcagattgtggtcaggtgcctcagtaaatcacagacccaggggccctgtggtccagggtgagagtcacaccacattacacatgtgcttccatacagtggtttctgaagcttttgcagggagagaagatggcttagtgtttagactgttagtagaagccatctggaagcttttctctttgcctttttttgtgatcctgccattaaggctatgtgcagtctgccctcctgctccagtggccttgattttaggccaggaatcttctgctccatgtggcttaagccttccagctgagtgaagctaggcaaatggagtgggggcaggcatctattcctgcccccatcatgccccacacccatcagtcaacactcatttgacaaatagagtccagctgcctctgagccaatcctgggaccataataggctcagagtgagtcagctgtttgaacccaaagctgtgcagtcaggcaccctggctgagctagagaagccagtacctgcatcttggtttataaggcttacagctaggaaagctctagttctgggggtgaaagaaaaatattagtttacctgagcacttatttccatgacagggtctaaaatatggaccatgatgtagacacagatttttaattttggaaaaacctccagttactagtgacgaggatagaaagggaagtgcttctctttggctttttcttggttacactgcagtttcaggattgggtgagacagagacaaatgaacccccctctaaagtcatttaactaatagccagcacatcccttccccaaactgtcaattgaaatcttaactgaaagttttactgaataataccaagctaattgctgttgggcacacctggatggctttgcacctggtgttgaacctgctgaagcaggtggatgctcaagattacgtgcaaggaatccctcccatctggtactaaaatttcagtgtgttctgagtgtcttttaaaccaaaatggaaatacagatacagggctgtagtattcagtaatgtgtctgctccttgttgggcagacaccagcggtgtgcagggagagaccaagtaccatctttatctacacttgggctggcttgtggagaagggctgctttttttcagtcctacattccttcattttttttttcattcttgaattcattgttttgtgggatctaagacccaggggtcatttgagaggtttgacagtatcttttctgaccagttgccacatgacttgcttgaccctgagcctgtggaaatggcatagggaccagtctactacccactgggcctggtgtgtagagggggagagggtagcaaggtgcttctctacgcccatgacttgggagcaggtcttggcctccttcatgagagtctagtgccatgtcctgtcccatgatctggaccctgggactgtcttggcatcttaactgcagtttcaatgaggcagagggcaaagagagaccaagatcagaggggttcattatacccctggctagagaacccagctactgacatgcaagcagcttggggctggctggacacaggtactaggcccattgtttccaggtgaagctttcatcacagaacagtgttgtctccacctggccttagatggcacgccatgattcgggcctggatagactgcctgcgtccttaccactgatctggccaagaatgaggccctcccaacactttcactccctctccaagccttgatgggacctccacttatttaggcctcatgtgctttgaagaagctttgagagccaatgtgtcttccacgggtctcttttttgctacaagtaatcagccccatgtgttctcttaaactgagaattgcacctgggcaattcctgttttctaaggtggtctctgctgctatttaacaacccagagtaggcctctgtgaggcttcagtggcctcagaaaccagagggtccagatagggggcctgcttgggccctctgctgccaactgctcaaacctgctttagctccagccacttgtggcaaacaacctcgtttccttacaaattccagcatgtgactttggtgccgttacttgtgaaaaatctattctgttgtctttgatgtgtccaagaaaattcgtgtagtttacgtaaaaatatctgactcacaagaaagccaactgtatgtcttgtgatgggacagttcataatgtagttgctagaccactttacaaattgttcttgtcaccagatgtgttcagacattgctgtgcaattgttggggagggtagggggaaaggcgagaggagatacttattggtctttttgtttaataccttccccaagaggggacagtctggccaacttgctccagtaatgcaataaagacattgcaataaagtaaaaaaaaaa

SEQ ID NO: 456396 - DNA, 5066 bp, Homo sapiens
accattctgattgaggctgggggagagcgcggatggctgattggggagccgaagcctagagagcggtggggagacgtgaaagtcgagatggagagcagctttttgaacatgttctcaggcacttgacagaatcccgcgcgatgtacaatacggtgtggagtatggaccgcgatgacgcagactggagggaggtgatgatgccctattcgacagaactgatattttatattgaaatggatcctccagctcttccaccaaagccacctaagccaatgacttcagcagttccaaatggaatgaaggacagttctgtttctcttcaggatgcagaatggtactggggggatatttcaagggaggaggtaaatgacaaattgcgggatatgccagatgggaccttcttggtccgagatgcctcaacaaaaatgcagggagattatactttgactttgcggaagggaggcaataataagttaataaagatctatcaccgggatggtaaatatggcttttctgatcctctgacatttaattccgtggtggagctcattaaccactatcaccatgaatctcttgctcagtacaatcccaaacttgatgtgaagctgatgtacccagtgtccagataccaacaggatcagttggtaaaagaagataatattgatgcagtaggtaaaaaactgcaagaataccactctcagtatcaggagaagagtaaagagtatgataggctgtatgaagaatatactagaacatcccaggaaatacagatgaagaggactgcaatagaagcttttaatgaaacaattaaaatatttgaagagcagtgtcacacacaagaacaacatagcaaagaatatattgagcgatttcgcagagaggggaatgaaaaggagattgaacgaattatgatgaattatgataaattgaaatcacgtctgggtgagattcatgatagcaaaatgcgtctagagcaggatttgaagaaacaagctttggacaaccgagaaatagataaaaaaatgaatagtatcaaacctgacctgatccagctgcgaaagatccgagatcaacaccttgtatggctcaatcacaaaggagtgagacagaaacgcctgaatgtctggctgggaattaagaatgaggatgctgatgagaactattttatcaatgaggaagatgaaaacctgccccattatgatgagaaaacctggtttgttgaggatatcaatcgagtacaagcagaggacttgctttatgggaaacctgatggtgcattcttaattcgtgagagtagcaagaaaggatgctatgcttgctctgtggtggccgatggggaagtgaagcactgtgtgatctacagcactgctcggggctatggctttgcagagccctacaacctgtacagctctctgaaggagctagtgctccattaccagcagacatccttggttcagcacaacgactccctcaacgtcaggcttgcctaccctgttcatgcacagatgccctcgctttgcagataaagaggaagtgggaagagaggtggttctctggcatttttttctacagtttttattagactacgatgagggcattctttctacatagactgcttgttttgcacaagaagtgattttgtgaatgtgaagtggagaggccgagcagcagccggccgggatgggggcattagaggcctgaggttctctaggactcagccatgccgctgcactgacatactaagctggaagcagatgttttttttgaaagtctgtttcattggggtttttgttttgtttagccagacaccctcaacagaatattaggcttgatggttatagcgggtggggttgtatttggaagcctctgaagagaccatgtctttttaaaatctaactcttgagagtgcagcaggggcatggctctgctgggagttgtgttttgctttggcagtctctcttccccccacgaagaaggctgtttaggttttgtgatagaatgggatttgatgaaaaagacaaccaaaggaaaatggggaggcttgggatttcatttaaataatctaagccaagatgataaaaaaaaccttcaactgaaggtactttgtttcttaccaacataatttaggcttcagcatctcaccagcccctccctctgaagaagtattatgttcagaagccaacaaaacagtttgttgccagaccaatgtttgatgggaaaacgtggcactcatagttgaatgtatacttctgtaccaaaacttgaacataaaagactagaatttgtgagttttagcaaacgctaaaattgatcactgtaactaaccccttctgtccttcctgcctgtttctctgagatgaggaatagcattctttttgtggggatggtgagctttgaatcataaaatgaagttggtgcttgtatggtgtttccttagcctaaagaatgatctgttgtttgaaacctttgtaacttgtttgtatgagtaaagaaaaggtgcaatgcagtgcttttagatggcttgatataccaaataacaatatagaacaacattattatatgtgcttccccaagtttaaaggccctgcagaaatagtaaacatggtttaatttcccttcatttccccctcctttgctggatggggttttgggagctataggttgctaaggaggggagtcagattgtggtcaggtgcctcagtaaatcacagacccaggggccctgtggtccagggtgagagtcacaccacattacacatgtgcttccatacagtggtttctgaagcttttgcagggagagaagatggcttagtgtttagactgttagtagaagccatctggaagcttttctctttgcctttttttgtgatcctgccattaaggctatgtgcagtctgccctcctgctccagtggccttgattttaggccaggaatcttctgctccatgtggcttaagccttccagctgagtgaagctaggcaaatggagtgggggcaggcatctattcctgcccccatcatgccccacacccatcagtcaacactcatttgacaaatagagtccagctgcctctgagccaatcctgggaccataataggctcagagtgagtcagctgtttgaacccaaagctgtgcagtcaggcaccctggctgagctagagaagccagtacctgcatcttggtttataaggcttacagctaggaaagctctagttctgggggtgaaagaaaaatattagtttacctgagcacttatttccatgacagggtctaaaatatggaccatgatgtagacacagatttttaattttggaaaaacctccagttactagtgacgaggatagaaagggaagtgcttctctttggctttttcttggttacactgcagtttcaggattgggtgagacagagacaaatgaacccccctctaaagtcatttaactaatagccagcacatcccttccccaaactgtcaattgaaatcttaactgaaagttttactgaataataccaagctaattgctgttgggcacacctggatggctttgcacctggtgttgaacctgctgaagcaggtggatgctcaagattacgtgcaaggaatccctcccatctggtactaaaatttcagtgtgttctgagtgtcttttaaaccaaaatggaaatacagatacagggctgtagtattcagtaatgtgtctgctccttgttgggcagacaccagcggtgtgcagggagagaccaagtaccatctttatctacacttgggctggcttgtggagaagggctgctttttttcagtcctacattccttcattttttttttcattcttgaattcattgttttgtgggatctaagacccaggggtcatttgagaggtttgacagtatcttttctgaccagttgccacatgacttgcttgaccctgagcctgtggaaatggcatagggaccagtctactacccactgggcctggtgtgtagagggggagagggtagcaaggtgcttctctacgcccatgacttgggagcaggtcttggcctccttcatgagagtctagtgccatgtcctgtcccatgatctggaccctgggactgtcttggcatcttaactgcagtttcaatgaggcagagggcaaagagagaccaagatcagaggggttcattatacccctggctagagaacccagctactgacatgcaagcagcttggggctggctggacacaggtactaggcccattgtttccaggtgaagctttcatcacagaacagtgttgtctccacctggccttagatggcacgccatgattcgggcctggatagactgcctgcgtccttaccactgatctggccaagaatgaggccctcccaacactttcactccctctccaagccttgatgggacctccacttatttaggcctcatgtgctttgaagaagctttgagagccaatgtgtcttccacgggtctcttttttgctacaagtaatcagccccatgtgttctcttaaactgagaattgcacctgggcaattcctgttttctaaggtggtctctgctgctatttaacaacccagagtaggcctctgtgaggcttcagtggcctcagaaaccagagggtccagatagggggcctgcttgggccctctgctgccaactgctcaaacctgctttagctccagccacttgtggcaaacaacctcgtttccttacaaattccagcatgtgactttggtgccgttacttgtgaaaaatctattctgttgtctttgatgtgtccaagaaaattcgtgtagtttacgtaaaaatatctgactcacaagaaagccaactgtatgtcttgtgatgggacagttcataatgtagttgctagaccactttacaaattgttcttgtcaccagatgtgttcagacattgctgtgcaattgttggggagggtagggggaaaggcgagaggagatacttattggtctttttgtttaataccttccccaagaggggacagtctggccaacttgctccagtaatgcaataaagacattgcaataaagtaaaaaaaaaa

SEQ ID NO: 456397 - DNA, 1888 bp, Homo sapiens
gcccatgttgactggacatgggacaactaccatttcagttccgaaacttcctctttgaggagactcaaggtcacctgaggatattgggtactacgcttctggtatgccatgagtcgtaattacccaacgagtgtgagatagaactaaaacacttttttcaccttcagattctgattatcataatcatggtctctaactctgtccttgtgtaaaaaactgagatcccctatgtcctcagagttgttctagagttgggtactacgctttggcatgccaaagcgtagtacccaaactgtcaattgaaatcttaactgaaagttttactgaataataccaagctaattgctgttgggcacacctggatggctttgcacctggtgttgaacctgctgaagcaggtggatgctcaagattacgtgcaaggaatccctcccatctggtactaaaatttcagtgtgttctgagtgtcttttaaaccaaaatggaaatacagatacagggctgtagtattcagtaatgtgtctgctccttgttgggcagacaccagcggtgtgcagggagagaccaagtaccatctttatctacacttgggctggcttgtggagaagggctgctttttttcagtcctacattccttcattttttttttcattcttgaattcattgttttgtgggatctaagacccaggggtcatttgagaggtttgacagtatcttttctgaccagttgccacatgacttgcttgaccctgagcctgtggaaatggcatagggaccagtctactacccactgggcctggtgtgtagagggggagagggtagcaaggtgcttctctacgcccatgacttgggagcaggtcttggcctccttcatgagagtctagtgccatgtcctgtcccatgatctggaccctgggactgtcttggcatcttaactgcagtttcaatgaggcagagggcaaagagagaccaagatcagaggggttcattatacccctggctagagaacccagctactgacatgcaagcagcttggggctggctggacacaggtactaggcccattgtttccaggtgaagctttcatcacagaacagtgttgtctccacctggccttagatggcacgccatgattcgggcctggatagactgcctgcgtccttaccactgatctggccaagaatgaggccctcccaacactttcactccctctccaagccttgatgggacctccacttatttaggcctcatgtgctttgaagaagctttgagagccaatgtgtcttccacgggtctcttttttgctacaagtaatcagccccatgtgttctcttaaactgagaattgcacctgggcaattcctgttttctaaggtggtctctgctgctatttaacaacccagagtaggcctctgtgaggcttcagtggcctcagaaaccagagggtccagatagggggcctgcttgggccctctgctgccaactgctcaaacctgctttagctccagccacttgtggcaaacaacctcgtttccttacaaattccagcatgtgactttggtgccgttacttgtgaaaaatctattctgttgtctttgatgtgtccaagaaaattcgtgtagtttacgtaaaaatatctgactcacaagaaagccaactgtatgtcttgtgatgggacagttcataatgtagttgctagaccactttacaaattgttcttgtcaccagatgtgttcagacattgctgtgcaattgttggggagggtagggggaaaggcgagaggagatacttattggtctttttgtttaataccttccccaagaggggacagtctggccaacttgctccagtaatgcaataaagacattgcaataaagtaaaaaaaaaa

SEQ ID NO: 456398 - DNA, 4956 bp, Homo sapiens
accattctgattgaggctgggggagagcgcggatggctgattggggagccgaagcctagagagcggtggggagacgtgaaagtcgagatggagagcagctttttgaacatgttctcaggcacttgacagaatcccgctcttccaccaaagccacctaagccaatgacttcagcagttccaaatggaatgaaggacagttctgtttctcttcaggatgcagaatggtactggggggatatttcaagggaggaggtaaatgacaaattgcgggatatgccagatgggaccttcttggtccgagatgcctcaacaaaaatgcagggagattatactttgactttgcggaagggaggcaataataagttaataaagatctatcaccgggatggtaaatatggcttttctgatcctctgacatttaattccgtggtggagctcattaaccactatcaccatgaatctcttgctcagtacaatcccaaacttgatgtgaagctgatgtacccagtgtccagataccaacaggatcagttggtaaaagaagataatattgatgcagtaggtaaaaaactgcaagaataccactctcagtatcaggagaagagtaaagagtatgataggctgtatgaagaatatactagaacatcccaggaaatacagatgaagaggactgcaatagaagcttttaatgaaacaattaaaatatttgaagagcagtgtcacacacaagaacaacatagcaaagaatatattgagcgatttcgcagagaggggaatgaaaaggagattgaacgaattatgatgaattatgataaattgaaatcacgtctgggtgagattcatgatagcaaaatgcgtctagagcaggatttgaagaaacaagctttggacaaccgagaaatagataaaaaaatgaatagtatcaaacctgacctgatccagctgcgaaagatccgagatcaacaccttgtatggctcaatcacaaaggagtgagacagaaacgcctgaatgtctggctgggaattaagaatgaggatgctgatgagaactattttatcaatgaggaagatgaaaacctgccccattatgatgagaaaacctggtttgttgaggatatcaatcgagtacaagcagaggacttgctttatgggaaacctgatggtgcattcttaattcgtgagagtagcaagaaaggatgctatgcttgctctgtggtggccgatggggaagtgaagcactgtgtgatctacagcactgctcggggctatggctttgcagagccctacaacctgtacagctctctgaaggagctagtgctccattaccagcagacatccttggttcagcacaacgactccctcaacgtcaggcttgcctaccctgttcatgcacagatgccctcgctttgcagataaagaggaagtgggaagagaggtggttctctggcatttttttctacagtttttattagactacgatgagggcattctttctacatagactgcttgttttgcacaagaagtgattttgtgaatgtgaagtggagaggccgagcagcagccggccgggatgggggcattagaggcctgaggttctctaggactcagccatgccgctgcactgacatactaagctggaagcagatgttttttttgaaagtctgtttcattggggtttttgttttgtttagccagacaccctcaacagaatattaggcttgatggttatagcgggtggggttgtatttggaagcctctgaagagaccatgtctttttaaaatctaactcttgagagtgcagcaggggcatggctctgctgggagttgtgttttgctttggcagtctctcttccccccacgaagaaggctgtttaggttttgtgatagaatgggatttgatgaaaaagacaaccaaaggaaaatggggaggcttgggatttcatttaaataatctaagccaagatgataaaaaaaaccttcaactgaaggtactttgtttcttaccaacataatttaggcttcagcatctcaccagcccctccctctgaagaagtattatgttcagaagccaacaaaacagtttgttgccagaccaatgtttgatgggaaaacgtggcactcatagttgaatgtatacttctgtaccaaaacttgaacataaaagactagaatttgtgagttttagcaaacgctaaaattgatcactgtaactaaccccttctgtccttcctgcctgtttctctgagatgaggaatagcattctttttgtggggatggtgagctttgaatcataaaatgaagttggtgcttgtatggtgtttccttagcctaaagaatgatctgttgtttgaaacctttgtaacttgtttgtatgagtaaagaaaaggtgcaatgcagtgcttttagatggcttgatataccaaataacaatatagaacaacattattatatgtgcttccccaagtttaaaggccctgcagaaatagtaaacatggtttaatttcccttcatttccccctcctttgctggatggggttttgggagctataggttgctaaggaggggagtcagattgtggtcaggtgcctcagtaaatcacagacccaggggccctgtggtccagggtgagagtcacaccacattacacatgtgcttccatacagtggtttctgaagcttttgcagggagagaagatggcttagtgtttagactgttagtagaagccatctggaagcttttctctttgcctttttttgtgatcctgccattaaggctatgtgcagtctgccctcctgctccagtggccttgattttaggccaggaatcttctgctccatgtggcttaagccttccagctgagtgaagctaggcaaatggagtgggggcaggcatctattcctgcccccatcatgccccacacccatcagtcaacactcatttgacaaatagagtccagctgcctctgagccaatcctgggaccataataggctcagagtgagtcagctgtttgaacccaaagctgtgcagtcaggcaccctggctgagctagagaagccagtacctgcatcttggtttataaggcttacagctaggaaagctctagttctgggggtgaaagaaaaatattagtttacctgagcacttatttccatgacagggtctaaaatatggaccatgatgtagacacagatttttaattttggaaaaacctccagttactagtgacgaggatagaaagggaagtgcttctctttggctttttcttggttacactgcagtttcaggattgggtgagacagagacaaatgaacccccctctaaagtcatttaactaatagccagcacatcccttccccaaactgtcaattgaaatcttaactgaaagttttactgaataataccaagctaattgctgttgggcacacctggatggctttgcacctggtgttgaacctgctgaagcaggtggatgctcaagattacgtgcaaggaatccctcccatctggtactaaaatttcagtgtgttctgagtgtcttttaaaccaaaatggaaatacagatacagggctgtagtattcagtaatgtgtctgctccttgttgggcagacaccagcggtgtgcagggagagaccaagtaccatctttatctacacttgggctggcttgtggagaagggctgctttttttcagtcctacattccttcattttttttttcattcttgaattcattgttttgtgggatctaagacccaggggtcatttgagaggtttgacagtatcttttctgaccagttgccacatgacttgcttgaccctgagcctgtggaaatggcatagggaccagtctactacccactgggcctggtgtgtagagggggagagggtagcaaggtgcttctctacgcccatgacttgggagcaggtcttggcctccttcatgagagtctagtgccatgtcctgtcccatgatctggaccctgggactgtcttggcatcttaactgcagtttcaatgaggcagagggcaaagagagaccaagatcagaggggttcattatacccctggctagagaacccagctactgacatgcaagcagcttggggctggctggacacaggtactaggcccattgtttccaggtgaagctttcatcacagaacagtgttgtctccacctggccttagatggcacgccatgattcgggcctggatagactgcctgcgtccttaccactgatctggccaagaatgaggccctcccaacactttcactccctctccaagccttgatgggacctccacttatttaggcctcatgtgctttgaagaagctttgagagccaatgtgtcttccacgggtctcttttttgctacaagtaatcagccccatgtgttctcttaaactgagaattgcacctgggcaattcctgttttctaaggtggtctctgctgctatttaacaacccagagtaggcctctgtgaggcttcagtggcctcagaaaccagagggtccagatagggggcctgcttgggccctctgctgccaactgctcaaacctgctttagctccagccacttgtggcaaacaacctcgtttccttacaaattccagcatgtgactttggtgccgttacttgtgaaaaatctattctgttgtctttgatgtgtccaagaaaattcgtgtagtttacgtaaaaatatctgactcacaagaaagccaactgtatgtcttgtgatgggacagttcataatgtagttgctagaccactttacaaattgttcttgtcaccagatgtgttcagacattgctgtgcaattgttggggagggtagggggaaaggcgagaggagatacttattggtctttttgtttaataccttccccaagaggggacagtctggccaacttgctccagtaatgcaataaagacattgcaataaagtaaaaaaaaaa

SEQ ID NO: 456399 - DNA, 3020 bp, Homo sapiens
actttcctgccccttccccggccaagcccaactccggatctcgctctccaccggatctcacccgccacacccggacaggcggctggaggaggcgggcgtctaaaattctgggaagcagaacctggccggagccactagacagagccgggcctagcccagagacatggagagttgctacaacccaggtctggatggtattattgaatatgatgatttcaaattgaactcctccattgtggaacccaaggagccagccccagaaacagctgatggcccctacctggtgatcgtggaacagcctaagcagagaggcttccgatttcgatatggctgtgaaggcccctcccatggaggactgcccggtgcctccagtgagaagggccgaaagacctatcccactgtcaagatctgtaactacgagggaccagccaagatcgaggtggacctggtaacacacagtgacccacctcgtgctcatgcccacagtctggtgggcaagcaatgctcggagctggggatctgcgccgtttctgtggggcccaaggacatgactgcccaatttaacaacctgggtgtcctgcatgtgactaagaagaacatgatggggactatgatacaaaaacttcagaggcagcggctccgctctaggccccagggccttacggaggccgagcagcgggagctggagcaagaggccaaagaactgaagaaggtgatggatctgagtatagtgcggctgcgcttctctgccttccttagagccagtgatggctccttctccctgcccctgaagccagtcatctcccagcccatccatgacagcaaatctccgggggcatcaaacctgaagatttctcgaatggacaagacagcaggctctgtgcggggtggagatgaagtttatctgctttgtgacaaggtgcagaaagatgacattgaggttcggttctatgaggatgatgagaatggatggcaggcctttggggacttctctcccacagatgtgcataaacagtatgccattgtgttccggacacccccctatcacaagatgaagattgagcggcctgtaacagtgtttctgcaactgaaacgcaagcgaggaggggacgtgtctgattccaaacagttcacctattaccctctggtggaagacaaggaagaggtgcagcggaagcggaggaaggccttgcccaccttctcccagcccttcgggggtggctcccacatgggtggaggctctgggggtgcagccgggggctacggaggagctggaggaggtggcagcctcggtttcttcccctcctccctggcctacagcccctaccagtccggcgcgggccccatgggctgctacccgggaggcgggggcggggcgcagatggccgccacggtgcccagcagggactccggggaggaagccgcggagccgagcgccccctccaggaccccccagtgcgagccgcaggccccggagatgctgcagcgagctcgagagtacaacgcgcgcctgttcggcctggcgcagcgcagcgcccgagccctactcgactacggcgtcaccgcggacgcgcgcgcgctgctggcgggacagcgccacctgctgacggcgcaggacgagaacggagacacaccactgcacctagccatcatccacgggcagaccagtgtcattgagcagatagtctatgtcatccaccacgcccaggacctcggcgttgtcaacctcaccaaccacctgcaccagacgcccctgcacctggcggtgatcacggggcagacgagtgtggtgagctttctgctgcgggtaggtgcagacccagctctgctggatcggcatggagactcagccatgcatctggcgctgcgggcaggcgctggtgctcctgagctgctgcgtgcactgcttcagagtggagctcctgctgtgccccagctgttgcatatgcctgactttgagggactgtatccagtacacctggcggtccgagcccgaagccctgagtgcctggatctgctggtggacagtggggctgaagtggaggccacagagcggcaggggggacgaacagccttgcatctagccacagagatggaggagctggggttggtcacccatctggtcaccaagctccgggccaacgtgaacgctcgcacctttgcgggaaacacacccctgcacctggcagctggactggggtacccgaccctcacccgcctccttctgaaggctggtgctgacatccatgctgaaaacgaggagcccctgtgcccactgccttcaccccctacctctgatagcgactcggactctgaagggcctgagaaggacacccgaagcagcttccggggccacacgcctcttgacctcacttgcagcaccaaggtgaagaccttgctgctaaatgctgctcagaacaccatggagccacccctgaccccgcccagcccagcagggccgggactgtcacttggtgatacagctctgcagaacctggagcagctgctagacgggccagaagcccagggcagctgggcagagctggcagagcgtctggggctgcgcagcctggtagacacgtaccgacagacaacctcacccagtggcagcctcctgcgcagctacgagctggctggcggggacctggcaggtctactggaggccctgtctgacatgggcctagaggagggagtgaggctgctgaggggtccagaaacccgagacaagctgcccagcacagaggtgaaggaagacagtgcgtacgggagccagtcagtggagcaggaggcagagaagctgggcccaccccctgagccaccaggagggctctgccacgggcacccccagcctcaggtgcactgacctgctgcctgcccccagcccccttcccggaccccctgtacagcgtccccacctatttcaaatcttatttaacaccccacacccacccctcagttgggacaaataaaggattctcatgggaaggggaggacccctccttcccaacttaaaaaaaccc

SEQ ID NO: 456400 - DNA, 1637 bp, Homo sapiens
actttcctgccccttccccggccaagcccaactccggatctcgctctccaccggatctcacccgccacacccggacaggcggctggaggaggcgggcgtctaaaattctgggaagcagaacctggccggagccactagacagagccgggcctagcccagagacatggagagttgctacaacccaggtctggatggtattattgaatatgatgatttcaaattgaactcctccattgtggaacccaaggagccagccccagaaacagctgatggcccctacctggtgatcgtggaacagcctaagcagagaggcttccgatttcgatatggctgtgaaggcccctcccatggaggactgcccggtgcctccagtgagaagggccgaaagacctatcccactgtcaagatctgtaactacgagggaccagccaagatcgaggtggacctggtaacacacagtgacccacctcgtgctcatgcccacagtctggtgggcaagcaatgctcggagctggggatctgcgccgtttctgtggggcccaaggacatgactgcccaatttaacaacctgggtgtcctgcatgtgactaagaagaacatgatggggactatgatacaaaaacttcagaggcagcggctccgctctaggccccagggccttacggaggccgagcagcgggagctggagcaagaggccaaagaactgaagaaggtgatggatctgagtatagtgcggctgcgcttctctgccttccttagagccagtgatggctccttctccctgcccctgaagccagtcatctcccagcccatccatgacagcaaatctccgggggcatcaaacctgaagatttctcgaatggacaagacagcaggctctgtgcggggtggagatgaagtttatctgctttgtgacaaggtgcagaaagatgacattgaggttcggttctatgaggatgatgagaatggatggcaggcctttggggacttctctcccacagatgtgcataaacagtatgccattgtgttccggacacccccctatcacaagatgaagattgagcggcctgtaacagtgtttctgcaactgaaacgcaagcgaggaggggacgtgtctgattccaaacagttcacctattaccctctggtggaagacaaggaagaggtgcagcggaagcggaggaaggccttgcccaccttctcccagcccttcgggggtggctcccacatgggtggaggctctgggggtgcagccgggggctacggaggagctggaggaggtgagggggtactgatggagggaggggtaaaggtaagagaagctgtggaggaaaaaaatctgggggaggccgggcgtggtggctcacgcctgtaatccagccctttgggaggccaaggcaggcagattacctgagatcaggagttcaagaccagcttggccaacagcgtgaaacctcgtctctactaaaaatacaaacattagctgggcatggtggcaggcgcctgtaatcccagctactcgggaggctgaggcaggagaatcgcttgaaccctgggagacaagaggttgcagtaagctgagatcacaccactgcactccaggctgggcaataagagcgaaactccgtctcaaaaaa

SEQ ID NO: 456401 - DNA, 3140 bp, Homo sapiens
  misc_feature (4)..(4): n is a, c, g, or t
ggcncggagagaagccgcaaccagagccgccgccacggtgagtggctggattcagacccctgggtggccgggacaagagaaaagagggaggagggcctttagcggacagcgcctggggctggagagcagcagctgcacacagccggaaagggcgcgcaggcgacgacactcggatccacgtcgacaccgttgtacaaagatacgcggacccgcgggcgtctaaaattctgggaagcagaacctggccggagccactagacagagccgggcctagcccagagacatggagagttgctacaacccaggtctggatggtattattgaatatgatgatttcaaattgaactcctccattgtggaacccaaggagccagccccagaaacagctgatggcccctacctggtgatcgtggaacagcctaagcagagaggcttccgatttcgatatggctgtgaaggcccctcccatggaggactgcccggtgcctccagtgagaagggccgaaagacctatcccactgtcaagatctgtaactacgagggaccagccaagatcgaggtggacctggtaacacacagtgacccacctcgtgctcatgcccacagtctggtgggcaagcaatgctcggagctggggatctgcgccgtttctgtggggcccaaggacatgactgcccaatttaacaacctgggtgtcctgcatgtgactaagaagaacatgatggggactatgatacaaaaacttcagaggcagcggctccgctctaggccccagggccttacggaggccgagcagcgggagctggagcaagaggccaaagaactgaagaaggtgatggatctgagtatagtgcggctgcgcttctctgccttccttagagccagtgatggctccttctccctgcccctgaagccagtcatctcccagcccatccatgacagcaaatctccgggggcatcaaacctgaagatttctcgaatggacaagacagcaggctctgtgcggggtggagatgaagtttatctgctttgtgacaaggtgcagaaagatgacattgaggttcggttctatgaggatgatgagaatggatggcaggcctttggggacttctctcccacagatgtgcataaacagtatgccattgtgttccggacacccccctatcacaagatgaagattgagcggcctgtaacagtgtttctgcaactgaaacgcaagcgaggaggggacgtgtctgattccaaacagttcacctattaccctctggtggaagacaaggaagaggtgcagcggaagcggaggaaggccttgcccaccttctcccagcccttcgggggtggctcccacatgggtggaggctctgggggtgcagccgggggctacggaggagctggaggaggtggcagcctcggtttcttcccctcctccctggcctacagcccctaccagtccggcgcgggccccatgggctgctacccgggaggcgggggcggggcgcagatggccgccacggtgcccagcagggactccggggaggaagccgcggagccgagcgccccctccaggaccccccagtgcgagccgcaggccccggagatgctgcagcgagctcgagagtacaacgcgcgcctgttcggcctggcgcagcgcagcgcccgagccctactcgactacggcgtcaccgcggacgcgcgcgcgctgctggcgggacagcgccacctgctgacggcgcaggacgagaacggagacacaccactgcacctagccatcatccacgggcagaccagtgtcattgagcagatagtctatgtcatccaccacgcccaggacctcggcgttgtcaacctcaccaaccacctgcaccagacgcccctgcacctggcggtgatcacggggcagacgagtgtggtgagctttctgctgcgggtaggtgcagacccagctctgctggatcggcatggagactcagccatgcatctggcgctgcgggcaggcgctggtgctcctgagctgctgcgtgcactgcttcagagtggagctcctgctgtgccccagctgttgcatatgcctgactttgagggactgtatccagtacacctggcggtccgagcccgaagccctgagtgcctggatctgctggtggacagtggggctgaagtggaggccacagagcggcaggggggacgaacagccttgcatctagccacagagatggaggagctggggttggtcacccatctggtcaccaagctccgggccaacgtgaacgctcgcacctttgcgggaaacacacccctgcacctggcagctggactggggtacccgaccctcacccgcctccttctgaaggctggtgctgacatccatgctgaaaacgaggagcccctgtgcccactgccttcaccccctacctctgatagcgactcggactctgaagggcctgagaaggacacccgaagcagcttccggggccacacgcctcttgacctcacttgcagcaccaaggtgaagaccttgctgctaaatgctgctcagaacaccatggagccacccctgaccccgcccagcccagcagggccgggactgtcacttggtgatacagctctgcagaacctggagcagctgctagacgggccagaagcccagggcagctgggcagagctggcagagcgtctggggctgcgcagcctggtagacacgtaccgacagacaacctcacccagtggcagcctcctgcgcagctacgagctggctggcggggacctggcaggtctactggaggccctgtctgacatgggcctagaggagggagtgaggctgctgaggggtccagaaacccgagacaagctgcccagcacagaggtgaaggaagacagtgcgtacgggagccagtcagtggagcaggaggcagagaagctgggcccaccccctgagccaccaggagggctctgccacgggcacccccagcctcaggtgcactgacctgctgcctgcccccagcccccttcccggaccccctgtacagcgtccccacctatttcaaatcttatttaacaccccacacccacccctcagttgggacaaataaaggattctcatgggaaggggaggacccctccttcccaacttaaaaaaaccc

SEQ ID NO: 456402 - DNA, 2874 bp, Homo sapiens
  misc_feature (4)..(4): n is a, c, g, or t
ggcncggagagaagccgcaaccagagccgccgccacggcgggcgtctaaaattctgggaagcagaacctggccggagccactagacagagccgggcctagcccagagacatggagagttgctacaacccaggtctggatggtattattgaatatgatgatttcaaattgaactcctccattgtggaacccaaggagccagccccagaaacagctgatggcccctacctggtgatcgtggaacagcctaagcagagaggcttccgatttcgatatggctgtgaaggcccctcccatggaggactgcccggtgcctccagtgagaagggccgaaagacctatcccactgtcaagatctgtaactacgagggaccagccaagatcgaggtggacctggtaacacacagtgacccacctcgtgctcatgcccacagtctggtgggcaagcaatgctcggagctggggatctgcgccgtttctgtggggcccaaggacatgactgcccaatttaacaacctgggtgtcctgcatgtgactaagaagaacatgatggggactatgatacaaaaacttcagaggcagcggctccgctctaggccccagggccttacggaggccgagcagcgggagctggagcaagaggccaaagaactgaagaaggtgatggatctgagtatagtgcggctgcgcttctctgccttccttagagccagtgatggctccttctccctgcccctgaagccagtcatctcccagcccatccatgacagcaaatctccgggggcatcaaacctgaagatttctcgaatggacaagacagcaggctctgtgcggggtggagatgaagtttatctgctttgtgacaaggtgcagaaagatgacattgaggttcggttctatgaggatgatgagaatggatggcaggcctttggggacttctctcccacagatgtgcataaacagtatgccattgtgttccggacacccccctatcacaagatgaagattgagcggcctgtaacagtgtttctgcaactgaaacgcaagcgaggaggggacgtgtctgattccaaacagttcacctattaccctctggtggaagacaaggaagaggtgcagcggaagcggaggaaggccttgcccaccttctcccagcccttcgggggtggctcccacatgggtggaggctctgggggtgcagccgggggctacggaggagctggaggaggtggcagcctcggtttcttcccctcctccctggcctacagcccctaccagtccggcgcgggccccatgggctgctacccgggaggcgggggcggggcgcagatggccgccacggtgcccagcagggactccggggaggaagccgcggagccgagcgccccctccaggaccccccagtgcgagccgcaggccccggagatgctgcagcgagctcgagagtacaacgcgcgcctgttcggcctggcgcagcgcagcgcccgagccctactcgactacggcgtcaccgcggacgcgcgcgcgctgctggcgggacagcgccacctgctgacggcgcaggacgagaacggagacacaccactgcacctagccatcatccacgggcagaccagtgtcattgagcagatagtctatgtcatccaccacgcccaggacctcggcgttgtcaacctcaccaaccacctgcaccagacgcccctgcacctggcggtgatcacggggcagacgagtgtggtgagctttctgctgcgggtaggtgcagacccagctctgctggatcggcatggagactcagccatgcatctggcgctgcgggcaggcgctggtgctcctgagctgctgcgtgcactgcttcagagtggagctcctgctgtgccccagctgttgcatatgcctgactttgagggactgtatccagtacacctggcggtccgagcccgaagccctgagtgcctggatctgctggtggacagtggggctgaagtggaggccacagagcggcaggggggacgaacagccttgcatctagccacagagatggaggagctggggttggtcacccatctggtcaccaagctccgggccaacgtgaacgctcgcaccttttcagcctcctgagtagctgggaccacaggcaagcgccaccacgccagctgattttttaatttcgtgtacagatggggtctcaccgtgtagcccagtctggtctcgaactcctaggctcaagtgatcctcctgcctcggcctcccaaagtgctggattacaagcgtgctgcgccaccgcgcccagcccagtatggcttttgtgtgtggctttcttcactcaatattctatatgtaagattcatccatcatgtaatttatttttcttttattgctgagtattattacattggatattacaactttttctagtcttaatggacatttatattttcaactttgcctgttataaataatgctgctatgaatattcttctgcatgtcttttgaaggaactgtgcactaatttttccagggaatattcttaggagtaggattgctatcatagggcaggtgaatatttaattttggcagatattgccaaacagattcccaaagtagtcctaatttacacacccaccagcagtgtgtgacagtccagtttcctacacattctcacaaacatttttaattttaaggcattgtggtgggtgtttagtgtaacttccttgtgtttgaatttgcatctccttgatgagtaagcaccttttcatatacgtattaagccatttgaaatatcctctttgaagaagttcccgtccatggtttttgcccatttgttatgggtttatctttttttctgttttctggttcattataattccaggtat

SEQ ID NO: 456403 - DNA, 3053 bp, Homo sapiens
  misc_feature (4)..(4): n is a, c, g, or t
ggcncggagagaagccgcaaccagagccgccgccacggcgggcgtctaaaattctgggaagcagaacctggccggagccactagacagagccgggcctagcccagagacatggagagttgctacaacccaggtctggatggtattattgaatatgatgatttcaaattgaactcctccattgtggaacccaaggagccagccccagaaacagctgatggcccctacctggtgatcgtggaacagcctaagcagagaggcttccgatttcgatatggctgtgaaggcccctcccatggaggactgcccggtgcctccagtgagaagggccgaaagacctatcccactgtcaagatctgtaactacgagggaccagccaagatcgaggtggacctggtaacacacagtgacccacctcgtgctcatgcccacagtctggtgggcaagcaatgctcggagctggggatctgcgccgtttctgtggggcccaaggacatgactgcccaatttaacaacctgggtgtcctgcatgtgactaagaagaacatgatggggactatgatacaaaaacttcagaggcagcggctccgctctaggccccagggccttacggaggccgagcagcgggagctggagcaagaggccaaagaactgaagaaggtgatggatctgagtatagtgcggctgcgcttctctgccttccttagagccagtgatggctccttctccctgcccctgaagccagtcatctcccagcccatccatgacagcaaatctccgggggcatcaaacctgaagatttctcgaatggacaagacagcaggctctgtgcggggtggagatgaagtttatctgctttgtgacaaggtgcagaaagatgacattgaggttcggttctatgaggatgatgagaatggatggcaggcctttggggacttctctcccacagatgtgcataaacaggtacccagggctagggcccgggcccgggctgggggctaaattaggctaaggactcactgacaccctgtgtctccctgcaccccccagtatgccattgtgttccggacacccccctatcacaagatgaagattgagcggcctgtaacagtgtttctgcaactgaaacgcaagcgaggaggggacgtgtctgattccaaacagttcacctattaccctctggtggaagacaaggaagaggtgcagcggaagcggaggaaggccttgcccaccttctcccagcccttcgggggtggctcccacatgggtggaggctctgggggtgcagccgggggctacggaggagctggaggaggtggcagcctcggtttcttcccctcctccctggcctacagcccctaccagtccggcgcgggccccatgggctgctacccgggaggcgggggcggggcgcagatggccgccacggtgcccagcagggactccggggaggaagccgcggagccgagcgccccctccaggaccccccagtgcgagccgcaggccccggagatgctgcagcgagctcgagagtacaacgcgcgcctgttcggcctggcgcagcgcagcgcccgagccctactcgactacggcgtcaccgcggacgcgcgcgcgctgctggcgggacagcgccacctgctgacggcgcaggacgagaacggagacacaccactgcacctagccatcatccacgggcagaccagtgtcattgagcagatagtctatgtcatccaccacgcccaggacctcggcgttgtcaacctcaccaaccacctgcaccagacgcccctgcacctggcggtgatcacggggcagacgagtgtggtgagctttctgctgcgggtaggtgcagacccagctctgctggatcggcatggagactcagccatgcatctggcgctgcgggcaggcgctggtgctcctgagctgctgcgtgcactgcttcagagtggagctcctgctgtgccccagctgttgcatatgcctgactttgagggactgtatccagtacacctggcggtccgagcccgaagccctgagtgcctggatctgctggtggacagtggggctgaagtggaggccacagagcggcaggggggacgaacagccttgcatctagccacagagatggaggagctggggttggtcacccatctggtcaccaagctccgggccaacgtgaacgctcgcacctttgcgggaaacacacccctgcacctggcagctggactggggtacccgaccctcacccgcctccttctgaaggctggtgctgacatccatgctgaaaacgaggagcccctgtgcccactgccttcaccccctacctctgatagcgactcggactctgaagggcctgagaaggacacccgaagcagcttccggggccacacgcctcttgacctcacttgcagcaccaaggtgaagaccttgctgctaaatgctgctcagaacaccatggagccacccctgaccccgcccagcccagcagggccgggactgtcacttggtgatacagctctgcagaacctggagcagctgctagacgggccagaagcccagggcagctgggcagagctggcagagcgtctggggctgcgcagcctggtagacacgtaccgacagacaacctcacccagtggcagcctcctgcgcagctacgagctggctggcggggacctggcaggtctactggaggccctgtctgacatgggcctagaggagggagtgaggctgctgaggggtccagaaacccgagacaagctgcccagcacagaggtgaaggaagacagtgcgtacgggagccagtcagtggagcaggaggcagagaagctgggcccaccccctgagccaccaggagggctctgccacgggcacccccagcctcaggtgcactgacctgctgcctgcccccagcccccttcccggaccccctgtacagcgtccccacctatttcaaatcttatttaacaccccacacccacccctcagttgggacaaataaaggattctcatgggaaggggaggacccctccttcccaacttaaaaaaaccc

SEQ ID NO: 456404 - DNA, 1969 bp, Homo sapiens
  misc_feature (4)..(4): n is a, c, g, or t
ggcncggagagaagccgcaaccagagccgccgccacggcgggcgtctaaaattctgggaagcagaacctggccggagccactagacagagccgggcctagcccagagacatggagagttgctacaacccaggtctggatggtattattgaatatgatgatttcaaattgaactcctccattgtggaacccaaggagccagccccagaaacagctgatggcccctacctggtgatcgtggaacagcctaagcagagaggcttccgatttcgatatggctgtgaaggcccctcccatggaggactgcccggtgcctccagtgagaagggccgaaagacctatcccactgtcaagatctgtaactacgagggaccagccaagatcgaggtggacctggtaacacacagtgacccacctcgtgctcatgcccacagtctggtgggcaagcaatgctcggagctggggatctgcgccgtttctgtggggcccaaggacatgactgcccaatttaacaacctgggtgtcctgcatgtgactaagaagaacatgatggggactatgatacaaaaacttcagaggcagcggctccgctctaggccccagggccttacggaggccgagcagcgggagctggagcaagaggccaaagaactgaagaaggtgatggatctgagtatagtgcggctgcgcttctctgccttccttagagccagtgatggctccttctccctgcccctgaagccagtcatctcccagcccatccatgacagcaaatctccgggggcatcaaacctgaagatttctcgaatggacaagacagcaggctctgtgcggggtggagatgaagtttatctgctttgtgacaaggtgcagaaagatgacattgaggttcggttctatgaggatgatgagaatggatggcaggcctttggggacttctctcccacagatgtgcataaacagtatgccattgtgttccggacacccccctatcacaagatgaagattgagcggcctgtaacagtgtttctgcaactgaaacgcaagcgaggaggggacgtgtctgattccaaacagttcacctattaccctctggtggaagacaaggaagaggtgcagcggaagcggaggaaggccttgcccaccttctcccagcccttcgggggtggctcccacatgggtggaggctctgggggtgcagccgggggctacggaggagctggaggaggtggcagcctcggtttcttcccctcctccctggcctacagcccctaccagtccggcgcgggccccatgggctgctacccgggaggcgggggcggggcgcagatggccgccacggtgcccagcagggactccggggaggaagccgcggagccgagcgccccctccaggaccccccagtgcgagccgcaggccccggagatgctgcagcgagctcgagagtacaacgcgcgcctgttcggcctggcgcagcgcagcgcccgagccctactcgactacggcgtcaccgcggacgcgcgcgcgctgctggcgggacagcgccacctgctgacggcgcaggacgagaacggagacacctggctggcggggacctggcaggtctactggaggccctgtctgacatgggcctagaggagggagtgaggctgctgaggggtccagaaacccgagacaagctgcccagcacagaggtgaaggaagacagtgcgtacgggagccagtcagtggagcaggaggcagagaagctgggcccaccccctgagccaccaggagggctctgccacgggcacccccagcctcaggtgcactgacctgctgcctgcccccagcccccttcccggaccccctgtacagcgtccccacctatttcaaatcttatttaacaccccacacccacccctcagttgggacaaataaaggattctcatgggaaggggaggacccctccttcccaacttaaaaaaaccc

SEQ ID NO: 456405 - DNA, 1301 bp, Homo sapiens
  misc_feature (4)..(4): n is a, c, g, or t
ggcncggagagaagccgcaaccagagccgccgccacggcgggcgtctaaaattctgggaagcagaacctggccggagccactagacagagccgggcctagcccagagacatggagagttgctacaacccaggtctggatggtattattgaatatgatgatttcaaattgaactcctccattgtggaacccaaggagccagccccagaaacagctgatggcccctacctggtgatcgtggaacagcctaagcagagaggcttccgatttcgatatggctgtgaaggcccctcccatggaggactgcccggtgcctccagtgagaagggccgaaagacctatcccactgtcaagatctgtaactacgagggaccagccaagatcgaggtggacctggtaacacacagtgacccacctcgtgctcatgcccacagtctggtgggcaagcaatgctcggagctggggatctgcgccgtttctgtggggcccaaggacatgactgcccaatttaacaacctgggtgtcctgcatgtgactaagaagaacatgatggggactatgatacaaaaacttcagaggcagcggctccgctctaggccccagggccttacggaggccgagcagcgggagctggagcaagaggccaaagaactgaagaaggtgatggatctgagtatagtgcggctgcgcttctctgccttccttagagccagtgatggctccttctccctgcccctgaagccagtcatctcccagcccatccatgacagcaaatctccgggggcatcaaacctgaagatttctcgaatggacaagacagcaggctctgtgcggggtggagatgaagtttatctgctttgtgacaaggtgcagaaagatgacattgaggttcggttctatgaggatgatgagaatggatggcaggcctttggggacttctctcccacagatgtgcataaacagtatgccattgtgttccggacacccccctatcacaagatgaagattgagcggcctgtaacagtgtttctgcaactgaaacgcaagcgaggaggggacgtgtctgattccaaacagttcacctattaccctctggtggaagacaaggaagaggtgcagcggaagcggaggaaggccttgcccaccttctcccagcccttcgggggtggctcccggaccccctgtacagcgtccccacctatttcaaatcttatttaacaccccacacccacccctcagttgggacaaataaaggattctcatgggaaggggaggacccctccttcccaacttaaaaaaaccc

SEQ ID NO: 456406 - DNA, 2966 bp, Homo sapiens
  misc_feature (4)..(4): n is a, c, g, or t
ggcncggagagaagccgcaaccagagccgccgccacggcgggcgtctaaaattctgggaagcagaacctggccggagccactagacagagccgggcctagcccagagacatggagagttgctacaacccaggtctggatggtattattgaatatgatgatttcaaattgaactcctccattgtggaacccaaggagccagccccagaaacagctgatggcccctacctggtgatcgtggaacagcctaagcagagaggcttccgatttcgatatggctgtgaaggcccctcccatggaggactgcccggtgcctccagtgagaagggccgaaagacctatcccactgtcaagatctgtaactacgagggaccagccaagatcgaggtggacctggtaacacacagtgacccacctcgtgctcatgcccacagtctggtgggcaagcaatgctcggagctggggatctgcgccgtttctgtggggcccaaggacatgactgcccaatttaacaacctgggtgtcctgcatgtgactaagaagaacatgatggggactatgatacaaaaacttcagaggcagcggctccgctctaggccccagggccttacggaggccgagcagcgggagctggagcaagaggccaaagaactgaagaaggtgatggatctgagtatagtgcggctgcgcttctctgccttccttagagccagtgatggctccttctccctgcccctgaagccagtcatctcccagcccatccatgacagcaaatctccgggggcatcaaacctgaagatttctcgaatggacaagacagcaggctctgtgcggggtggagatgaagtttatctgctttgtgacaaggtgcagaaagatgacattgaggttcggttctatgaggatgatgagaatggatggcaggcctttggggacttctctcccacagatgtgcataaacagtatgccattgtgttccggacacccccctatcacaagatgaagattgagcggcctgtaacagtgtttctgcaactgaaacgcaagcgaggaggggacgtgtctgattccaaacagttcacctattaccctctggtggaagacaaggaagaggtgcagcggaagcggaggaaggccttgcccaccttctcccagcccttcgggggtggctcccacatgggtggaggctctgggggtgcagccgggggctacggaggagctggaggaggtggcagcctcggtttcttcccctcctccctggcctacagcccctaccagtccggcgcgggccccatgggctgctacccgggaggcgggggcggggcgcagatggccgccacggtgcccagcagggactccggggaggaagccgcggagccgagcgccccctccaggaccccccagtgcgagccgcaggccccggagatgctgcagcgagctcgagagtacaacgcgcgcctgttcggcctggcgcagcgcagcgcccgagccctactcgactacggcgtcaccgcggacgcgcgcgcgctgctggcgggacagcgccacctgctgacggcgcaggacgagaacggagacacaccactgcacctagccatcatccacgggcagaccagtgtcattgagcagatagtctatgtcatccaccacgcccaggacctcggcgttgtcaacctcaccaaccacctgcaccagacgcccctgcacctggcggtgatcacggggcagacgagtgtggtgagctttctgctgcgggtaggtgcagacccagctctgctggatcggcatggagactcagccatgcatctggcgctgcgggcaggcgctggtgctcctgagctgctgcgtgcactgcttcagagtggagctcctgctgtgccccagctgttgcatatgcctgactttgagggactgtatccagtacacctggcggtccgagcccgaagccctgagtgcctggatctgctggtggacagtggggctgaagtggaggccacagagcggcaggggggacgaacagccttgcatctagccacagagatggaggagctggggttggtcacccatctggtcaccaagctccgggccaacgtgaacgctcgcacctttgcgggaaacacacccctgcacctggcagctggactggggtacccgaccctcacccgcctccttctgaaggctggtgctgacatccatgctgaaaacgaggagcccctgtgcccactgccttcaccccctacctctgatagcgactcggactctgaagggcctgagaaggacacccgaagcagcttccggggccacacgcctcttgacctcacttgcagcaccaaggtgaagaccttgctgctaaatgctgctcagaacaccatggagccacccctgaccccgcccagcccagcagggccgggactgtcacttggtgatacagctctgcagaacctggagcagctgctagacgggccagaagcccagggcagctgggcagagctggcagagcgtctggggctgcgcagcctggtagacacgtaccgacagacaacctcacccagtggcagcctcctgcgcagctacgagctggctggcggggacctggcaggtctactggaggccctgtctgacatgggcctagaggagggagtgaggctgctgaggggtccagaaacccgagacaagctgcccagcacagaggtgaaggaagacagtgcgtacgggagccagtcagtggagcaggaggcagagaagctgggcccaccccctgagccaccaggagggctctgccacgggcacccccagcctcaggtgcactgacctgctgcctgcccccagcccccttcccggaccccctgtacagcgtccccacctatttcaaatcttatttaacaccccacacccacccctcagttgggacaaataaaggattctcatgggaaggggaggacccctccttcccaacttaaaaaaaccc

SEQ ID NO: 456407 - DNA, 385 bp, Homo sapiens
  misc_feature (44)..(44): n is a, c, g, or t
gtggtggatggaggtggatttaagattggtccccacatcgtccntgctgatattataaagcagatgcagaggggtccagaaacccgagacaagctgcccagcacagaggtgaaggaagacagtgcgtacgggagccagtcagtggagcaggaggcagagaagctgggcccaccccctgagccaccaggagggctctgccacgggcacccccagcctcaggtgcactgacctgctgcctgcccccagcccccttcccggaccccctgtacagcgtccccacctatttcaaatcttatttaacaccccacacccacccctcagttgggacaaataaaggattctcatgggaaggggaggacccctccttcccaacttaaaaaaaccc

SEQ ID NO: 456408 - DNA, 2677 bp, Homo sapiens
tattcatgacgggccgcggttcactcgtaataatggccctagaccttacaacactagatcaagatctgtaactacgagggaccagccaagatcgaggtggacctggtaacacacagtgacccacctcgtgctcatgcccacagtctggtgggcaagcaatgctcggagctggggatctgcgccgtttctgtggggcccaaggacatgactgcccaatttaacaacctgggtgtcctgcatgtgactaagaagaacatgatggggactatgatacaaaaacttcagaggcagcggctccgctctaggccccagggccttacggaggccgagcagcgggagctggagcaagaggccaaagaactgaagaaggtgatggatctgagtatagtgcggctgcgcttctctgccttccttagagccagtgatggctccttctccctgcccctgaagccagtcatctcccagcccatccatgacagcaaatctccgggggcatcaaacctgaagatttctcgaatggacaagacagcaggctctgtgcggggtggagatgaagtttatctgctttgtgacaaggtgcagaaagatgacattgaggttcggttctatgaggatgatgagaatggatggcaggcctttggggacttctctcccacagatgtgcataaacagtatgccattgtgttccggacacccccctatcacaagatgaagattgagcggcctgtaacagtgtttctgcaactgaaacgcaagcgaggaggggacgtgtctgattccaaacagttcacctattaccctctggtggaagacaaggaagaggtgcagcggaagcggaggaaggccttgcccaccttctcccagcccttcgggggtggctcccacatgggtggaggctctgggggtgcagccgggggctacggaggagctggaggaggtggcagcctcggtttcttcccctcctccctggcctacagcccctaccagtccggcgcgggccccatgggctgctacccgggaggcgggggcggggcgcagatggccgccacggtgcccagcagggactccggggaggaagccgcggagccgagcgccccctccaggaccccccagtgcgagccgcaggccccggagatgctgcagcgagctcgagagtacaacgcgcgcctgttcggcctggcgcagcgcagcgcccgagccctactcgactacggcgtcaccgcggacgcgcgcgcgctgctggcgggacagcgccacctgctgacggcgcaggacgagaacggagacacaccactgcacctagccatcatccacgggcagaccagtgtcattgagcagatagtctatgtcatccaccacgcccaggacctcggcgttgtcaacctcaccaaccacctgcaccagacgcccctgcacctggcggtgatcacggggcagacgagtgtggtgagctttctgctgcgggtaggtgcagacccagctctgctggatcggcatggagactcagccatgcatctggcgctgcgggcaggcgctggtgctcctgagctgctgcgtgcactgcttcagagtggagctcctgctgtgccccagctgttgcatatgcctgactttgagggactgtatccagtacacctggcggtccgagcccgaagccctgagtgcctggatctgctggtggacagtggggctgaagtggaggccacagagcggcaggggggacgaacagccttgcatctagccacagagatggaggagctggggttggtcacccatctggtcaccaagctccgggccaacgtgaacgctcgcacctttgcgggaaacacacccctgcacctggcagctggactggggtacccgaccctcacccgcctccttctgaaggctggtgctgacatccatgctgaaaacgaggagcccctgtgcccactgccttcaccccctacctctgatagcgactcggactctgaagggcctgagaaggacacccgaagcagcttccggggccacacgcctcttgacctcacttgcagcaccaaggtgaagaccttgctgctaaatgctgctcagaacaccatggagccacccctgaccccgcccagcccagcagggccgggactgtcacttggtgatacagctctgcagaacctggagcagctgctagacgggccagaagcccagggcagctgggcagagctggcagagcgtctggggctgcgcagcctggtagacacgtaccgacagacaacctcacccagtggcagcctcctgcgcagctacgagctggctggcggggacctggcaggtctactggaggccctgtctgacatgggcctagaggagggagtgaggctgctgaggggtccagaaacccgagacaagctgcccagcacagaggtgaaggaagacagtgcgtacgggagccagtcagtggagcaggaggcagagaagctgggcccaccccctgagccaccaggagggctctgccacgggcacccccagcctcaggtgcactgacctgctgcctgcccccagcccccttcccggaccccctgtacagcgtccccacctatttcaaatcttatttaacaccccacacccacccctcagttgggacaaataaaggattctcatgggaaggggaggacccctccttcccaacttaaaaaaaccc

SEQ ID NO: 456409 - DNA, 2108 bp, Homo sapiens
  misc_feature (4)..(4): n is a, c, g, or t
ggcncggagagaagccgcaaccagagccgccgccacggcgggcgtctaaaattctgggaagcagaacctggccggagccactagacagagccgggcctagcccagagacatggagagttgctacaacccaggtctggatggtattattgaatatgatgatttcaaattgaactcctccattgtggaacccaaggagccagccccagaaacagctgatggcccctacctggtgatcgtggaacagcctaagcagagaggcttccgatttcgatatggctgtgaaggcccctcccatggaggactgcccggtgcctccagtgagaagggccgaaagacctatcccactgtcaagatctgtaactacgagggaccagccaagatcgaggtggacctggtaacacacagtgacccacctcgtgctcatgcccacagtctggtgggcaagcaatgctcggagctggggatctgcgccgtttctgtggggcccaaggacatgactgcccaatttaacaacctgggtgtcctgcatgtgactaagaagaacatgatggggactatgatacaaaaacttcagaggcagcggctccgctctaggccccagggccttacggaggccgagcagcgggagctggagcaagaggccaaagaactgaagaaggtgatggatctgagtatagtgcggctgcgcttctctgccttccttagagccagtgatggctccttctccctgcccctgaagccagtcatctcccagcccatccatgacagcaaatctccgggggcatcaaacctgaagatttctcgaatggacaagacagcaggctctgtgcggggtggagatgaagtttatctgctttgtgacaaggtgcagaaagatgacattgaggttcggttctatgaggatgatgagaatggatggcaggcctttggggacttctctcccacagatgtgcataaacagtatgccattgtgttccggacacccccctatcacaagatgaagattgagcggcctgtaacagtgtttctgcaactgaaacgcaagcgaggaggggacgtgtctgattccaaacagttcacctattaccctctggtggaagacaaggaagaggtgcagcggaagcggaggaaggccttgcccaccttctcccagcccttcgggggtggctcccacatgggtggaggctctgggggtgcagccgggggctacggaggagctggaggaggtggcagcctcggtttcttcccctcctccctggcctacagcccctaccagtccggcgcgggccccatgggctgctacccgggaggcgggggcggggcgcagatggccgccacggtgcccagcagggactccggggaggaagccgcggagccgagcgccccctccaggaccccccagtgcgagccgcaggccccggagatgctgcagcgagctcgagagtacaacgcgcgcctgttcggcctggcgcagcgcagcgcccgagccctactcgactacggcgtcaccgcggacgcgcgcgcgctgctggcgggacagcgccacctgctgacggcgcaggacgagaacggagacacaccactgcacctagccatcatccacgggcagaccagtgtcattgagcagatagtctatgtcatccaccacgcccaggacctcggcgttgtcaacctcaccaaccacctgcaccagacgcccctgcacctggcggtgatcacggggcagacgagtgtggtgagctttctgctgcgggtaggtgcagacccagctctgctggatcggcatggagactcagccatgcatctggcgctgcgggcaggcgctggtgctcctgagctgctgcgtgcactgcttcagagtggagctcctgctgtgccccagctgttgcatatgcctgactttgagggactgtatccagtacacctggcggtccgacctcaggtgcactgacctgctgcctgcccccagcccccttcccggaccccctgtacagcgtccccacctatttcaaatcttatttaacaccccacacccacccctcagttgggacaaataaaggattctcatgggaaggggaggacccctccttcccaacttaaaaaaaccc

SEQ ID NO: 456410 - DNA, 1601 bp, Homo sapiens
tccgtgttgtggggctcagctggttcatttatgttgtttttcctgtacctaagttcccgctgtaggtggtacctttgcagacggtgcgatgggggaagcagagaagtttcactacatctatagttgtgacctggatatcaacgtccagcttaagataggaagcttggaagggaagagagaacaaaagagttataaagctgtcctggaagacccaatgttgaagttctcaggactatatcaagagacatgctctgatctttatgttacttgtcaagtttttgcagaagggaagcctttggccttgccagtgagaacatcctacaaagcatttagtacaagatggaactggaatgaatggctgaaactaccagtaaaataccctgacctgcccaggaatgcccaagtggccctcaccatatgggatgtgtatggtcccggaaaagcagtgcctgtaggaggaacaacggtttcgctctttggaaaatacggcatgtttcgccaagggatgcatgacttgaaagtctggcctaatgtagaagcagatggatcagaacccacaaaaactcctggcagaacaagtagcactctctcagaagatcagatgagccgtcttgccaaggtaaaaaaagtcatttggaacaggtgcaaagctctgactgatgtctattgtagtatatataccttgacattatgaactctgtcagatttttaaaaaatctaaatcttaacttttaaataattgttttattgagatataattcacataccataaagttcacccttggaaagcatacagtctgatggtttagtaaatttacagacttgtataatcatcaccactatataattttagaattttttcatcacccctaaaagaaaccgcaccattaacagtcactcccattttctgctccctgcagttagttccaggcaagtactaatctacttactatctgtatggatttgcctgttctggaaatttcatataaatggaatcattcagtatgtgaccttatgtctggaaatctgtcaggtttgaaaatgtggagcgttggtgatattttcaagatgaccacccactttttctggtgacatagccttaaagttgttagtgtaacattctagagaagcttatgccacttggaagtgaagatgactcagacaattaactagtataaagtttctttgtaagcaaatgaagttattacctttttctttcaaaattgttttaatcaagtgttttcacttagaaatataaaaactaaattctattccgtgcattaattgcaacgctgtcatttattttgtgaacttcctttcacaaagcactgtgttagatactgtttaaggatccctttacagttatctgattaggacactttcttgtagttataatacatactttttttttgcaatcttattagtaggagtgcctctttaatgtctggaggaagttttgttgctaagcttttaacagcttgttgcctttacccacatatagaagaaatcttcaagaataagtacttgggttggctaggcttcatgcttcaacacagaatttttgtcaagttcattttgtcttttgtattgctcttttaagg

SEQ ID NO: 456411 - DNA, 837 bp, Homo sapiens
gaaatcttcgttgattttattcctactggggatatctcagtattgaacaccattaatagtgttggccccaaaacagctcttcactaggcctctcgacttcttcctttgatttgatttccagaccatttctggaatgaagtagttgcactctctgggataagctacaggttttcacagcctctcaaaatgtggcaccaagaaccaagcacactactcaaaatcactttatctaaatcactttagaattcagtggaatttttgccttcctagtgctggatgagatgatttttgcttgtctcgtgttaattacattcatcttgagcttacagtcagcagacaccctctccttgaattattttctcatataaactgatttttaagtgaagcctcaggaatcctatacagtatagttaattgcaatcctcttggtagcatttagcaaactaattaatgcactttttattttattagtagtcttttttaaaactatagactattgtttatctttgtgaataattaagtaaattattttctgtttatttctttttaatttttgtagtactggagaaaatgaaactgggattgacccatcaagatgcttggctcaataagaaaaccacgttaggagcaacctttgtatattggagacttcagagtaaccagcaaggaagagaaatcttaatcttcaagttaccatattttccaaatattacatggtacctgagttctgcttccttggatgtcattgcttaaatatagtcttgaagggcttgttttgaaatattgtatatattttttcaaatgtatacattgttaataaattaagaaatgagaaac

SEQ ID NO: 456412 - DNA, 3100 bp, Homo sapiens
tccgtgttgtggggctcagctggttcatttatgttgtttttcctgtacctaagttcccgctgtaggtggtacctttgcagacggtgcgatgggggaagcagagaagtttcactacatctatagttgtgacctggatatcaacgtccagcttaagataggaagcttggaagggaagagagaacaaaagagttataaagctgtcctggaagacccaatgttgaagttctcaggactatatcaagagacatgctctgatctttatgttacttgtcaagtttttgcagaagggaagcctttggccttgccagtgagaacatcctacaaagcatttagtacaagatggaactggaatgaatggctgaaactaccagtaaaataccctgacctgcccaggaatgcccaagtggccctcaccatatgggatgtgtatggtcccggaaaagcagtgcctgtaggaggaacaacggtttcgctctttggaaaatacggcatgtttcgccaagggatgcatgacttgaaagtctggcctaatgtagaagcagatggatcagaacccacaaaaactcctggcagaacaagtagcactctctcagaagatcagatgagccgtcttgccaagctcaccaaagctcatcgacaaggacacatggtgaaagtagattggctggatagattgacatttagagaaatagaaatgataaatgagagtgaaaaacgaagttctaatttcatgtacctgatggttgaatttcgatgtgtcaagtgtgatgataaggaatatggtattgtttattatgaaaaggacggtgatgaatcatctccaattttaacaagttttgaattagtgaaagttcctgacccccagatgtctatggagaatttagttgagagcaaacaccacaagcttgcccggagtttaagaagtggaccttctgaccacgatctgaaacccaatgctgccacgagagatcagttaaatattattgtgagttatccaccaaccaagcaacttacatatgaagaacaagatcttgtttggaagtttagatattatcttacgaatcaagaaaaagccttgacaaaattcttgaaatgtgttaattgggatctacctcaagaggccaaacaggccttggaacttctgggaaaatggaagccgatggatgtagaggactccttggagctgttatcctctcattacaccaacccaactgtgaggcgttatgctgttgcccggttgcgacaggccgatgatgaggatttgttgatgtacctattacaattggtccaggctctcaaatatgaaaattttgatgatataaagaatggattggaacctaccaagaaggatagtcagagttcagtgtcagaaaatgtgtcaaattctggaataaattctgcagaaatagatagctcccaaattataaccagcccccttccttcagtctcttcacctcctcctgcatcaaaaacaaaagaagttccagatggcgaaaatctggaacaagatctctgtaccttcttgatatcgagagcctgcaaaaactcaacactggctaattatttatactggtatgtgatagtggaatgtgaagatcaagatactcagcagagagatccaaagacccatgagatgtacttgaacgtaatgagaagattcagccaagcattgttgaagggtgataagtctgtcagagttatgcgttctttgctggctgcacaacagacatttgtagatcggttggtgcatctaatgaaggcagtacaacgcgaaagtggaaatcgtaagaaaaagaatgagagactacaggcattgcttggagataatgaaaagatgaatttgtcagatgtggaacttatcccgttgcctttagaaccccaagtgaaaattagaggaataattccggaaacagctacactgtttaaaagtgcccttatgcctgcacagttgttttttaagacggaagatggaggcaaatatccagttatatttaagcatggagatgatttacgtcaagatcaacttattcttcaaatcatttcactcatggacaagctgttacggaaagaaaatctggacttgaaattgacaccttataaggtgttagccaccagtacaaaacatggcttcatgcagtttatccagtcagttcctgtggctgaagttcttgatacagagggaagcattcagaacttttttagaaaatatgcaccaagtgagaatgggccaaatgggattagtgctgaggtcatggacacttacgttaaaagctgtgctggatattgcgtgatcacctatatacttggagttggagacaggcacctggataaccttttgctaacaaaaacaggcaaactcttccacatagactttggatatattttgggtcgggatccaaagcctcttcctccaccaatgaagctgaataaagaaatggtagaaggaatggggggcacacagagtgagcagtaccaagagttccgtaaacagtgttacacggctttcctccacctgcgaaggtattctaatctgattttgaacttgttttccttgatggttgatgcaaacattccagatattgcacttgaaccagataaaactgtgaaaaaggttcaggataaattccgcttagacctgtcggatgaagaggctgtgcattacatgcagagtctgattgatgagagtgtccatgctctttttgctgcagtggtggaacagattcacaagtttgcccagtactggagaaaatgaaactgggattgacccatcaagatgcttggctcaataagaaaaccacgttaggagcaacctttgtatattggagacttcagagtaaccagcaaggaagagaaatcttaatcttcaagttaccatattttccaaatattacatggtacctgagttctgcttccttggatgtcattgcttaaatatagtcttgaagggcttgttttgaaatattgtatatattttttcaaatgtatacattgttaataaattaagaaatgagaaacattcttatttatgtacatgttatgagagttctggaggaagtaatatgttgaaatagtaaaacattttagtttttgagtttaaaat

SEQ ID NO: 456413 - DNA, 1868 bp, Homo sapiens
cttcagagaggttttcagaataagagagtcttatgtaataccaaagtattacacagattatgaaaataatagtttttgttctcgagttactcagtaaatatgtgagcttagatgatttctgaggatgttaatactctacctcataaataggagaaaatgcttgttttggtggcaaaagttttagaaaatttgggatattacacaaattaaggcattaccactcttagtttaccttttattgatggttgtatgtgttcctctttaagttttcacttttaaaagtgatgataaaatgtgttttattactccaattttattatttttgcatatgtaaattaatctgttttagtgaaatgatatgagtatttacaaactgaatctaagtttcatttcacatcacatgaatggctcaaactatttttaaggtatgtgatagtggaatgtgaagatcaagatactcagcagagagatccaaagacccatgagatgtacttgaacgtaatgagaagattcagccaagcattgttgaagggtgataagtctgtcagagttatgcgttctttgctggctgcacaacagacatttgtagatcggttggtgcatctaatgaaggcagtacaacgcgaaagtggaaatcgtaagaaaaagaatgagagactacaggcattgcttggagataatgaaaagatgaatttgtcagatgtggaacttatcccgttgcctttagaaccccaagtgaaaattagaggaataattccggaaacagctacactgtttaaaagtgcccttatgcctgcacagttgttttttaagacggaagatggaggcaaatatccagttatatttaagcatggagatgatttacgtcaagatcaacttattcttcaaatcatttcactcatggacaagctgttacggaaagaaaatctggacttgaaattgacaccttataaggtgttagccaccagtacaaaacatggcttcatgcagtttatccagtcagttcctgtggctgaagttcttgatacagagggaagcattcagaacttttttagaaaatatgcaccaagtgagaatgggccaaatgggattagtgctgaggtcatggacacttacgttaaaagctgtgctggatattgcgtgatcacctatatacttggagttggagacaggcacctggataaccttttgctaacaaaaacaggcaaactcttccacatagactttggatatattttgggtcgggatccaaagcctcttcctccaccaatgaagctgaataaagaaatggtagaaggaatggggggcacacagagtgagcagtaccaagagttccgtaaacagtgttacacggctttcctccacctgcgaaggtattctaatctgattttgaacttgttttccttgatggttgatgcaaacattccagatattgcacttgaaccagataaaactgtgaaaaaggttcaggataaattccgcttagacctgtcggatgaagaggctgtgcattacatgcagagtctgattgatgagagtgtccatgctctttttgctgcagtggtggaacagattcacaagtttgcccagtactggagaaaatgaaactgggattgacccatcaagatgcttggctcaataagaaaaccacgttaggagcaacctttgtatattggagacttcagagtaaccagcaaggaagagaaatcttaatcttcaagttaccatattttccaaatattacatggtacctgagttctgcttccttggatgtcattgcttaaatatagtcttgaagggcttgttttgaaatattgtatatattttttcaaatgtatacattgttaataaattaagaaatgagaaac

SEQ ID NO: 456414 - DNA, 1815 bp, Homo sapiens
cttcagagaggttttcagaataagagagtcttatgtaataccaaagtattacacagattatgaaaataatagtttttgttctcgagttactcagtaaatatgtgagcttagatgatttctgaggatgttaatactctacctcataaataggagaaaatgcttgttttggtggcaaaagttttagaaaatttgggatattacacaaattaaggcattaccactcttagtttaccttttattgatggttgtatgtgttcctctttaagttttcacttttaaaagtgatgatgttttagtgaaatgatatgagtatttacaaactgaatctaagtttcatttcacatcacatgaatggctcaaactatttttaaggtatgtgatagtggaatgtgaagatcaagatactcagcagagagatccaaagacccatgagatgtacttgaacgtaatgagaagattcagccaagcattgttgaagggtgataagtctgtcagagttatgcgttctttgctggctgcacaacagacatttgtagatcggttggtgcatctaatgaaggcagtacaacgcgaaagtggaaatcgtaagaaaaagaatgagagactacaggcattgcttggagataatgaaaagatgaatttgtcagatgtggaacttatcccgttgcctttagaaccccaagtgaaaattagaggaataattccggaaacagctacactgtttaaaagtgcccttatgcctgcacagttgttttttaagacggaagatggaggcaaatatccagttatatttaagcatggagatgatttacgtcaagatcaacttattcttcaaatcatttcactcatggacaagctgttacggaaagaaaatctggacttgaaattgacaccttataaggtgttagccaccagtacaaaacatggcttcatgcagtttatccagtcagttcctgtggctgaagttcttgatacagagggaagcattcagaacttttttagaaaatatgcaccaagtgagaatgggccaaatgggattagtgctgaggtcatggacacttacgttaaaagctgtgctggatattgcgtgatcacctatatacttggagttggagacaggcacctggataaccttttgctaacaaaaacaggcaaactcttccacatagactttggatatattttgggtcgggatccaaagcctcttcctccaccaatgaagctgaataaagaaatggtagaaggaatggggggcacacagagtgagcagtaccaagagttccgtaaacagtgttacacggctttcctccacctgcgaaggtattctaatctgattttgaacttgttttccttgatggttgatgcaaacattccagatattgcacttgaaccagataaaactgtgaaaaaggttcaggataaattccgcttagacctgtcggatgaagaggctgtgcattacatgcagagtctgattgatgagagtgtccatgctctttttgctgcagtggtggaacagattcacaagtttgcccagtactggagaaaatgaaactgggattgacccatcaagatgcttggctcaataagaaaaccacgttaggagcaacctttgtatattggagacttcagagtaaccagcaaggaagagaaatcttaatcttcaagttaccatattttccaaatattacatggtacctgagttctgcttccttggatgtcattgcttaaatatagtcttgaagggcttgttttgaaatattgtatatattttttcaaatgtatacattgttaataaattaagaaatgagaaac

SEQ ID NO: 456415 - DNA, 1941 bp, Homo sapiens
tccgtgttgtggggctcagctggttcatttatgttgtttttcctgtacctaagttcccgctgtaggtggtacctttgcagacggtgcgatgggggaagcagagaagtttcactacatctatagttgtgacctggatatcaacgtccagcttaagataggaagcttggaagggaagagagaacaaaagagttataaagctgtcctggaagacccaatgttgaagttctcaggactatatcaagagacatgctctgatctttatgttacttgtcaagtttttgcagaagggaagcctttggccttgccagtgagaacatcctacaaagcatttagtacaagatggaactggaatgaatggctgaaactaccagtaaaataccctgacctgcccaggaatgcccaagtggccctcaccatatgggatgtgtatggtcccggaaaagcagtgcctgtaggaggaacaacggtttcgctctttggaaaatacggcatgtttcgccaagggatgcatgacttgaaagtctggcctaatgtagaagcagatggatcagaacccacaaaaactcctggcagaacaagtagcactctctcagaagatcagatgagccgtcttgccaagctcaccaaagctcatcgacaaggacacatggtgaaagtagattggctggatagattgacatttagagaaatagaaatgataaatgagagtgaaaaacgaagttctaatttcatgtacctgatggttgaatttcgatgtgtcaagtgtgatgataaggaatatggtattgtttattatgaaaaggacggtgatgaatcatctccaattttaacaagttttgaattagtgaaagttcctgacccccagatgtctatggagaatttagttgagagcaaacaccacaagcttgcccggagtttaagaagtggaccttctgaccacgatctgaaacccaatgctgccacgagagatcagttaaatattattgtgagttatccaccaaccaagcaacttacatatgaagaacaagatcttgtttggaagtttagatattatcttacgaatcaagaaaaagccttgacaaaattcttgaaatgtgttaattgggatctacctcaagaggccaaacaggccttggaacttctgggaaaatggaagccgatggatgtagaggactccttggagctgttatcctctcattacaccaacccaactgtgaggcgttatgctgttgcccggttgcgacaggccgatgatgaggatttgttgatgtacctattacaattggtccaggctctcaaatatgaaaattttgatgatataaagaatggattggaacctaccaagaaggatagtcagagttcagtgtcagaaaatgtgtcaaattctggaataaattctgcagaaatagatagctcccaaattataaccagcccccttccttcagtctcttcacctcctcctgcatcaaaaacaaaagaagttccagatggcgaaaatctggaacaagatctctgtaccttcttgatatcgagagcctgcaaaaactcaacactggctaattatttatactggtatgtaaaaataattttctgtttattttcttattacccttaagaattattttttctcatgctataaacacaaagatgatttaaaataagatatgagcaatcatcaaaagtctagatatagtatttatatctaactgtattccctgacagctgggttcatggaaatgcttgttggcatcaacatttctctccctttcactaaggatataactttccaggagctaggatataactggggagggtaatgggtactttcagtttaatatctgtttggcatgtaaagtagttgagtatgatatttcacagttcttcaggagtatatattttcacattatttactaaaacattggaatcatttaaaaagaaaaa

SEQ ID NO: 456416 - DNA, 3015 bp, Homo sapiens
tccgtgttgtggggctcagctggttcatttatgttgtttttcctgtacctaagttcccgctgtaggtggtacctttgcagacggtgcgatgggggaagcagagaagtttcactacatctatagttgtgacctggatatcaacgtccagcttaagataggaagcttggaagggaagagagaacaaaagagttataaagctgtcctggaagacccaatgttgaagttctcaggactatatcaagagacatgctctgatctttatgttacttgtcaagtttttgcagaagggaagcctttggccttgccagtgagaacatcctacaaagcatttagtacaagatggaactggaatgaatggctgaaactaccagtaaaataccctgacctgcccaggaatgcccaagtggccctcaccatatgggatgtgtatggtcccggaaaagcagtgcctgtaggaggaacaacggtttcgctctttggaaaatacggcatgtttcgccaagggatgcatgacttgaaagtctggcctaatgtagaagcagatggatcagaacccacaaaaactcctggcagaacaagtagcactctctcagaagatcagatgagccgtcttgccaagctcaccaaagctcatcgacaaggacacatggtgaaagtagattggctggatagattgacatttagagaaatagaaatgataaatgagagtgaaaaacgaagttctaatttcatgtacctgatggttgaatttcgatgtgtcaagtgtgatgataaggaatatggtattgtttattatgaaaaggacggtgatgaatcatctccaattttaacaagttttgaattagtgaaagttcctgacccccagatgtctatggagaatttagttgagagcaaacaccacaagcttgcccggagtttaagaagtggaccttctgaccacgatctgaaacccaatgctgccacgagagatcagttaaatattattgtgagttatccaccaaccaagcaacttacatatgaagaacaagatcttgtttggaagtttagatattatcttacgaatcaagaaaaagccttgacaaaattcttgaaatgtgttaattgggatctacctcaagaggccaaacaggccttggaacttctgggaaaatggaagccgatggatgtagaggactccttggagctgttatcctctcattacaccaacccaactgtgaggcgttatgctgttgcccggttgcgacaggccgatgatgaggatttgttgatgtacctattacaattggtccaggctctcaaatatgaaaattttgatgatataaagaatggattggaacctaccaagaaggatagtcagagttcagtgtcagaaaatgtgtcaaattctggaataaattctgcagaaatagatagctcccaaattataaccagcccccttccttcagtctcttcacctcctcctgcatcaaaaacaaaagaagttccagatggcgaaaatctggaacaagatctctgtaccttcttgatatcgagagcctgcaaaaactcaacactggctaattatttatactggtatgtgatagtggaatgtgaagatcaagatactcagcagagagatccaaagacccatgagatgtacttgaacgtaatgagaagattcagccaagcattgttgaagggtgataagtctgtcagagttatgcgttctttgctggctgcacaacagacatttgtagatcggttggtgcatctaatgaaggcagtacaacgcgaaagtggaaatcgtaagaaaaagaatgagagactacaggcattgcttggagataatgaaaagatgaatttgtcagatgtggaacttatcccgttgcctttagaaccccaagtgaaaattagaggaataattccggaaacagctacactgtttaaaagtgcccttatgcctgcacagttgttttttaagacggaagatggaggcaaatatccagttatatttaagcatggagatgatttacgtcaagatcaacttattcttcaaatcatttcactcatggacaagctgttacggaaagaaaatctggacttgaaattgacaccttataaggtgttagccaccagtacaaaacatggcttcatgcagtttatccagtcagttcctgtggctgaagttcttgatacagagggaagcattcagaacttttttagaaaatatgcaccaagtgagaatgggccaaatgggattagtgctgaggtcatggacacttacgttaaaagctgtgctggatattgcgtgatcacctatatacttggagttggagacaggcacctggataaccttttgctaacaaaaacaggcaaactcttccacatagactttggatatattttgggtcgggatccaaagcctcttcctccaccaatgaagctgaataaagaaatggtagaaggaatggggggcacacagagtgagcagtaccaagagttccgtaaacagtgttacacggctttcctccacctgcgaaggtattctaatctgattttgaacttgttttccttgatggttgatgcaaacattccagatattgcacttgaaccagataaaactgtgaaaaaggttcaggataaattccgcttagacctgtcggatgaagaggctgtgcattacatgcagagtctgattgatgagagtgtccatgctctttttgctgcagtggtggaacagattcacaagtttgcccagtactggagaaaatgaaactgggattgacccatcaagatgcttggctcaataagaaaaccacgttaggagcaacctttgtatattggagacttcagagtaaccagcaaggaagagaaatcttaatcttcaagttaccatattttccaaatattacatggtacctgagttctgcttccttggatgtcattgcttaaatatagtcttgaagggcttgttttgaaatattgtatatattttttcaaatgtatacattgttaataaattaagaaatgagaaac

SEQ ID NO: 456417 - DNA, 605 bp, Homo sapiens
aggggcctgttgggagtgagaggcagaaaaggaagcttggaagggaagagagaacaaaagagttataaagctgtcctggaagacccaatgttgaagttctcaggactatatcaagagacatgctctgatctttatgttacttgtcaagtttttgcagaagggaagcctttggccttgccagtgagaacatcctacaaagcatttagtacaagatggaactggaatgaatggctgaaactaccagtaaaataccctgacctgcccaggaatgcccaagtggccctcaccatatgggatgtgtatggtcccggaaaagcagtgcctgtaggaggaacaacggtttcgctctttggaaaatacggcatgtttcgccaagggatgcatgacttgaaagtctggcctaatgtagaagcagatggatcagaacccacaaaaactcctggcagaacaagtagcactctctcagaagatcagatgagccgtcttgccaaggaacattaagccatcatgtaagaagtccagctatttttttggattgaccaagttggatttccacttggagagggagcagcactgagaatacgtggggaaagagaggccctacc

SEQ ID NO: 456418 - DNA, 4058 bp, Homo sapiens
  misc_feature (2392)..(2392): n is a, c, g, or t
  misc_feature (2489)..(2489): n is a, c, g, or t
tccgtgttgtggggctcagctggttcatttatgttgtttttcctgtacctaagttcccgctgtaggtggtacctttgcagacggtgcgatgggggaagcagagaagtttcactacatctatagttgtgacctggatatcaacgtccagcttaagataggaagcttggaagggaagagagaacaaaagagttataaagctgtcctggaagacccaatgttgaagttctcaggactatatcaagagacatgctctgatctttatgttacttgtcaagtttttgcagaagggaagcctttggccttgccagtgagaacatcctacaaagcatttagtacaagatggaactggaatgaatggctgaaactaccagtaaaataccctgacctgcccaggaatgcccaagtggccctcaccatatgggatgtgtatggtcccggaaaagcagtgcctgtaggaggaacaacggtttcgctctttggaaaatacggcatgtttcgccaagggatgcatgacttgaaagtctggcctaatgtagaagcagatggatcagaacccacaaaaactcctggcagaacaagtagcactctctcagaagatcagatgagccgtcttgccaagctcaccaaagctcatcgacaaggacacatggtgaaagtagattggctggatagattgacatttagagaaatagaaatgataaatgagagtgaaaaacgaagttctaatttcatgtacctgatggttgaatttcgatgtgtcaagtgtgatgataaggaatatggtattgtttattatgaaaaggacggtgatgaatcatctccaattttaacaagttttgaattagtgaaagttcctgacccccagatgtctatggagaatttagttgagagcaaacaccacaagcttgcccggagtttaagaagtggaccttctgaccacgatctgaaacccaatgctgccacgagagatcagttaaatattattgtgagttatccaccaaccaagcaacttacatatgaagaacaagatcttgtttggaagtttagatattatcttacgaatcaagaaaaagccttgacaaaattcttgaaatgtgttaattgggatctacctcaagaggccaaacaggccttggaacttctgggaaaatggaagccgatggatgtagaggactccttggagctgttatcctctcattacaccaacccaactgtgaggcgttatgctgttgcccggttgcgacaggccgatgatgaggatttgttgatgtacctattacaattggtccaggctctcaaatatgaaaattttgatgatataaagaatggattggaacctaccaagaaggatagtcagagttcagtgtcagaaaatgtgtcaaattctggaataaattctgcagaaatagatagctcccaaattataaccagcccccttccttcagtctcttcacctcctcctgcatcaaaaacaaaagaagttccagatggcgaaaatctggaacaagatctctgtaccttcttgatatcgagagcctgcaaaaactcaacactggctaattatttatactggtatgtgatagtggaatgtgaagatcaagatactcagcagagagatccaaagacccatgagatgtacttgaacgtaatgagaagattcagccaagcattgttgaagggtgataagtctgtcagagttatgcgttctttgctggctgcacaacagacatttgtagatcggttggtgcatctaatgaaggcagtacaacgcgaaagtggaaatcgtaagaaaaagaatgagagactacaggcattgcttggagataatgaaaagatgaatttgtcagatgtggaacttatcccgttgcctttagaaccccaagtgaaaattagaggaataattccggaaacagctacactgtttaaaagtgcccttatgcctgcacagttgttttttaagacggaagatggaggcaaatatccagttatatttaagcatggagatgatttacgtcaagatcaacttattcttcaaatcatttcactcatggacaagctgttacggaaagaaaatctggacttgaaattgacaccttataaggtgttagccaccagtacaaaacatggcttcatgcagtttatccagtcagttcctgtggctgaagttcttgatacagagggaagcattcagaacttttttagaaaatatgcaccaagtgagaatgggccaaatgggattagtgctgaggtcatggacacttacgttaaaagctgtgctggatattgcgtgatcacctatatacttggagttggagacaggcacctggataaccttttgctaacaaaaacaggtaacaattaatgactaccagtagacatacattgtatatgnccatggtttttacccctgaatctatgtactaacaagataagttgcggcctggcgcggtggctcacgcccgtaatcccagcactttgggaggccaagncgggtggatcacctgaggttgggagttcgagaccagcctgaccaacatggagaaaccccgtctctactaaacacacaaaatttgccgggcgtggtggtacatgcctgtaatcccaactactcaggaggctgaggcaggagaatcgcttgaacccgggaggcggaggttgcagtgagccgagattgcaccattgcactgcagactaggcaacaagatcaaaacgccatcttagaaaaaaaaaaaaaaaaagatgagttgcgtaattgaagataaatcagagagtcttaaaaattcctttaaatgttaccttggaagaacatttagggaaagtcctttcccttttaagaattgctttagtagtaatcctacagatggtcattttgcccacacttctgtactggaaaatgcctctttttatggaaagccaataatggatacaagtagcttagtctcttactgtatagctctagttagattgttaaaatgtcctttctcttacaaagtgtgcttaattcactttaatatctacctttaattatttgcttttccccttggagttctatgggataatcattctcagtcccctttgtcctgacaactctttagccctatgtatttatctttatgcagacagcttccagacttacagctttttacctcagtccatttcattaacttcaaattgaaatatcgaactgcttacttgaaattgtcattatatatggccagttgtaaaaggttgtcctttcctctactacctgcctaaaacctgtttctcacctcatttttccatttcaatagatagcaacatcacctacccagttgttcaagctctagacctcaaagtcattcttaacatgtctcttggcctcatctcatatactgaacctattagcaaatcttgtctactcctcaactccaaaatagatcatgaagttacccactgtcttcatttttactactttgaccccacttgaagcaaacaatatatgttgcctaaacaatttgaatgaaacctgaaccctttattggggccttgtggcttgtccaggcaggccatttgtctgaatgtcaaaccactcctgcctcagacaagagcctttgttgttttctctttctggaaagttatttattcagatctttgcagggctgactttagttattaagttgaagttctaatggcatctctttagagaagccctttctaactccttgatctgtaataacatatctgccctcttcctccaatgctctctacttattactgtattgtttatagcacttatcactagctgaagttaccttttttgtttaattcaacaactatttattgaacagctagtagatgctgggaataccaaagttaacagaagagacagaaatccttgctctcctagagcttgttgagttcttatcatcatcttctccccttcaggatgcaagttccatgagagcaggaacctttgtccattggggttacccccatgcctctggaccttgaacaccacctagctaaagtgttcaataaatcagtgttgaattaatgatgaataaatacttctgctcttc

SEQ ID NO: 456419 - DNA, 3796 bp, Homo sapiens
tccgtgttgtggggctcagctggttcatttatgttgtttttcctgtacctaagttcccgctgtaggtggtacctttgcagacggtgcgatgggggaagcagagaagtttcactacatctatagttgtgacctggatatcaacgtccagcttaagataggaagcttggaagggaagagagaacaaaagagttataaagctgtcctggaagacccaatgttgaagttctcaggactatatcaagagacatgctctgatctttatgttacttgtcaagtttttgcagaagggaagcctttggccttgccagtgagaacatcctacaaagcatttagtacaagatggaactggaatgaatggctgaaactaccagtaaaataccctgacctgcccaggaatgcccaagtggccctcaccatatgggatgtgtatggtcccggaaaagcagtgcctgtaggaggaacaacggtttcgctctttggaaaatacggcatgtttcgccaagggatgcatgacttgaaagtctggcctaatgtagaagcagatggatcagaacccacaaaaactcctggcagaacaagtagcactctctcagaagatcagatgagccgtcttgccaagctcaccaaagctcatcgacaaggacacatggtgaaagtagattggctggatagattgacatttagagaaatagaaatgataaatgagagtgaaaaacgaagttctaatttcatgtacctgatggttgaatttcgatgtgtcaagtgtgatgataaggaatatggtattgtttattatgaaaaggacggtgatgaatcatctccaattttaacaagttttgaattagtgaaagttcctgacccccagatgtctatggagaatttagttgagagcaaacaccacaagcttgcccggagtttaagaagtggaccttctgaccacgatctgaaacccaatgctgccacgagagatcagttaaatattattgtgagttatccaccaaccaagcaacttacatatgaagaacaagatcttgtttggaagtttagatattatcttacgaatcaagaaaaagccttgacaaaattcttgaaatgtgttaattgggatctacctcaagaggccaaacaggccttggaacttctgggaaaatggaagccgatggatgtagaggactccttggagctgttatcctctcattacaccaacccaactgtgaggcgttatgctgttgcccggttgcgacaggccgatgatgaggatttgttgatgtacctattacaattggtccaggctctcaaatatgaaaattttgatgatataaagaatggattggaacctaccaagaaggatagtcagagttcagtgtcagaaaatgtgtcaaattctggaataaattctgcagaaatagatagctcccaaattataaccagcccccttccttcagtctcttcacctcctcctgcatcaaaaacaaaagaagttccagatggcgaaaatctggaacaagatctctgtaccttcttgatatcgagagcctgcaaaaactcaacactggctaattatttatactggtatgtgatagtggaatgtgaagatcaagatactcagcagagagatccaaagacccatgagatgtacttgaacgtaatgagaagattcagccaagcattgttgaagggtgataagtctgtcagagttatgcgttctttgctggctgcacaacagacatttgtagatcggttggtgcatctaatgaaggcagtacaacgcgaaagtggaaatcgtaagaaaaagaatgagagactacaggcattgcttggagataatgaaaagatgaatttgtcagatgtggaacttatcccgttgcctttagaaccccaagtgaaaattagaggaataattccggaaacagctacactgtttaaaagtgcccttatgcctgcacagttgttttttaagacggaagatggaggcaaatatccagttatatttaagcatggagatgatttacgtcaagatcaacttattcttcaaatcatttcactcatggacaagctgttacggaaagaaaatctggacttgaaattgacaccttataaggtgttagccaccagtacaaaacatggcttcatgcagtttatccagtcagttcctgtggctgaagttcttgatacagagggaagcattcagaacttttttagaaaatatgcaccaagtgagaatgggccaaatgggattagtgctgaggtcatggacacttacgttaaaagctgtgctggatattgcgtgatcacctatatacttggagttggagacaggcacctggataaccttttgctaacaaaaacaggaggctgaggcaggagaatcgcttgaacccgggaggcggaggttgcagtgagccgagattgcaccattgcactgcagactaggcaacaagatcaaaacgccatcttagaaaaaaaaaaaaaaaaagatgagttgcgtaattgaagataaatcagagagtcttaaaaattcctttaaatgttaccttggaagaacatttagggaaagtcctttcccttttaagaattgctttagtagtaatcctacagatggtcattttgcccacacttctgtactggaaaatgcctctttttatggaaagccaataatggatacaagtagcttagtctcttactgtatagctctagttagattgttaaaatgtcctttctcttacaaagtgtgcttaattcactttaatatctacctttaattatttgcttttccccttggagttctatgggataatcattctcagtcccctttgtcctgacaactctttagccctatgtatttatctttatgcagacagcttccagacttacagctttttacctcagtccatttcattaacttcaaattgaaatatcgaactgcttacttgaaattgtcattatatatggccagttgtaaaaggttgtcctttcctctactacctgcctaaaacctgtttctcacctcatttttccatttcaatagatagcaacatcacctacccagttgttcaagctctagacctcaaagtcattcttaacatgtctcttggcctcatctcatatactgaacctattagcaaatcttgtctactcctcaactccaaaatagatcatgaagttacccactgtcttcatttttactactttgaccccacttgaagcaaacaatatatgttgcctaaacaatttgaatgaaacctgaaccctttattggggccttgtggcttgtccaggcaggccatttgtctgaatgtcaaaccactcctgcctcagacaagagcctttgttgttttctctttctggaaagttatttattcagatctttgcagggctgactttagttattaagttgaagttctaatggcatctctttagagaagccctttctaactccttgatctgtaataacatatctgccctcttcctccaatgctctctacttattactgtattgtttatagcacttatcactagctgaagttaccttttttgtttaattcaacaactatttattgaacagctagtagatgctgggaataccaaagttaacagaagagacagaaatccttgctctcctagagcttgttgagttcttatcatcatcttctccccttcaggatgcaagttccatgagagcaggaacctttgtccattggggttacccccatgcctctggaccttgaacaccacctagctaaagtgttcaataaatcagtgttgaattaatgatgaataaatacttctgctcttc

SEQ ID NO: 456420 - DNA, 4263 bp, Homo sapiens
gactgggagcaggcagcccgggcggagcgggccggtgccgaggacggccccaggcattgctctgccccgggcattgcgcggcgcgcgtgagggggatgcggcaggaggcggcgcggcgggaggagtaggcggcggcgccctcgggagggagctgcgcgcgggccagacggcgcccggaggctccgcagtgccgccgccgtcgcccgggaggctccgcgcgggagccatgtaaccctgcggcgggctccgggctgctccgtccttccccagctcccgggctagcgcggcagcggggccacgatgaagaagcagttcaatcgcatgcgccagctggccaaccagacggtgggcagggctgaaaagacagaagttttgagtgaagaccttcttcaggtggagaagcgtctggagctggtgaaacaggtgtcccacagcacgcacaagaagctcaccgcatgtctgcagggccagcaaggggcagaggctgacaagcgctccaaaaagttgcctttgacaacactggctcagtgtctgatggaggggtcagctatcctgggagatgacacacttcttgggaagatgctgaaactctgtggagagacggaggacaagctggctcaggagctgatacattttgagttgcaagtagagagagacgtgattgagcccctgtttttgctggcggaggtggaaatcccaaatattcaaaagcagaggaaacacttagccaagttggtgctggacatggattcctcacgaaccaggtggcagcagacttccaagtcttcaggtttgtccagcagcttacagcctgcgggtgccaaggctgatgccctcagggaagaaatggaagaggctgccaacagagtggagatttgcagggaccagctctcagctgatatgtacagttttgtggccaaagaaattgactatgcaaactactttcaaacgctaatagaagtgcaagctgaataccacaggaagtccctgacactattgcaggctgtattgcctcagatcaaagcacaacaggaggcctgggtagagaagccttccttcgggaagccgctggaggagcacctcaccatcagcggccgggagatcgccttccccatcgaggcgtgtgtgaccatgctgcttgagtgtgggatgcaggaggagggactcttccgagtagccccctctgcctccaaactgaagaagctgaaagcggccctggactgctgcgtggtggatgtgcaggagtactcggcagacccccacgcaattgcaggagctttgaaatcttacctccgagagttgccagaacctcttatgacctttgaactctatgatgagtggatccaggcttccaatgtccaggagcaagacaagaagcttcaggctctatggaatgcttgtgaaaagttgcccaaggccaatcacaacaacatccgatacttgataaaatttttatccaagctgtcagaatatcaagatgtaaacaagatgactcccagtaatatggcaattgttttaggacccaacctcctatggccacaagcagaagggaacattacagagatgatgaccacagtgtcgctgcaaattgttgggatcattgaacctatcatccagcatgcagactggttcttccctggggagatagagttcaacattactggcaattatgggagtccagtacacgtgaaccataatgccaactacagctcaatgccctccccagacatggaccctgctgaccggcgccagcccgagcaggcccgccggcccctcagcgtcgccacggataatatgatgctggagttttacaaaaaggatggcatgggtgtgagggtcatggacacaaactgggtggctcgaagaggctcctcggccggtcggaaagtgtcctgcgccccgccctccatgcagcctcccgccccgcccgccgagctggctgcgcccctgccttcgccgctgccggagcagcccctggacagccccgcggcccccgcgctctctccatccggcctgggcctccagcctgggcccgagcgcaccagcacaacaaaaagcaaggaactttctccaggctctgcacagaaaggaagtccaggctccagccagggcacagcctgtgcagggactcaaccaggggctcaacctggagctcagccgggcgccagccccagccccagccagccgcctgcagaccagagtcctcacaccctccggaaagtttcaaagaagctggcaccgattccacccaaggtcccctttggccagccgggggctatggcagaccagtccgctggccagccgtccccagtcagcctgtcccccaccccgcccagcaccccgtcaccctatggactgagctaccctcaggggtactccttggcctcgggccagctctccccagctgcagctcctcccctggcctctccttctgtctttacaagcactttgagcaaatcgcggcccactcctaagccgcgacagagacctactctgccgcctcctcagcctcccacagtaaacctctcggcctctagtccacagtccacggaggcccccatgctagatggcatgtcccctggggaaagcatgtctacagctgtgtgacatgagtggcgcagttttggatacgtgtgagggggattttcaggatcttgtccactttgatattccctcgatccacatagagctcgggtcgacgctccgcctgagtcccctggagcacatgcggcgacactcagtaactgacaagagggactcggaggaggagtctgagagcaccgccctctgacatgacaccgcccatcctgcctcgcgtgtacatacatcacgggccctaggaacgccgccaggagcagcgtccatgagcttgccaagtgttctctgctggctctttcctgccactgccaacacgaggttggaatttggcagaaaattgtgatctccagtccgtgtggtgatgctggtggtgcaggttttgtttgttcctttcgggtggtgacttcggccttttgtttgacctttgccttttgactttgtgcctcttttgatccactttcagcctccatgccagaaaacacccacctctccatccaaggctggtcaggaacgtcctttgcagggtcggggtggtgcgggagaggctcactttgcctggttagacccaagggctgctaccttttccttggacggctcatgtcaggtcttgcaggatcagtttaatggccacagaaaggaagcaggacagcagggcccctctcacccacaactggaccaggtccaggattctagcagtcctggggcactgacctttgccagctacctgggggagggcttgccactggaaaacctttcaggccgcccccatcagtgggctccaaagtaaatggctgaaaacaaaaatgtttcacttcctaacagttttcctttttccactgtgtgactgaaagctcctatatcattttatatttctgaatctataaaacaaaacaaacaagcctgacagtgtctggaggagccaaaggtggcctccctgtccccaaatatattggctatatgagagtaattttacccctctacgtacctaaaggcacccagttcactagtctgtggggtcctggagcctgtctcttctttctggaggttcaaactgaatagcaataattacgttacccaaagcatgtggaggaaaagtgaaaccagccacggagacgctggcccacgggctcggcctgcggtgtggcctgctttgctcaccagcgtcagccgctcatttccttctcatgaagtcccatctggtcatggggacgagggccgggagggcaccgggtagccttttcacacttggggattaggggagtgagaaaagatttgggccatgcatgcaaagtcaaagtttaaaattttatccttttcaaatagatgatataatatacctatacatgatataatatttgtatatatgaaatctctctatatttgtttaatttgagccattcaatctaaaccaatgtacaggtgtacaatgaaaaatttaaatgcttagttatttttcccaacacagtgtaaagtcaccctcctctgagagtgggatgtgcagagttttgatgttgcagctttgctcacttcctggcaagggcaggtcatgcctcaatttgtaatgggagtctggggtaagggtgggggttgaaagttgttatctttaaatacatgtacaaatcgttgtcaaaagtaacgttattaaaatagatttattatccctga

SEQ ID NO: 456421 - DNA, 2455 bp, Homo sapiens
atcctgagctggctttggcagagggttgaagcacagcttgtggccgccagcgctgccgactgtgccctgctccttgcctcagtgagggggccgctcttgccaggactgggctgcccagggctgtgtcttggccgccgggagcagccagggtgctgggagcacagcccccaatgcatcgcttcccgggcccccggggtgctaaagctgcgctgctcttctcccaacgcggacctgcttgaatgtgggggagggagcctgtctcctgtcatctgttacgcgtggcctcccgccccgcccgccgagctggctgcgcccctgccttcgccgctgccggagcagcccctggacagccccgcggcccccgcgctctctccatccggcctgggcctccagcctgggcccgagcgcaccagtttcaaagaagctggcaccgattccacccaaggtcccctttggccagccgggggctatggcagaccagtccgctggccagccgtccccagtcagcctgtcccccaccccgcccagcaccccgtcaccctatggactgagctaccctcaggggtactccttggcctcgggccagctctccccagctgcagctcctcccctggcctctccttctgtctttacaagcactttgagcaaatcgcggcccactcctaagccgcgacagagacctactctgccgcctcctcagcctcccacagtaaacctctcggcctctagtccacagtccacggaggcccccatgctagatggcatgtcccctggggaaagcatgtctacagctgtgtgacatgagtggcgcagttttggatacgtgtgagggggattttcaggatcttgtccactttgatattccctcgatccacatagagctcgggtcgacgctccgcctgagtcccctggagcacatgcggcgacactcagtaactgacaagagggactcggaggaggagtctgagagcaccgccctctgacatgacaccgcccatcctgcctcgcgtgtacatacatcacgggccctaggaacgccgccaggagcagcgtccatgagcttgccaagtgttctctgctggctctttcctgccactgccaacacgaggttggaatttggcagaaaattgtgatctccagtccgtgtggtgatgctggtggtgcaggttttgtttgttcctttcgggtggtgacttcggccttttgtttgacctttgccttttgactttgtgcctcttttgatccactttcagcctccatgccagaaaacacccacctctccatccaaggctggtcaggaacgtcctttgcagggtcggggtggtgcgggagaggctcactttgcctggttagacccaagggctgctaccttttccttggacggctcatgtcaggtcttgcaggatcagtttaatggccacagaaaggaagcaggacagcagggcccctctcacccacaactggaccaggtccaggattctagcagtcctggggcactgacctttgccagctacctgggggagggcttgccactggaaaacctttcaggccgcccccatcagtgggctccaaagtaaatggctgaaaacaaaaatgtttcacttcctaacagttttcctttttccactgtgtgactgaaagctcctatatcattttatatttctgaatctataaaacaaaacaaacaagcctgacagtgtctggaggagccaaaggtggcctccctgtccccaaatatattggctatatgagagtaattttacccctctacgtacctaaaggcacccagttcactagtctgtggggtcctggagcctgtctcttctttctggaggttcaaactgaatagcaataattacgttacccaaagcatgtggaggaaaagtgaaaccagccacggagacgctggcccacgggctcggcctgcggtgtggcctgctttgctcaccagcgtcagccgctcatttccttctcatgaagtcccatctggtcatggggacgagggccgggagggcaccgggtagccttttcacacttggggattaggggagtgagaaaagatttgggccatgcatgcaaagtcaaagtttaaaattttatccttttcaaatagatgatataatatacctatacatgatataatatttgtatatatgaaatctctctatatttgtttaatttgagccattcaatctaaaccaatgtacaggtgtacaatgaaaaatttaaatgcttagttatttttcccaacacagtgtaaagtcaccctcctctgagagtgggatgtgcagagttttgatgttgcagctttgctcacttcctggcaagggcaggtcatgcctcaatttgtaatgggagtctggggtaagggtgggggttgaaagttgttatctttaaatacatgtacaaatcgttgtcaaaagtaacgttattaaaatagatttattatccctga

SEQ ID NO: 456422 - DNA, 4745 bp, Homo sapiens
gactgggagcaggcagcccgggcggagcgggccggtgccgaggacggccccaggcattgctctgccccgggcattgcgcggcgcgcgtgagggggatgcggcaggaggcggcgcggcgggaggagtaggcggcggcgccctcgggagggagctgcgcgcgggccagacggcgcccggaggctccgcagtgccgccgccgtcgcccgggaggctccgcgcgggagccatgtaaccctgcggcgggctccgggctgctccgtccttccccagctcccgggctagcgcggcagcggggccacgatgaagaagcagttcaatcgcatgcgccagctggccaaccagacggtgggcagggctgaaaagacagaagttttgagtgaagaccttcttcaggtggagaagcgtctggagctggtgaaacaggtgtcccacagcacgcacaagaagctcaccgcatgtctgcagggccagcaaggggcagaggctgacaagcgctccaaaaagttgcctttgacaacactggctcagtgtctgatggaggggtcagctatcctgggagatgacacacttcttgggaagatgctgaaactctgtggagagacggaggacaagctggctcaggagctgatacattttgagttgcaagtagagagagacgtgattgagcccctgtttttgctggcggaggtggaaatcccaaatattcaaaagcagaggaaacacttagccaagttggtgctggacatggattcctcacgaaccaggtggcagcagacttccaagtcttcaggtttgtccagcagcttacagcctgcgggtgccaaggctgatgccctcagggaagaaatggaagaggctgccaacagagtggagatttgcagggaccagctctcagctgatatgtacagttttgtggccaaagaaattgactatgcaaactactttcaaacgctaatagaagtgcaagctgaataccacaggaagtccctgacactattgcaggctgtattgcctcagatcaaagcacaacaggaggcctgggtagagaagccttccttcgggaagccgctggaggagcacctcaccatcagcggccgggagatcgccttccccatcgaggcgtgtgtgaccatgctgcttgagtgtgggatgcaggaggagggactcttccgagtagccccctctgcctccaaactgaagaagctgaaagcggccctggactgctgcgtggtggatgtgcaggagtactcggcagacccccacgcaattgcaggagctttgaaatcttacctccgagagttgccagaacctcttatgacctttgaactctatgatgagtggatccaggcttccaatgtccaggagcaagacaagaagcttcaggctctatggaatgcttgtgaaaagttgcccaaggccaatcacaacaacatccgatacttgataaaatttttatccaagctgtcagaatatcaagatgtaaacaagatgactcccagtaatatggcaattgttttaggacccaacctcctatggccacaagcagaagggaacattacagagatgatgaccacagtgtcgctgcaaattgttgggatcattgaacctatcatccagcatgcagactggttcttccctggggagatagagttcaacattactggcaattatgggagtccagtacacgtgaaccataatgccaactacagctcaatgccctccccagacatggaccctgctgaccggcgccagcccgagcaggcccgccggcccctcagcgtcgccacggataatatgatgctggagttttacaaaaaggatggcatgggtgtgagggtcatggacacaaactgggtggctcgaagaggctcctcggccggtcggaaagtgtcctgcgccccgccctccatgcagcctcccgccccgcccgccgagctggctgcgcccctgccttcgccgctgccggagcagcccctggacagccccgcggcccccgcgctctctccatccggcctgggcctccagcctgggcccgagcgcaccagcacaacaaaaagcaaggaactttctccaggctctgcacagaaaggaagtccaggctccagccagggcacagcctgtgcagggactcaaccaggggctcaacctggagctcagccgggcgccagccccagccccagccagccgcctgcagaccagagtcctcacaccctccggaaagtttcaaagaagctggcaccgattccacccaaggtcccctttggccagccgggggctatggcagaccagtccgctggccagccgtccccagtcagcctgtcccccaccccgcccagcaccccgtcaccctatggactgagctaccctcaggggtactccttggcctcgggccagctctccccagctgcagctcctcccctggcctctccttctgtctttacaagcactttgagcaaatcgcggcccactcctaagccgcgacagagacctactctgccgcctcctcagcctcccacagtaaacctctcggcctctagtccacagtccacggaggcccccatgctagatggcatgtcccctggggaaagcatgtctacagctgtgtgacatgagtggcgcagttttggatacgtgtgagggggattttcaggatcttgtccactttgatattccctcgatccacatagagctcgggtcgacgctccgcctgagtcccctggagcacatgcggcgacactcagtaactgacaagagggactcggaggaggagtctgagagcaccgccctctgacatgacaccgcccatcctgcctcgcgtgtacatacatcacgggccctaggaacgccgccaggagcagcgtccatgagcttgccaagtgttctctgctggctctttcctgccactgccaacacgaggttggaatttggcagaaaattgtgatctccagtccgtgtggtgatgctggtggtgcaggttttgtttgttcctttcgggtggtgacttcggccttttgtttgacctttgccttttgactttgtgcctcttttgatccactttcagcctccatgccagaaaacacccacctctccatccaaggctggtcaggaacgtcctttgcagggtcggggtggtgcgggagaggctcactttgcctggttagacccaagggctgctaccttttccttggacggctcatgtcaggtcttgcaggatcagtttaatggccacagaaaggaagcaggacagcagggcccctctcacccacaactggaccaggtccaggattctagcagtcctggggcactgacctttgccagctacctgggggagggcttgccactggaaaacctttcaggccgcccccatcagtgggctccaaagtaaatggctgaaaacaaaaatgtttcacttcctaacagttttcctttttccactgtgtgactgaaagctcctatatcattttatatttctgaatctataaaacaaaacaaacaagcctgacagtgtctggaggagccaaaggtggcctccctgtccccaaatatattggctatatgagagtaattttacccctctacgtacctaaaggcacccagttcactagtctgtggggtcctggagcctgtctcttctttctggaggttcaaactgaatagcaataattacgttacccaaagcatgtggaggaaaagtgaaaccagccacggagacgctggcccacgggctcggcctgcggtgtggcctgctttgctcaccagcgtcagccgctcatttccttctcatgaagtcccatctggtcatggggacgagggccgggagggcaccgggtagccttttcacacttggggattaggggagtgagaaaagatttgggccatgcatgcaaagtcaaagtttaaaattttatccttttcaaatagatgatataatatacctatacatgatataatatttgtatatatgaaatctctctatatttgtttaatttgagccattcaatctaaaccaatgtacaggtgtacaatgaaaaatttaaatgcttagttatttttcccaacacagtgtaaagtcaccctcctctgagagtgggatgtgcagagttttgatgttgcagctttgctcacttcctggcaagggcaggtcatgcctcaatttgtaatgggagtctggggtaagggtgggggttgaaagttgttatctttaaatacatgtacaaatcgttgtcaaaagtaacgttattaaaatagatttattatccctgagcttggcatctgttcttgctttaataaacctgcggggacatggccgtcaatctcaaatgcacaccgggatggagcctgaaggtcaccacctgtgtaaagccaggtccctggctgatctctcgcttgcttgtcttttgagtttttaaagctcttctttttacattctcctgggtagggaatatacacaataaatactagattcaacttacttacttacttacttactttacttacttacttccttggaaaatgctctccatttgtcgagcactaatccacgtctgtaaatcccgcaaggaggacaatggaaaccagccccgtgtgccatttctcaaaaccttcgagggcaaagtgatcctcactcctctcagtatggaagcaacaacacagcaaatctattgtctccacttttacccagaaccaccagaagacttgcatttccctgaccaatgacaccagcccagccaggctctcactgattg

SEQ ID NO: 456423 - DNA, 4431 bp, Homo sapiens
gactgggagcaggcagcccgggcggagcgggccggtgccgaggacggccccaggcattgctctgccccgggcattgcgcggcgcgcgtgagggggatgcggcaggaggcggcgcggcgggaggagtaggcggcggcgccctcgggagggagctgcgcgcgggccagacggcgcccggaggctccgcagtgccgccgccgtcgcccgggaggctccgcgcgggagccatgtaaccctgcggcgggctccgggctgctccgtccttccccagctcccgggctagcgcggcagcggggccacgatgaagaagcagttcaatcgcatgcgccagctggccaaccagacggtgggcagggctgaaaagacagaagttttgagtgaagaccttcttcaggtggagaagcgtctggagctggtgaaacaggtgtcccacagcacgcacaagaagctcaccgcatgtctgcagggccagcaaggggcagaggctgacaagcgctccaaaaagttgcctttgacaacactggctcagtgtctgatggaggggtcagctatcctgggagatgacacacttcttgggaagatgctgaaactctgtggagagacggaggacaagctggctcaggagctgatacattttgagttgcaagtagagagagacgtgattgagcccctgtttttgctggcggaggtggaaatcccaaatattcaaaagcagaggaaacacttagccaagttggtgctggacatggattcctcacgaaccaggtggcagcagacttccaagtcttcaggtttgtccagcagcttacagcctgcgggtgccaaggctgatgccctcagggaagaaatggaagaggctgccaacagagtggagatttgcagggaccagctctcagctgatatgtacagttttgtggccaaagaaattgactatgcaaactactttcaaacgctaatagaagtgcaagctgaataccacaggaagtccctgacactattgcaggctgtattgcctcagatcaaagcacaacaggaggcctgggtagagaagccttccttcgggaagccgctggaggagcacctcaccatcagcggccgggagatcgccttccccatcgaggcgtgtgtgaccatgctgcttgagtgtgggatgcaggaggagggactcttccgagtagccccctctgcctccaaactgaagaagctgaaagcggccctggactgctgcgtggtggatgtgcaggagtactcggcagacccccacgcaattgcaggagctttgaaatcttacctccgagagttgccagaacctcttatgacctttgaactctatgatgagtggatccaggcttccaatgtccaggagcaagacaagaagcttcaggctctatggaatgcttgtgaaaagttgcccaaggccaatcacaacaacatccgatacttgataaaatttttatccaagctgtcagaatatcaagatgtaaacaagatgactcccagtaatatggcaattgttttaggacccaacctcctatggccacaagcagaagggaacattacagagatgatgaccacagtgtcgctgcaaattgttgggatcattgaacctatcatccagcatgcagactggttcttccctggggagatagagttcaacattactggcaattatgggagtccagtacacgtgaaccataatgccaactacagctcaatgccctccccagacatggaccctgctgaccggcgccagcccgagcaggcccgccggcccctcagcgtcgccacggataatatgatgctggagttttacaaaaaggatggcatgggtgtgagggtcatggacacaaactgggtggctcgaagaggctcctcggccggtcggaaagtgtcctgcgccccgccctccatgcagcctcccgccccgcccgccgagctggctgcgcccctgccttcgccgctgccggagcagcccctggacagccccgcggcccccgcgctctctccatccggcctgggcctccagcctgggcccgagcgcaccagcacaacaaaaagcaaggaactttctccaggctctgcacagaaaggaagtccaggctccagccagggcacagcctgtgcagggactcaaccaggggctcaacctggagctcagccgggcgccagccccagccccagccagccgcctgcagaccagagtcctcacaccctccggaaagtttcaaagaagctggcaccgattccacccaaggtcccctttggccagccgggggctatggcagaccagtccgctggccagccgtccccagtcagcctgtcccccaccccgcccagcaccccgtcaccctatggactgagctaccctcaggggtactccttggcctcgggccagctctccccagctgcagctcctcccctggcctctccttctgtctttacaagcactttgagcaaatcgcggcccactcctaagccgcgacagagacctactctgccgcctcctcagcctcccacagtaaacctctcggcctctagtccacagtccacggaggcccccatgctagatggcatgtcccctggggaaagcatgtctacagctgtgtgacatgagtggcgcagttttggatacgtgtgagggggattttcaggatcttgtccactttgatattccctcgatccacatagagctcgggtcgacgctccgcctgagtcccctggagcacatgcggcgacactcagtaactgacaagagggactcggaggaggagtctgagagcaccgccctctgacatgacaccgcccatcctgcctcgcgtgtacatacatcacgggccctaggaacgccgccaggagcagcgtccatgagcttgccaagtgttctctgctggctctttcctgccactgccaacacgaggttggaatttggcagaaaattgtgatctccagtccgtgtggtgatgctggtggtgcaggttttgtttgttcctttcgggtggtgacttcggccttttgtttgacctttgccttttgactttgtgcctcttttgatccactttcagcctccatgccagaaaacacccacctctccatccaaggctggtcaggaacgtcctttgcagggtcggggtggtgcgggagaggctcactttgcctggttagacccaagggctgctaccttttccttggacggctcatgtcaggtcttgcaggatcagtttaatggccacagaaaggaagcaggacagcagggcccctctcacccacaactggaccaggtccaggattctagcagtcctggggcactgacctttgccagctacctgggggagggcttgccactggaaaacctttcaggccgcccccatcagtgggctccaaagtaaatggctgaaaacaaaaatgtttcacttcctaacagttttcctttttccactgtgtgactgaaagctcctatatcattttatatttctgaatctataaaacaaaacaaacaagcctgacagtgtctggaggagccaaaggtggcctccctgtccccaaatatattggctatatgagagtaattttacccctctacgtacctaaaggcacccagttcactagtctgtggggtcctggagcctgtctcttctttctggaggttcaaactgaatagcaataattacgttacccaaagcatgtggaggaaaagtgaaaccagccacggagacgctggcccacgggctcggcctgcggtgtggcctgctttgctcaccagcgtcagccgctcatttccttctcatgaagtcccatctggtcatggggacgagggccgggagggcaccgggtagccttttcacacttggggattaggggagtgagaaaagatttgggccatgcatgcaaagtcaaagtttaaaattttatccttttcaaatagatgatataatatacctatacatgatataatatttgtatatatgaaatctctctatatttgtttaatttgagccattcaatctaaaccaatgtacaggtgtacaatgaaaaatttaaatgcttagttatttttcccaacacagtgtaaagtcaccctcctctgagagtgggatgtgcagagttttgatgttgcagctttgctcacttcctggcaagggcaggtcatgcctcaatttgtaatgggagtctggggtaagggtgggggttgaaagttgttatctttaaatacatgtacaaatcgttgtcaaaagtaacgttattaaaatagatttattatccctgaaaaaaaaaaaaaaaaaaaaaagaaacaaaaaaaaggggaaaaaaaaaaaaaaaaaaaaaaaaagttgtgtgggggagcaggggggcagaaaaaaggttttaaaaaaattgtgttgggggggggggcccaggggtgagaaaaaggggggaaagggggggcgaaaaaacg

SEQ ID NO: 456424 - DNA, 6265 bp, Homo sapiens
  misc_feature (3450)..(3450): n is a, c, g, or t
  misc_feature (4421)..(4421): n is a, c, g, or t
  misc_feature (4529)..(4529): n is a, c, g, or t
gactgggagcaggcagcccgggcggagcgggccggtgccgaggacggccccaggcattgctctgccccgggcattgcgcggcgcgcgtgagggggatgcggcaggaggcggcgcggcgggaggagtaggcggcggcgccctcgggagggagctgcgcgcgggccagacggcgcccggaggctccgcagtgccgccgccgtcgcccgggaggctccgcgcgggagccatgtaaccctgcggcgggctccgggctgctccgtccttccccagctcccgggctagcgcggcagcggggccacgatgaagaagcagttcaatcgcatgcgccagctggccaaccagacggtgggcagggctgaaaagacagaagttttgagtgaagaccttcttcaggtggagaagcgtctggagctggtgaaacaggtgtcccacagcacgcacaagaagctcaccgcatgtctgcagggccagcaaggggcagaggctgacaagcgctccaaaaagttgcctttgacaacactggctcagtgtctgatggaggggtcagctatcctgggagatgacacacttcttgggaagatgctgaaactctgtggagagacggaggacaagctggctcaggagctgatacattttgagttgcaagtagagagagacgtgattgagcccctgtttttgctggcggaggtggaaatcccaaatattcaaaagcagaggaaacacttagccaagttggtgctggacatggattcctcacgaaccaggtggcagcagacttccaagtcttcaggtttgtccagcagcttacagcctgcgggtgccaaggctgatgccctcagggaagaaatggaagaggctgccaacagagtggagatttgcagggaccagctctcagctgatatgtacagttttgtggccaaagaaattgactatgcaaactactttcaaacgctaatagaagtgcaagctgaataccacaggaagtccctgacactattgcaggctgtattgcctcagatcaaagcacaacaggaggcctgggtagagaagccttccttcgggaagccgctggaggagcacctcaccatcagcggccgggagatcgccttccccatcgaggcgtgtgtgaccatgctgcttgagtgtgggatgcaggaggagggactcttccgagtagccccctctgcctccaaactgaagaagctgaaagcggccctggactgctgcgtggtggatgtgcaggagtactcggcagacccccacgcaattgcaggagctttgaaatcttacctccgagagttgccagaacctcttatgacctttgaactctatgatgagtggatccaggcttccaatgtccaggagcaagacaagaagcttcaggctctatggaatgcttgtgaaaagttgcccaaggccaatcacaacaacatccgatacttgataaaatttttatccaagctgtcagaatatcaagatgtaaacaagatgactcccagtaatatggcaattgttttaggacccaacctcctatggccacaagcagaagggaacattacagagatgatgaccacagtgtcgctgcaaattgttgggatcattgaacctatcatccagcatgcagactggttcttccctggggagatagagttcaacattactggcaattatgggagtccagtacacgtgaaccataatgccaactacagctcaatgccctccccagacatggaccctgctgaccggcgccagcccgagcaggcccgccggcccctcagcgtcgccacggataatatgatgctggagttttacaaaaaggatggcatgggtgtgagggtcatggacacaaactgggtggctcgaagaggctcctcggccggtcggaaagtgtcctgcgccccgccctccatgcagcctcccgccccgcccgccgagctggctgcgcccctgccttcgccgctgccggagcagcccctggacagccccgcggcccccgcgctctctccatccggcctgggcctccagcctgggcccgagcgcaccagcacaacaaaaagcaaggaactttctccaggctctgcacagaaaggaagtccaggctccagccagggcacagcctgtgcagggactcaaccaggggctcaacctggagctcagccgggcgccagccccagccccagccagccgcctgcagaccagagtcctcacaccctccggaaagtttcaaagaagctggcaccgattccacccaaggtcccctttggccagccgggggctatggcagaccagtccgctggccagccgtccccagtcagcctgtcccccaccccgcccagcaccccgtcaccctatggactgagctaccctcaggggtactccttggcctcgggccagctctccccagctgcagctcctcccctggcctctccttctgtctttacaagcactttgagcaaatcgcggcccactcctaagccgcgacagagacctactctgccgcctcctcagcctcccacagtaaacctctcggcctctagtccacagtccacggaggcccccatgctagatggcatgtcccctggggaaagcatgtctacaggtaaccaagccacaggctccctcacttttttttatgaactttagtgaaatgtgcctaggggatggattgctagagttactgccagtgaacacattcctgcgtgctttgggatgactgggctggcaccaggggtagctcataagatctccttagaagcccaccaatggaaagcaaccctggaatccatgtgtcccacacaggggcttcttatgggatctctctcggtctaagcccaccagcctggggttctgtttttgctcttattatcgggggttgaagacactgagtcatttggagtggggcctcaggagaggctggaagctggttatgatcacaaaacagcatcaaaactcaggtatttcctggatagagcccaagcaactgacaggtataaatgcttatctggagaacaggggctaagaacccaagatgttttttactattactaaaataagccttgctagaaaaatatacttccagatagatatttagagaggggtgaatttcagaaaacatgcatgtctccattctcctccaccagactcccctccctggccaattccctgaggagctaattggacaaacccacaacgacttaatttagtttgggcttaaatttagaaacaaagacggagctctcttcccccagaaaaatctgtaagcacaaaatcgcaaacacacaccacgtttagccaaaaccattcattggctggaaggaacgggatgtttttggaacatctccccagacacttcaaccacataagattataaagtcaggggcctatttgtggtggctgctaaagtcatttgagcattttccttgttcagggagacaggcacagggttgagcngtgtcttgggctagagccaacccacttagtaaagtgcagtagcatggcggtgagctggagcatatgtgtacctagtgttgtcccaagtagcagaaggtgaggcagcttgggttggaacacacacaccacatacacacacacccactcacccatttcaaagaacagtgctgtcctaggatgcactgggacttttgtgataatgcacttttccctccacgtccttctccaaaagagtgatttatttcttccgtgattagacggaagcagtgaccctgtggggttcagctccgtgctgcctttgaaaaggctagtccaatttgcaagtgtttgtactgggtcagatttaaatattacggggaagagccatctggtgattcggcttctttatttttggatgtgattaatgttgaaggtacagctgctgtcatctaccccgaggcttattaaaaattaggcaaatttctccctggaaaatgcagtagcaccacgcccatcttggtgggtcttggtgctgaggtgtctcctgaaggagcccatgataggagggcacaggcttgctgccctcggggaaggtcacagctgcggaggagctgaaggtcacccgagccaggtctccagggctgctcctcccagtgtgtcacatctggtgactcttccagccaccccagggaagggacacaaggtagtgtcaatacataagcaatagaatgagcagaagatggccaggcacggtggctcacgcctgtaatcccagcactttgggaggccgaggagaattagttgggcatggtggcacgtgccactagtcccagctacttgggaggctgaggtaggagaattgcttgaacctgggaggtggagccgagattgtgccactgcattccagcctggcaacagagcgagactccatctcaaaaaaaaaaaaaaaaaaaaaaaaagaatgagcagaagatatcaatggagaagcaganaagagcagaaggagaggagaaattggggaacaaaagtgggcaacagaaggcctgggaggacagcacccccagggctctaagaagcggagtggctcatgttccatcttncaggtttaagaactcctgaccttcaggattcataatgtccctcgccctgtgcggaccctattttaatgtccttttggcagcagactgttgttttgtcccatacgttcaggtctctgagccagtgtagaatccatcatggtttgatgtggcccgtctgggactgtgatattggcatagcttttttttttttttgtgacgttcatgttttgtcgtgttgattcctttctccgaatcctatcattgtgttcttgcagctgtgtgacatgagtggcgcagttttggatacgtgtgagggggattttcagggtaagctggccccggcctcgcccctccaccccgctagctagccaggccagctgcccgctcctcccctccgctcctcgtctctgcatgtggctcagaccatttgcatggcagcttcactctccagccttccccggcctcagcaaggatgagttgatccatgagcttatttggctttggggcatccctggcctccttttctttcttttcattaggaggagctgggggagaacccagccagcccctttcccccaccttctctttcactggaatcacatctgcagctcctccccctccgccctccctcaggcttagaccgtggagctgtaacagatctgttcttcgtgtgagacttttgtgctggagacgcttgtgcccagcaccctgggggacatgcacctgctcacctttgtttaggaaggcgtcctgaggggaggtcataccaggtgcagcccagcacagggtccacaccacagcttggaccccattttctgtggccccgagtttgcaccagcagatctccccttccagacttagatcctaacgtctggcttcctccaggctgagactgctggcaaatcctaaagaatccatatcggagctcatcccgctccccttctccctcatcccaagtggatatggccagacagatcctttctatccaactcaataaaatttgggggagcatttatatcagtatctatttggtctcctcctcctataaagagtaaatcctcaaagcataactgagggaaaggcacgaaggaagccagaaggactttggtgtatttgcctcagtaagtaggggtggccaaagcaaaccaggtcttctccccgatttggcccatggtcctgcagagactaccgaggcgcaccaggatatctggtgctcacagacaggtctcctggcgggtgcttcccgagtgtcctggagacaagcagccactgtgtcccttttcccaggaatgctgatgagggcttctgcccctgaatcccattcccttgcatagtgactcctcccttgggggtgtctttaagggagcagcaaggataaaggtatgacagctcacacaagtgcttgttctgggcctgtctaaattcatcaccgccctgtattattcccatttgactgctgaggcacagggaaggtaggaaacttgtccaaggtcatgctcttcctgcctgacatatttgggatttttgaatctaagcaggggagcttggtgctcttacctgatagcgaaccctgcacagtgaggtgggccccgggccactcagcctcacacctgtgtagagacatgacccaagtagctggggaagggcagaggtgggtctgaggccacctgcttcagaggttgcagtgagccgagattgtgccattgcactccagtctgtgtgacaagagcgaaactccaccccccccaaaaaaaaaa

SEQ ID NO: 456425 - DNA, 677 bp, Homo sapiens
gaccagtggaatgatcaaagagaagaaatggcattatcaaaagagcaatagcacaatgtgtgcttggagcttgcttcagaataggggcacaagctgtagagatggatggaactaatttgcacatcactcctctacaccaactttgactttaactgtggtccaaatgtcaaaatctctggggaaatgactgacataggtgttcttttcaaacttacgcatttttcagagttgtggttgacaaatatgcaaatgcccatggaaagtttgtatcatatcaagtattaaaaaggagattaagcagtgtttaaggctctttctcacgtgatgtgttgacttatgcattagccactctccattggtttatgttttaccttggttgtatattttaccttgcacaggaccagctctcagctgatatgtacagttttgtggccaaagaaattgactatgcaaactactttcaaacggtaagtgcccagaaaggtgagattgcttaaaggctgttcgtaggagaagggaatgtgggcatggaattaagagtcccttaattgatcacatcatagaaaaaggtgggagctttgaccattttactagtgaaataaatcctgccatgctcctgatatggatttctccaaaaaccttagaataaaactcaatcccatccctcgggattattg

SEQ ID NO: 456426 - DNA, 4229 bp, Homo sapiens
gactgggagcaggcagcccgggcggagcgggccggtgccgaggacggccccaggcattgctctgccccgggcattgcgcggcgcgcgtgagggggatgcggcaggaggcggcgcggcgggaggagtaggcggcggcgccctcgggagggagctgcgcgcgggccagacggcgcccggaggctccgcagtgccgccgccgtcgcccgggaggctccgcgcgggagccatgtaaccctgcggcgggctccgggctgctccgtccttccccagctcccgggctagcgcggcagcggggccacgatgaagaagcagttcaatcgcatgcgccagctggccaaccagacggtgggcagggctgaaaagacagaagttttgagtgaagaccttcttcaggtggagaagcgtctggagctggtgaaacaggtgtcccacagcacgcacaagaagctcaccgcatgtctgcagggccagcaaggggcagaggctgacaagcgctccaaaaagttgcctttgacaacactggctcagtgtctgatggaggggtcagctatcctgggagatgacacacttcttgggaagatgctgaaactctgtggagagacggaggacaagctggctcaggagctgatacattttgagttgcaagtagagagagacgtgattgagcccctgtttttgctggcggaggtggaaatcccaaatattcaaaagcagaggaaacacttagccaagttggtgctggacatggattcctcacgaaccaggtggcagcagacttccaagtcttcaggtttgtccagcagcttacagcctgcgggtgccaaggctgatgccctcagggaagaaatggaagaggctgccaacagagtggagatttgcagggaccagctctcagctgatatgtacagttttgtggccaaagaaattgactatgcaaactactttcaaacgctaatagaagtgcaagctgaataccacaggaagtccctgacactattgcaggctgtattgcctcagatcaaagcacaacaggaggcctgggtagagaagccttccttcgggaagccgctggaggagcacctcaccatcagcggccgggagatcgccttccccatcgaggcgtgtgtgaccatgctgcttgagtgtgggatgcaggaggagggactcttccgagtagccccctctgcctccaaactgaagaagctgaaagcggccctggactgctgcgtggtggatgtgcaggagtactcggcagacccccacgcaattgcaggagctttgaaatcttacctccgagagttgccagaacctcttatgacctttgaactctatgatgagtggatccaggcttccaatgtccaggagcaagacaagaagcttcaggctctatggaatgcttgtgaaaagttgcccaaggccaatcacaacaacatccgatacttgataaaatttttatccaagctgtcagaatatcaagatgtaaacaagatgactcccagtaatatggcaattgttttaggacccaacctcctatggccacaagcagaagggaacattacagagatgatgaccacagtgtcgctgcaaattgttgggatcattgaacctatcatccagcatgcagactggttcttccctggggagatagagttcaacattactggcaattatgggagtccagtacacgtgaaccataatgccaactacagctcaatgccctccccagacatggaccctgctgaccggcgccagcccgagcaggcccgccggcccctcagcgtcgccacggataatatgatgctggagttttacaaaaaggatggccttaggaaaatccaaagcatgggtgtgagggtcatggacacaaactgggtggctcgaagaggctcctcggccggtcggaaagtgtcctgcgccccgccctccatgcagcctcccgccccgcccgccgagctggctgcgcccctgccttcgccgctgccggagcagcccctggacagccccgcggcccccgcgctctctccatccggcctgggcctccagcctgggcccgagcgcaccagcacaacaaaaagcaaggaactttctccaggctctgcacagaaaggaagtccaggctccagccagggcacagcctgtgcagggactcaaccaggggctcaacctggagctcagccgggcgccagccccagccccagccagccgcctgcagaccagagtcctcacaccctccggaaagtttcaaagaagctggcaccgattccacccaaggtcccctttggccagccgggggctatggcagaccagtccgctggccagccgtccccagtcagcctgtcccccaccccgcccagcaccccgtcaccctatggactgagctaccctcaggggtactccttggcctcgggccagctctccccagctgcagctcctcccctggcctctccttctgtctttacaagcactttgagcaaatcgcggcccactcctaagccgcgacagagacctactctgccgcctcctcagcctcccacagtaaacctctcggcctctagtccacagtccacggaggcccccatgctagatggcatgtcccctggggaaagcatgtctacagatcttgtccactttgatattccctcgatccacatagagctcgggtcgacgctccgcctgagtcccctggagcacatgcggcgacactcagtaactgacaagagggactcggaggaggagtctgagagcaccgccctctgacatgacaccgcccatcctgcctcgcgtgtacatacatcacgggccctaggaacgccgccaggagcagcgtccatgagcttgccaagtgttctctgctggctctttcctgccactgccaacacgaggttggaatttggcagaaaattgtgatctccagtccgtgtggtgatgctggtggtgcaggttttgtttgttcctttcgggtggtgacttcggccttttgtttgacctttgccttttgactttgtgcctcttttgatccactttcagcctccatgccagaaaacacccacctctccatccaaggctggtcaggaacgtcctttgcagggtcggggtggtgcgggagaggctcactttgcctggttagacccaagggctgctaccttttccttggacggctcatgtcaggtcttgcaggatcagtttaatggccacagaaaggaagcaggacagcagggcccctctcacccacaactggaccaggtccaggattctagcagtcctggggcactgacctttgccagctacctgggggagggcttgccactggaaaacctttcaggccgcccccatcagtgggctccaaagtaaatggctgaaaacaaaaatgtttcacttcctaacagttttcctttttccactgtgtgactgaaagctcctatatcattttatatttctgaatctataaaacaaaacaaacaagcctgacagtgtctggaggagccaaaggtggcctccctgtccccaaatatattggctatatgagagtaattttacccctctacgtacctaaaggcacccagttcactagtctgtggggtcctggagcctgtctcttctttctggaggttcaaactgaatagcaataattacgttacccaaagcatgtggaggaaaagtgaaaccagccacggagacgctggcccacgggctcggcctgcggtgtggcctgctttgctcaccagcgtcagccgctcatttccttctcatgaagtcccatctggtcatggggacgagggccgggagggcaccgggtagccttttcacacttggggattaggggagtgagaaaagatttgggccatgcatgcaaagtcaaagtttaaaattttatccttttcaaatagatgatataatatacctatacatgatataatatttgtatatatgaaatctctctatatttgtttaatttgagccattcaatctaaaccaatgtacaggtgtacaatgaaaaatttaaatgcttagttatttttcccaacacagtgtaaagtcaccctcctctgagagtgggatgtgcagagttttgatgttgcagctttgctcacttcctggcaagggcaggtcatgcctcaatttgtaatgggagtctggggtaagggtgggggttgaaagttgttatctttaaatacatgtacaaatcgttgtcaaaagtaacgttattaaaatagatttattatccctga

SEQ ID NO: 456427 - DNA, 4615 bp, Homo sapiens
  misc_feature (1271)..(1271): n is a, c, g, or t
  misc_feature (2242)..(2242): n is a, c, g, or t
  misc_feature (2350)..(2350): n is a, c, g, or t
  misc_feature (4427)..(4427): n is a, c, g, or t
acaactttgtgttttgttgttgtgttgtgttttctctttcagtttcaaagaagctggcaccgattccacccaaggtcccctttggccagccgggggctatggcagaccagtccgctggccagccgtccccagtcagcctgtcccccaccccgcccagcaccccgtcaccctatggactgagctaccctcaggggtactccttggcctcgggccagctctccccagctgcagctcctcccctggcctctccttctgtctttacaagcactttgagcaaatcgcggcccactcctaagccgcgacagagacctactctgccgcctcctcagcctcccacagtaaacctctcggcctctagtccacagtccacggaggcccccatgctagatggcatgtcccctggggaaagcatgtctacaggtaaccaagccacaggctccctcacttttttttatgaactttagtgaaatgtgcctaggggatggattgctagagttactgccagtgaacacattcctgcgtgctttgggatgactgggctggcaccaggggtagctcataagatctccttagaagcccaccaatggaaagcaaccctggaatccatgtgtcccacacaggggcttcttatgggatctctctcggtctaagcccaccagcctggggttctgtttttgctcttattatcgggggttgaagacactgagtcatttggagtggggcctcaggagaggctggaagctggttatgatcacaaaacagcatcaaaactcaggtatttcctggatagagcccaagcaactgacaggtataaatgcttatctggagaacaggggctaagaacccaagatgttttttactattactaaaataagccttgctagaaaaatatacttccagatagatatttagagaggggtgaatttcagaaaacatgcatgtctccattctcctccaccagactcccctccctggccaattccctgaggagctaattggacaaacccacaacgacttaatttagtttgggcttaaatttagaaacaaagacggagctctcttcccccagaaaaatctgtaagcacaaaatcgcaaacacacaccacgtttagccaaaaccattcattggctggaaggaacgggatgtttttggaacatctccccagacacttcaaccacataagattataaagtcaggggcctatttgtggtggctgctaaagtcatttgagcattttccttgttcagggagacaggcacagggttgagcngtgtcttgggctagagccaacccacttagtaaagtgcagtagcatggcggtgagctggagcatatgtgtacctagtgttgtcccaagtagcagaaggtgaggcagcttgggttggaacacacacaccacatacacacacacccactcacccatttcaaagaacagtgctgtcctaggatgcactgggacttttgtgataatgcacttttccctccacgtccttctccaaaagagtgatttatttcttccgtgattagacggaagcagtgaccctgtggggttcagctccgtgctgcctttgaaaaggctagtccaatttgcaagtgtttgtactgggtcagatttaaatattacggggaagagccatctggtgattcggcttctttatttttggatgtgattaatgttgaaggtacagctgctgtcatctaccccgaggcttattaaaaattaggcaaatttctccctggaaaatgcagtagcaccacgcccatcttggtgggtcttggtgctgaggtgtctcctgaaggagcccatgataggagggcacaggcttgctgccctcggggaaggtcacagctgcggaggagctgaaggtcacccgagccaggtctccagggctgctcctcccagtgtgtcacatctggtgactcttccagccaccccagggaagggacacaaggtagtgtcaatacataagcaatagaatgagcagaagatggccaggcacggtggctcacgcctgtaatcccagcactttgggaggccgaggagaattagttgggcatggtggcacgtgccactagtcccagctacttgggaggctgaggtaggagaattgcttgaacctgggaggtggagccgagattgtgccactgcattccagcctggcaacagagcgagactccatctcaaaaaaaaaaaaaaaaaaaaaaaaagaatgagcagaagatatcaatggagaagcaganaagagcagaaggagaggagaaattggggaacaaaagtgggcaacagaaggcctgggaggacagcacccccagggctctaagaagcggagtggctcatgttccatcttncaggtttaagaactcctgaccttcaggattcataatgtccctcgccctgtgcggaccctattttaatgtccttttggcagcagactgttgttttgtcccatacgttcaggtctctgagccagtgtagaatccatcatggtttgatgtggcccgtctgggactgtgatattggcatagcttttttttttttttgtgacgttcatgttttgtcgtgttgattcctttctccgaatcctatcattgtgttcttgcagctgtgtgacatgagtggcgcagttttggatacgtgtgagggggattttcagggtaagctggccccggcctcgcccctccaccccgctagctagccaggccagctgcccgctcctcccctccgctcctcgtctctgcatgtggctcagaccatttgcatggcagcttcactctccagccttccccggcctcagcaaggatgagttgatccatgagcttatttggctttggggcatccctggcctccttttctttcttttcattaggaggagctgggggagaacccagccagcccctttcccccaccttctctttcactggaatcacatctgcagctcctccccctccgccctccctcaggcttagaccgtggagctgtaacagatctgttcttcgtgtgagacttttgtgctggagacgcttgtgcccagcaccctgggggacatgcacctgctcacctttgtttaggaaggcgtcctgaggggaggtcataccaggtgcagcccagcacagggtccacaccacagcttggaccccattttctgtggccccgagtttgcaccagcagatctccccttccagacttagatcctaacgtctggcttcctccaggctgagactgctggcaaatcctaaagaatccatatcggagctcatcccgctccccttctccctcatcccaagtggatatggccagacagatcctttctatccaactcaataaaatttgggggagcatttatatcagtatctatttggtctcctcctcctataaagagtaaatcctcaaagcataactgagggaaaggcacgaaggaagccagaaggactttggtgtatttgcctcagtaagtaggggtggccaaagcaaaccaggtcttctccccgatttggcccatggtcctgcagagactaccgaggcgcaccaggatatctggtgctcacagacaggtctcctggcgggtgcttcccgagtgtcctggagacaagcagccactgtgtcccttttcccaggaatgctgatgagggcttctgcccctgaatcccattcccttgcatagtgactcctcccttgggggtgtctttaagggagcagcaaggataaaggtatgacagctcacacaagtgcttgttctgggcctgtctaaattcatcaccgccctgtattattcccatttgactgctgaggcacagggaaggtaggaaacttgtccaaggtcatgctcttcctgcctgacatatttgggatttttgaatctaagcaggggagcttggtgctcttacctgatagcgaaccctgcacagtgaggtgggccccgggccactcagcctcacacctgtgtagagacatgacccaagtagctggggaagggcagaggtgggtctgaggccacctgcttcagaggaacaagtggcactggctgttcctccagccccacgccccaaatctctgcttctccatcaggcagcaaaacaaagactggaaggacgtgagggctgcctgggggttggggcaagggaggacctttgttcaagagcttccatgtttgtatgatgtctttcaggacagtgtccaaatgtatgtctgtacacttagtatggtattccccagtctgaacatgtgttcccttcctctgcctcctggagtgctgctcccagccttgcaaagctaagtgacggccagaaactaagcaggcaggccgggcgtggttgctcacgcctgtaatcccaaaactttgggaggctgaagtgggtgaatcacctgaggtcatgagttcgagaccagcctggccaacatggtgaaacccaatctctactaaaaacnccaaaaaaaaaaaaaaaaaaaaaattagccgggcatggtggtgggtgcctgtaatcccagctactcgggaggctgaggcaggagaatcgcttgaacccaggaggcagaggttgcagtgagccgagattgtgccattgcactccagtctgtgtgacaagagcgaaactccaccccccccaaaaaaaaaa

SEQ ID NO: 456428 - DNA, 4136 bp, Homo sapiens
gactgggagcaggcagcccgggcggagcgggccggtgccgaggacggccccaggcattgctctgccccgggcattgcgcggcgcgcgtgagggggatgcggcaggaggcggcgcggcgggaggagtaggcggcggcgccctcgggagggagctgcgcgcgggccagacggcgcccggaggctccgcagtgccgccgccgtcgcccgggaggctccgcgcgggagccatgtaaccctgcggcgggctccgggctgctccgtccttccccagctcccgggctagcgcggcagcggggccacgatgaagaagcagttcaatcgcatgcgccagctggccaaccagacggtgggcagggctgaaaagacagaagttttgagtgaagaccttcttcaggtggagaagcgtctggagctggtgaaacaggtgtcccacagcacgcacaagaagctcaccgcatgtctgcagggccagcaaggggcagaggctgacaagcgctccaaaaagttgcctttgacaacactggctcagtgtctgatggaggggtcagctatcctgggagatgacacacttcttgggaagatgctgaaactctgtggagagacggaggacaagctggctcaggagctgatacattttgagttgcaagtagagagagacgtgattgagcccctgtttttgctggcggaggtggaaatcccaaatattcaaaagcagaggaaacacttagccaagttggtgctggacatggattcctcacgaaccaggtggcagcagacttccaagtcttcaggtttgtccagcagcttacagcctgcgggtgccaaggctgatgccctcagggaagaaatggaagaggctgccaacagagtggagatttgcagggaccagctctcagctgatatgtacagttttgtggccaaagaaattgactatgcaaactactttcaaacgctaatagaagtgcaagctgaataccacaggaagtccctgacactattgcaggctgtattgcctcagatcaaagcacaacaggaggcctgggtagagaagccttccttcgggaagccgctggaggagcacctcaccatcagcggccgggagatcgccttccccatcgaggcgtgtgtgaccatgctgcttgagtgtgggatgcaggaggagggactcttccgagtagccccctctgcctccaaactgaagaagctgaaagcggccctggactgctgcgtggtggatgtgcaggagtactcggcagacccccacgcaattgcaggagctttgaaatcttacctccgagagttgccagaacctcttatgacctttgaactctatgatgagtggatccaggcttccaatgtccaggagcaagacaagaagcttcaggctctatggaatgcttgtgaaaagttgcccaaggccaatcacaacaacatccgatacttgataaaatttttatccaagctgtcagaatatcaagatgtaaacaagatgactcccagtaatatggcaattgttttaggacccaacctcctatggccacaagcagaagggaacattacagagatgatgaccacagtgtcgctgcaaattgttgggatcattgaacctatcatccagcatgcagactggttcttccctggggagatagagttcaacattactggcaattatgggagtccagtacacgtgaaccataatgccaactacagctcaatgccctccccagacatggaccctgctgaccggcgccagcccgagcaggcccgccggcccctcagcgtcgccacggataatatgatgctggagttttacaaaaaggatggcatgggtgtgagggtcatggacacaaactgggtggctcgaagaggctcctcggccggtcggaaagtgtcctgcgccccgccctccatgcagcctcccgccccgcccgccgagctggctgcgcccctgccttcgccgctgccggagcagcccctggacagccccgcggcccccgcgctctctccatccggcctgggcctccagcctgggcccgagcgcaccagcacaacaaaaagcaaggaactttctccaggctctgcacagaaaggaagtccaggctccagccagggcacagcctgtgcagggactcaaccaggggctcaacctggagctcagccgggcgccagccccagccccagccagccgcctgcagaccagagtcctcacaccctccggaaagtttcaaagaagctggcaccgattccacccaaggtcccctttggccagccgggggctatggcagaccagtccgctggccagccgtccccagtcagcctgtcccccaccccgcccagcaccccgtcaccctatggactgagctaccctcaggggtactccttggcctcgggccagctctccccagctgcagctcctcccctggcctctccttctgtctttacaagcactttgagcaaatcgcggcccactcctaagccgcgacagagacctactctgccgcctcctcagcctcccacagtaaacctctcggcctctagtccacagtccacggaggcccccatgctagatggcatgtcccctggggaaagcatgtctacagctgtgtgacatgagtggcgcagttttggatacgtgtgagggggattttcaggatcttgtccactttgatattccctcgatccacatagagctcgggtcgacgctccgcctgagtcccctggagcacatgcggcgacactcagtaactgacaagagggactcggaggaggagtctgagagcaccgccctctgacatgacaccgcccatcctgcctcgcgtgtacatacatcacgggccctaggaacgccgccaggagcagcgtccatgagcttgccaagtgttctctgctggctctttcctgccactgccaacacgaggttggaatttggcagaaaattgtgatctccagtccgtgtggtgatgctggtggtgcaggttttgtttgttcctttcgggtggtgacttcggccttttgtttgacctttgcctggttagacccaagggctgctaccttttccttggacggctcatgtcaggtcttgcaggatcagtttaatggccacagaaaggaagcaggacagcagggcccctctcacccacaactggaccaggtccaggattctagcagtcctggggcactgacctttgccagctacctgggggagggcttgccactggaaaacctttcaggccgcccccatcagtgggctccaaagtaaatggctgaaaacaaaaatgtttcacttcctaacagttttcctttttccactgtgtgactgaaagctcctatatcattttatatttctgaatctataaaacaaaacaaacaagcctgacagtgtctggaggagccaaaggtggcctccctgtccccaaatatattggctatatgagagtaattttacccctctacgtacctaaaggcacccagttcactagtctgtggggtcctggagcctgtctcttctttctggaggttcaaactgaatagcaataattacgttacccaaagcatgtggaggaaaagtgaaaccagccacggagacgctggcccacgggctcggcctgcggtgtggcctgctttgctcaccagcgtcagccgctcatttccttctcatgaagtcccatctggtcatggggacgagggccgggagggcaccgggtagccttttcacacttggggattaggggagtgagaaaagatttgggccatgcatgcaaagtcaaagtttaaaattttatccttttcaaatagatgatataatatacctatacatgatataatatttgtatatatgaaatctctctatatttgtttaatttgagccattcaatctaaaccaatgtacaggtgtacaatgaaaaatttaaatgcttagttatttttcccaacacagtgtaaagtcaccctcctctgagagtgggatgtgcagagttttgatgttgcagctttgctcacttcctggcaagggcaggtcatgcctcaatttgtaatgggagtctggggtaagggtgggggttgaaagttgttatctttaaatacatgtacaaatcgttgtcaaaagtaacgttattaaaatagatttattatccctga

SEQ ID NO: 456429 - DNA, 3961 bp, Homo sapiens
gactgggagcaggcagcccgggcggagcgggccggtgccgaggacggccccaggcattgctctgccccgggcattgcgcggcgcgcgtgagggggatgcggcaggaggcggcgcggcgggaggagtaggcggcggcgccctcgggagggagctgcgcgcgggccagacggcgcccggaggctccgcagtgccgccgccgtcgcccgggaggctccgcgcgggagccatgtaaccctgcggcgggctccgggctgctccgtccttccccagctcccgggctagcgcggcagcggggccacgatgaagaagcagttcaatcgcatgcgccagctggccaaccagacggtgggcagggctgaaaagacagaagttttgagtgaagaccttcttcaggtggagaagcgtctggagctggtgaaacaggtgtcccacagcacgcacaagaagctcaccgcatgtctgcagggccagcaaggggcagaggctgacaagcgctccaaaaagttgcctttgacaacactggctcagtgtctgatggaggggtcagctatcctgggagatgacacacttcttgggaagatgctgaaactctgtggagagacggaggacaagctggctcaggagctgatacattttgagttgcaagtagagagagacgtgattgagcccctgtttttgctggcggaggtggaaatcccaaatattcaaaagcagaggaaacacttagccaagttggtgctggacatggattcctcacgaaccaggtggcagcagacttccaagtcttcaggtttgtccagcagcttacagcctgcgggtgccaaggctgatgccctcagggaagaaatggaagaggctgccaacagagtggagatttgcagggaccagctctcagctgatatgtacagttttgtggccaaagaaattgactatgcaaactactttcaaacgctaatagaagtgcaagctgaataccacaggaagtccctgacactattgcaggctgtattgcctcagatcaaagcacaacaggaggcctgggtagagaagccttccttcgggaagccgctggaggagcacctcaccatcagcggccgggagatcgccttccccatcgaggcgtgtgtgaccatgctgcttgagtgtgggatgcaggaggagggactcttccgagtagccccctctgcctccaaactgaagaagctgaaagcggccctggactgctgcgtggtggatgtgcaggagtactcggcagacccccacgcaattgcaggagctttgaaatcttacctccgagagttgccagaacctcttatgacctttgaactctatgatgagtggatccaggcttccaatgtccaggagcaagacaagaagcttcaggctctatggaatgcttgtgaaaagttgcccaaggccaatcacaacaacatccgatacttgataaaatttttatccaagctgtcagaatatcaagatgtaaacaagatgactcccagtaatatggcaattgttttaggacccaacctcctatggccacaagcagaagggaacattacagagatgatgaccacagtgtcgctgcaaattgttgggatcattgaacctatcatccagcatgcagactggttcttccctggggagatagagttcaacattactggcaattatgggagtccagtacacgtgaaccataatgccaactacagctcaatgccctccccagacatggaccctgctgaccggcgccagcccgagcaggcccgccggcccctcagcgtcgccacggataatatgatgctggagttttacaaaaaggatggcatgggtgtgagggtcatggacacaaactgggtggctcgaagaggctcctcggccggtcggaaagtgtcctgcgccccgccctccatgcagcctcccgccccgcccgccgagctggctgcgcccctgccttcgccgctgccggagcagcccctggacagccccgcggcccccgcgctctctccatccggcctgggcctccagcctgggcccgagcgcaccagcacaacaaaaagcaaggaactttctccaggctctgcacagaaaggaagtccaggctccagccagggcacagcctgtgcagggactcaaccaggggctcaacctggagctcagccgggcgccagccccagccccagccagccgcctgcagaccagagtcctcacaccctccggaaagtttcaaagaagctggcaccgattccacccaaggtcccctttggccagccgggggctatggcagaccagtccgctggccagccgtccccagtcagcctgtcccccaccccgcccagcaccccgtcaccctatggactgagctaccctcaggggtactccttggcctcgggccagctctccccagctgcagctcctcccctggcctctccttctgtctttacaagcactttgagcaaatcgcggcccactcctaagccgcgacagagacctactctgccgcctcctcagcctcccacagtaaacctctcggcctctagtccacagtccacggaggcccccatgctagatggcatgtcccctggggaaagcatgtctacagctgtgtgacatgagtggcgcagttttggatacgtgtgagggggattttcaggatcttgtccactttgatattccctcgatccacatagagctcgggtcgacgctccgcctgagtcccctggagcacatgcggcgacactcagtaactgacaagagggactcggaggaggagtctgagagcaccgccctctgacatgacaccgcccatcctgcctcgcgtgtacatacatcacgggccctaggaacgccgccaggagcagcgtccatgagcttgccaagtgttctctgctggctctttcctgccactgccaacacgaggttggaatttggcagaaaattgtgatctccagtccgtgtggtgatgctggtggtgcaggttttgtttgttcctttcgggtggtgacttcggccttttgtttgacctttgccttttgactttgtgcctcttttgatccactttcagcctccatgccagaaaacacccacctctccatccaaggctggtcaggaacgtcctttgcagggtcggggtggtgcgggagaggctcactttgcctggttagacccaagggctgctaccttttccttggacggctcatgtcaggtcttgcaggatcagtttaatggcctccctgtccccaaatatattggctatatgagagtaattttacccctctacgtacctaaaggcacccagttcactagtctgtggggtcctggagcctgtctcttctttctggaggttcaaactgaatagcaataattacgttacccaaagcatgtggaggaaaagtgaaaccagccacggagacgctggcccacgggctcggcctgcggtgtggcctgctttgctcaccagcgtcagccgctcatttccttctcatgaagtcccatctggtcatggggacgagggccgggagggcaccgggtagccttttcacacttggggattaggggagtgagaaaagatttgggccatgcatgcaaagtcaaagtttaaaattttatccttttcaaatagatgatataatatacctatacatgatataatatttgtatatatgaaatctctctatatttgtttaatttgagccattcaatctaaaccaatgtacaggtgtacaatgaaaaatttaaatgcttagttatttttcccaacacagtgtaaagtcaccctcctctgagagtgggatgtgcagagttttgatgttgcagctttgctcacttcctggcaagggcaggtcatgcctcaatttgtaatgggagtctggggtaagggtgggggttgaaagttgttatctttaaatacatgtacaaatcgttgtcaaaagtaacgttattaaaatagatttattatccctga

SEQ ID NO: 456430 - DNA, 1114 bp, Homo sapiens
gactgggagcaggcagcccgggcggagcgggccggtgccgaggacggccccaggcattgctctgccccgggcattgcgcggcgcgcgtgagggggatgcggcaggaggcggcgcggcgggaggagtaggcggcggcgccctcgggagggagctgcgcgcgggccagacggcgcccggaggctccgcagtgccgccgccgtcgcccgggaggctccgcgcgggagccatgtaaccctgcggcgggctccgggctgctccgtccttccccagctcccgggctagcgcggcagcggggccacgatgaagaagcagttcaatcgcatgcgccagctggccaaccagacggtgggcagggctgaaaagacagaagttttgagtgaagaccttcttcaggtggagaagcgtctggagctggtgaaacaggtgtcccacagcacgcacaagaagctcaccgcatgtctgcagggccagcaaggggcagaggctgacaagcgctccaaaaagttgcctttgacaacactggctcagtgtctgatggaggggtcagctatcctgggagatgacacacttcttgggaagatgctgaaactctgtggagagacggaggacaagctggctcaggagctgatacattttgagttgcaagtagagagagacgtgattgagcccctgtttttgctggcggaggtggaaatcccaaatattcaaaagcagaggaaacacttagccaagttggtgctggacatggattcctcacgaaccaggtggcagcagacttccaagtcttcaggtttgtccagcagcttacagcctgcgggtgccaaggctgatgccctcagggaagaaatggaagaggctgccaacagagtggagatttgcagggtacctgccctctttgctcctctctactgggacaggctggggagccctcagggattccctttttgttcactggagttctcttaaaactctgtcagtgaggctctagttgaactgaatgtccccaagcccgccggctagcatctccaaggagtccaggatgaacccaaggagttggggctttgatggtgacctagacagggaggcagcattcatttatcattggtggtcctgc

SEQ ID NO: 456431 - DNA, 3291 bp, Homo sapiens
cgggtggctggggcgcctccacctcctcttcctaaagcggcgaggcgcagaggagcggcatcactcgagcccaggtcccagccaccaccactcacagcgctcggcgttcaggaagaggagcagcagcggaggcggctgcttcagcggcgggcgggcgccagaaagaataacatagctgatccagaagaactgttcacaaaattagagcgcattgggaaaggctcatttggggaagttttcaaaggaattgataaccgtacccagcaagtcgttgctattaaaatcatagaccttgaggaagccgaagatgaaatagaagacattcagcaagaaataactgtcttgagtcaatgtgacagctcatatgtaacaaaatactatgggtcatatttaaaggggtctaaattatggataataatggaatacctgggcggtggttcagcactggatcttcttcgagctggtccatttgatgagttccagattgctaccatgctaaaggaaattttaaaaggtctggactatctgcattcagaaaagaaaattcaccgagacataaaagctgccaatgtcttgctctcagaacaaggagatgttaaacttgctgattttggagttgctggtcagctgacagatacacagattaaaagaaatacctttgtgggaactccattttggatggctcctgaagttattcaacagtcagcttatgactcaaaagctgacatttggtcattgggaattactgctattgaactagccaagggagagccacctaactccgatatgcatccaatgagagttctgtttcttattcccaaaaacaatcctccaactcttgttggagactttactaagtcttttaaggagtttattgatgcttgcctgaacaaagatccatcatttcgtcctacagcaaaagaacttctgaaacacaaattcattgtaaaaaattcaaagaagacttcttatctgactgaactgatagatcgttttaagagatggaaggcagaaggacacagtgatgatgaatctgattccgagggctctgattcggaatctaccagcagggaaaacaatactcatcctgaatggagctttaccaccgtacgaaagaagcctgatccaaagaaagtacagaatggggcagagcaagatcttgtgcaaaccctgagttgtttgtctatgataatcacacctgcatttgctgaacttaaacagcaggacgagaataacgctagcaggaatcaggcgattgaagaactcgagaaaagtattgctgtggctgaagccgcctgtcccggcatcacagataaaatggtgaagaaactaattgaaaaatttcaaaagtgttcagcagacgaatccccctaagaaacttattattggcttctgtttcatatggacccagagagccccaccaaacctacgtcaagattaacaatgcttaacccatgagctccatgtgccttttggatctttgcaacactgaagatttggaagaagctattaaactattttgtgatggcgtttatcattttatattttgaaaggattattttgtaaggaataacttttaatactatagtttcacctgtattctagtaaatgttgagacaccgttttgcttttaagtatccctatttcttaagttacgaggatgaatacctttcacattttgatctttagttgactctacagtcatgaaacatacaggtctttcaaagtcattctcaatattcagcttttgtaaattatcaagcttcaaaaagctttttttttaaaaaaaaaacatgcatattctaaaaatgactattggtggggaggtgtaaataagtcataccttcttaaaacagaaaatttaagtaaagtcttttaaatgaaacctgtaaaagtattgactcttctaccaagttggtatgatattccaggcagctcaatgattatcacatttgagaccctgtgtttgaagcatttacaggcaatgtacagcaacagaggtacctcttggtgtatagtatttacattctcttttaggtagaagaggcaattttacccttatttcacatggttagaaatttaaagcaagatcatttacccaaggataggtgtttggtaatgttgaaggagttagtctggcttcatgttttacatcttcaactaaaatcccatactatctgcttggatttggagagccaaaaaataaagctgattgtcatgtgattaaatatctgatcaacaggtatgaatataacttaaatcagcatatttttgccatggtaataaattgtcctataaactatttatatatttttgttcttcataattatcactaataagcatcagtttgttgtttttaaaaggatatttaagtgagcattttctagttcatatgaaaataaccatagtacaggatgatttctgtccacacaaaggttaaattagattgcacagttaattttcacttatatttatggtactattatgtgggtgatgcctttttcttttaagcccagtacatatattatgcctgcctaagttctgaactggggctgtatttcagtagttgtagaattattgatatttagttttgatagctaatgtttaattgtttggatctgcacagtttggtttttgcacaaaagtcatttaaaaaaatctgagtaattgtcaaatattaaaagaaagatattcttcctgtaaggaatacagtttttagtcaaagtggccattacatcctctttttaatttacataatacagatacttgagaaagttgttgtggtgttgtatgccaagaaaattctttttattggtgcctatattgtaacaattatttttaatgcattgtattttgaagtaacggttcagttaaatttttcacctgctgtgtaactgaaacacaattacagtttataatcatctgtagaagtctggagataattttgcaactcatgttatgggttaaatgaatatttttgtaaaagtaaaagcaacaaatttataaattgattatttgaaactttacaacacaattgcatcccaaatacaaattgtattgcttattcattatagctattcgtcctgtaatctgtttctaggtgaagcatactccagtgttttaggggttttgaaaataaatatttaaatttcacagtcaaaaaaaaacacaaaaacgatataaaacaacatctttgtggcctctgggccccaaagagactttcaacaccatctcttgggacgcgggcccaaagtggagggacacaaatggcgcaaagggcgccaaaagacg

SEQ ID NO: 456432 - DNA, 3257 bp, Homo sapiens
cgggtggctggggcgcctccacctcctcttcctaaagcggcgaggcgcagaggagcggcatcactcgagcccaggtcccagccaccaccactcacagcgctcggcgttcaggaagaggagcagcagcggaggcggctgcttcagcggcgggcgggcgccagaaaggccccgatcgaaaagcctgggagggccgccgaactacccccggagggaggagccagtccgaacccaaggcgccaccgccgcagaagcggagcgaggcagcattcgcctccatggcccactcgccggtggctgtccaagtgcctgggatgcagaataacatagctgatccagaagaactgttcacaaaattagagcgcattgggaaaggctcatttggggaagttttcaaaggaattgataaccgtacccagcaagtcgttgctattaaaatcatagaccttgaggaagccgaagatgaaatagaagacattcagcaagaaataactgtcttgagtcaatgtgacagctcatatgtaacaaaatactatgggtcatatttaaaggggtctaaattatggataataatggaatacctgggcggtggttcagcactggatcttcttcgagctggtccatttgatgagttccagattgctaccatgctaaaggaaattttaaaaggtctggactatctgcattcagaaaagaaaattcaccgagacataaaagctgccaatgtcttgctctcagaacaaggagatgttaaacttgctgattttggagttgctggtcagctgacagatacacagattaaaagaaatacctttgtgggaactccattttggatggctcctgaagttattcaacagtcagcttatgactcaaaacgtcctacagcaaaagaacttctgaaacacaaattcattgtaaaaaattcaaagaagacttcttatctgactgaactgatagatcgttttaagagatggaaggcagaaggacacagtgatgatgaatctgattccgagggctctgattcggaatctaccagcagggaaaacaatactcatcctgaatggagctttaccaccgtacgaaagaagcctgatccaaagaaagtacagaatggggcagagcaagatcttgtgcaaaccctgagttgtttgtctatgataatcacacctgcatttgctgaacttaaacagcaggacgagaataacgctagcaggaatcaggcgattgaagaactcgagaaaagtattgctgtggctgaagccgcctgtcccggcatcacagataaaatggtgaagaaactaattgaaaaatttcaaaagtgttcagcagacgaatccccctaagaaacttattattggcttctgtttcatatggacccagagagccccaccaaacctacgtcaagattaacaatgcttaacccatgagctccatgtgccttttggatctttgcaacactgaagatttggaagaagctattaaactattttgtgatggcgtttatcattttatattttgaaaggattattttgtaaggaataacttttaatactatagtttcacctgtattctagtaaatgttgagacaccgttttgcttttaagtatccctatttcttaagttacgaggatgaatacctttcacattttgatctttagttgactctacagtcatgaaacatacaggtctttcaaagtcattctcaatattcagcttttgtaaattatcaagcttcaaaaagctttttttttaaaaaaaaaacatgcatattctaaaaatgactattggtggggaggtgtaaataagtcataccttcttaaaacagaaaatttaagtaaagtcttttaaatgaaacctgtaaaagtattgactcttctaccaagttggtatgatattccaggcagctcaatgattatcacatttgagaccctgtgtttgaagcatttacaggcaatgtacagcaacagaggtacctcttggtgtatagtatttacattctcttttaggtagaagaggcaattttacccttatttcacatggttagaaatttaaagcaagatcatttacccaaggataggtgtttggtaatgttgaaggagttagtctggcttcatgttttacatcttcaactaaaatcccatactatctgcttggatttggagagccaaaaaataaagctgattgtcatgtgattaaatatctgatcaacaggtatgaatataacttaaatcagcatatttttgccatggtaataaattgtcctataaactatttatatatttttgttcttcataattatcactaataagcatcagtttgttgtttttaaaaggatatttaagtgagcattttctagttcatatgaaaataaccatagtacaggatgatttctgtccacacaaaggttaaattagattgcacagttaattttcacttatatttatggtactattatgtgggtgatgcctttttcttttaagcccagtacatatattatgcctgcctaagttctgaactggggctgtatttcagtagttgtagaattattgatatttagttttgatagctaatgtttaattgtttggatctgcacagtttggtttttgcacaaaagtcatttaaaaaaatctgagtaattgtcaaatattaaaagaaagatattcttcctgtaaggaatacagtttttagtcaaagtggccattacatcctctttttaatttacataatacagatacttgagaaagttgttgtggtgttgtatgccaagaaaattctttttattggtgcctatattgtaacaattatttttaatgcattgtattttgaagtaacggttcagttaaatttttcacctgctgtgtaactgaaacacaattacagtttataatcatctgtagaagtctggagataattttgcaactcatgttatgggttaaatgaatatttttgtaaaagtaaaagcaacaaatttataaattgattatttgaaactttacaacacaattgcatcccaaatacaaattgtattgcttattcattatagctattcgtcctgtaatctgtttctaggtgaagcatactccagtgttttaggggttttgaaaataaatatttaaatttcacagtcaaaaaaaaacacaaaaacgatataaaacaacatctttgtggcctctgggccccaaagagactttcaacaccatctcttgggacgcgggcccaaagtggagggacacaaatggcgcaaagggcgccaaaagacg

SEQ ID NO: 456433 - DNA, 3349 bp, Homo sapiens
cgggtggctggggcgcctccacctcctcttcctaaagcggcgaggcgcagaggagcggcatcactcgagcccaggtcccagccaccaccactcacagcgctcggcgttcaggaagaggagcagcagcggaggcggctgcttcagcggcgggcgggcgccagaaaggccccgatcgaaaagcctgggagggccgccgaactacccccggagggaggagccagtccgaacccaaggcgccaccgccgcagaagcggagcgaggcagcattcgcctccatggcccactcgccggtggctgtccaagtgcctgggatgcagaataacatagctgatccagaagaactgttcacaaaattagagcgcattgggaaaggctcatttggggaagttttcaaaggaattgataaccgtacccagcaagtcgttgctattaaaatcatagaccttgaggaagccgaagatgaaatagaagacattcagcaagaaataactgtcttgagtcaatgtgacagctcatatgtaacaaaatactatgggtcatatttaaaggggtctaaattatggataataatggaatacctgggcggtggttcagcactggatcttcttcgagctggtccatttgatgagttccagattgctaccatgctaaaggaaattttaaaaggtctggactatctgcattcagaaaagaaaattcaccgagacataaaagctgccaatgtcttgctctcagaacaaggagatgttaaacttgctgattttggagttgctggtcagctgacagatacacagattaaaagaaatacctttgtgggaactccattttggatggctcctgaagttattcaacagtcagcttatgactcaaaagctgacatttggtcattgggaattactgctattgaactagccaagggagagccacctaactccgatatgcatccaatgagagttctgtttcttattcccaaaaacaatcctccaactcttgttggagactttactaagtcttttaaggagtttattgatgcttgcctgaacaaagatccatcatttcgtcctacagcaaaagaacttctgaaacacaaattcattgtaaaaaattcaaagaagacttcttatctgactgaactgatagatcgttttaagagatggaaggcagaaggacacagtgatgatgaatctgattccgagggctctgattcgagcaagatcttgtgcaaaccctgagttgtttgtctatgataatcacacctgcatttgctgaacttaaacagcaggacgagaataacgctagcaggaatcaggcgattgaagaactcgagaaaagtattgctgtggctgaagccgcctgtcccggcatcacagataaaatggtgaagaaactaattgaaaaatttcaaaagtgttcagcagacgaatccccctaagaaacttattattggcttctgtttcatatggacccagagagccccaccaaacctacgtcaagattaacaatgcttaacccatgagctccatgtgccttttggatctttgcaacactgaagatttggaagaagctattaaactattttgtgatggcgtttatcattttatattttgaaaggattattttgtaaggaataacttttaatactatagtttcacctgtattctagtaaatgttgagacaccgttttgcttttaagtatccctatttcttaagttacgaggatgaatacctttcacattttgatctttagttgactctacagtcatgaaacatacaggtctttcaaagtcattctcaatattcagcttttgtaaattatcaagcttcaaaaagctttttttttaaaaaaaaaacatgcatattctaaaaatgactattggtggggaggtgtaaataagtcataccttcttaaaacagaaaatttaagtaaagtcttttaaatgaaacctgtaaaagtattgactcttctaccaagttggtatgatattccaggcagctcaatgattatcacatttgagaccctgtgtttgaagcatttacaggcaatgtacagcaacagaggtacctcttggtgtatagtatttacattctcttttaggtagaagaggcaattttacccttatttcacatggttagaaatttaaagcaagatcatttacccaaggataggtgtttggtaatgttgaaggagttagtctggcttcatgttttacatcttcaactaaaatcccatactatctgcttggatttggagagccaaaaaataaagctgattgtcatgtgattaaatatctgatcaacaggtatgaatataacttaaatcagcatatttttgccatggtaataaattgtcctataaactatttatatatttttgttcttcataattatcactaataagcatcagtttgttgtttttaaaaggatatttaagtgagcattttctagttcatatgaaaataaccatagtacaggatgatttctgtccacacaaaggttaaattagattgcacagttaattttcacttatatttatggtactattatgtgggtgatgcctttttcttttaagcccagtacatatattatgcctgcctaagttctgaactggggctgtatttcagtagttgtagaattattgatatttagttttgatagctaatgtttaattgtttggatctgcacagtttggtttttgcacaaaagtcatttaaaaaaatctgagtaattgtcaaatattaaaagaaagatattcttcctgtaaggaatacagtttttagtcaaagtggccattacatcctctttttaatttacataatacagatacttgagaaagttgttgtggtgttgtatgccaagaaaattctttttattggtgcctatattgtaacaattatttttaatgcattgtattttgaagtaacggttcagttaaatttttcacctgctgtgtaactgaaacacaattacagtttataatcatctgtagaagtctggagataattttgcaactcatgttatgggttaaatgaatatttttgtaaaagtaaaagcaacaaatttataaattgattatttgaaactttacaacacaattgcatcccaaatacaaattgtattgcttattcattatagctattcgtcctgtaatctgtttctaggtgaagcatactccagtgttttaggggttttgaaaataaatatttaaatttcacagtcaaaaaaaaacacaaaaacgatataaaacaacatctttgtggcctctgggccccaaagagactttcaacaccatctcttgggacgcgggcccaaagtggagggacacaaatggcgcaaagggcgccaaaagacg

SEQ ID NO: 456434 - DNA, 3162 bp, Homo sapiens
cgggtggctggggcgcctccacctcctcttcctaaagcggcgaggcgcagaggagcggcatcactcgagcccaggtcccagccaccaccactcacagcgctcggcgttcaggaagaggagcagcagcggaggcggctgcttcagcggcgggcgggcgccagaaaggccccgatcgaaaagcctgggagggccgccgaactacccccggagggaggagccagtccgaacccaaggcgccaccgccgcagaagcggagcgaggcagcattcgcctccatggcccactcgccggtggctgtccaagtgcctgggatgcagaataacatagctgatccagaagaactgttcacaaaattagagcgcattgggaaaggctcatttggggaagttttcaaaggaattgataaccgtacccagcaagtcgttgctattaaaatcatagaccttgaggaagccgaagatgaaatagaagacattcagcaagaaataactgtcttgagtcaatgtgacagctcatatgtaacaaaatactatgggtcatatttaaaggggtctaaattatggataataatggaatacctgggcggtggttcagcactggatcttcttcgagctggtccatttgatgagttccagattgctaccatgctaaaggaaattttaaaaggtctggactatctgcattcagaaaagaaaattcaccgagacataaaagctgccaatgtcttgctctcagaacaaggagatgttaaacttgctgattttggagttgctggtcagctgacagatacacagattaaaagaaatacctttgtgggaactccattttggatggctcctgaagttattcaacagtcagcttatgactcaaaagctgacatttggtcattgggaattactgctattgaactagccaagggagagccacctaactccgatatgcatccaatgagagttctgtttcttattcccaaaaacaatcctccaactcttgttggagactttactaagtcttttaaggagtttattgatgcttgcctgaacaaagatccatcatttcgtcctacagcaaaagaacttctgaaacacaaattcattgtaaaaaattcaaagaagacttcttatctgactgaactgatagatcgttttaagagatggaaggcagaaggacacagtgatgatgaatctgattccgagggctctgattcggaatctaccagcagggaaaacaatactcatcctgaatggagctttaccaccgtacgaaagaagcctgatccaaagaaagtacagaatggggcagagcaagatcttgtgcaaaccctgagttgtttgtctatgataatcacacctgcatttgctgaacttaaacagcaggacgagaataacgctagcaggaatcaggcgattgaagaactcgagaaaagtattgctgtggctgaagccgcctgtcccggcatcacagataaaatggtgaagaaactaattgaaaaatttcaaaagtgttcagcagacgaatccccctaagaaacttattattggcttctgtttcatatggacccagagagccccaccaaacctacgtcaagattaacaatgcttaacccatgagctccatgtgccttttggatctttgcaacactgaagatttggaagaagctattaaactattttgtgatggcgtttatcattttatattttgaaaggattattttgtaaggaataacttttaatactatagtttcacctgtattctagtaaatgttgagacaccgttttgcttttaagtatccctatttcttaagttacgaggatgaatacctttcacattttgatctttagttgactctacagtcatgaaacatacaggtctttcaaagtcattctcaatattcagcttttgtaaattatcaagcttcaaaaagctttttttttaaaaaaaaaacatgcatattctaaaaatgactattggtggggaggtgtaaataagtcataccttcttaaaacagaaaatttaagtaaagtcttttaaatgaaacctgtaaaagtattgactcttctaccaagttggtatgatattccaggcagctcaatgattatcacatttgagaccctgtgtttgaagcatttacaggcaatgtacagcaacagaggtacctcttggtgtatagtatttacattctcttttaggtagaagaggcaattttacccttatttcacatggttagaaatttaaagcaagatcatttacccaaggataggtgtttggtaatgttgaaggagttagtctggcttcatgttttacatcttcaactaaaatcccatactatctgcttggatttggagagccaaaaaataaagctgattgtcatgtgattaaatatctgatcaacaggtatgaatataacttaaatcagcatatttttgccatggtaataaattgtcctataaactatttatatatttttgttcttcataattatcactaataagcatcagtttgttgtttttaaaaggatatttaagtgagcattttctagttcatatgaaaataaccatagtacaggatgatttctgtccacacaaaggttaaattagattgcacagttaattttcacttatatttatggtactattatgtgggtgatgcctttttcttttaagcccagtacatatattatgcctgcctaagttctgaactggggctgtatttcagtagttgtagaattattgatatttagttttgatagctaatgtttaattgtttggatctgcacagtttggttttatcctcggcgtgtgcatgcacacgccgaggccccacacacgaggctcttggcgatgttgaattcacaggtctctccccagtaccagtgtgtgttcgtatttgggcacaggcggcgggggccactgcgttgcagctgacatgtgcccaggttacagttcatttgcgacttcgttcctttggtgcacttgttcacacaggccagcttcccatccaagacatccacatagtagaactgggtatatccttcggcagccttctgggtgcattgctcctggaagtcaaagcccggagtcaccgatgaatccacgaaagtgtcctcttcactatagcacagtatggtcgttcggcgtgtgcagtttgtcgctcggcgtgtgc

SEQ ID NO: 456435 - DNA, 2104 bp, Homo sapiens
gattttttaacttgtttatattttaacatctacatgataagattcaatagaaacaatgtatcccttttgtggaatcagtttcttcattgcagagttcatacaaaggagaaatataaacatgcatagttgtacattggtttaaattttttaaaaattttataggtgttcagcagacgaatccccctaagaaacttattattggcttctgtttcatatggacccagagagccccaccaaacctacgtcaagattaacaatgcttaacccatgagctccatgtgccttttggatctttgcaacactgaagatttggaagaagctattaaactattttgtgatggcgtttatcattttatattttgaaaggattattttgtaaggaataacttttaatactatagtttcacctgtattctagtaaatgttgagacaccgttttgcttttaagtatccctatttcttaagttacgaggatgaatacctttcacattttgatctttagttgactctacagtcatgaaacatacaggtctttcaaagtcattctcaatattcagcttttgtaaattatcaagcttcaaaaagctttttttttaaaaaaaaaacatgcatattctaaaaatgactattggtggggaggtgtaaataagtcataccttcttaaaacagaaaatttaagtaaagtcttttaaatgaaacctgtaaaagtattgactcttctaccaagttggtatgatattccaggcagctcaatgattatcacatttgagaccctgtgtttgaagcatttacaggcaatgtacagcaacagaggtacctcttggtgtatagtatttacattctcttttaggtagaagaggcaattttacccttatttcacatggttagaaatttaaagcaagatcatttacccaaggataggtgtttggtaatgttgaaggagttagtctggcttcatgttttacatcttcaactaaaatcccatactatctgcttggatttggagagccaaaaaataaagctgattgtcatgtgattaaatatctgatcaacaggtatgaatataacttaaatcagcatatttttgccatggtaataaattgtcctataaactatttatatatttttgttcttcataattatcactaataagcatcagtttgttgtttttaaaaggatatttaagtgagcattttctagttcatatgaaaataaccatagtacaggatgatttctgtccacacaaaggttaaattagattgcacagttaattttcacttatatttatggtactattatgtgggtgatgcctttttcttttaagcccagtacatatattatgcctgcctaagttctgaactggggctgtatttcagtagttgtagaattattgatatttagttttgatagctaatgtttaattgtttggatctgcacagtttggtttttgcacaaaagtcatttaaaaaaatctgagtaattgtcaaatattaaaagaaagatattcttcctgtaaggaatacagtttttagtcaaagtggccattacatcctctttttaatttacataatacagatacttgagaaagttgttgtggtgttgtatgccaagaaaattctttttattggtgcctatattgtaacaattatttttaatgcattgtattttgaagtaacggttcagttaaatttttcacctgctgtgtaactgaaacacaattacagtttataatcatctgtagaagtctggagataattttgcaactcatgttatgggttaaatgaatatttttgtaaaagtaaaagcaacaaatttataaattgattatttgaaactttacaacacaattgcatcccaaatacaaattgtattgcttattcattatagctattcgtcctgtaatctgtttctaggtgaagcatactccagtgttttaggggttttgaaaataaatatttaaatttcacagtcaaaaaaaaacacaaaaacgatataaaacaacatctttgtggcctctgggccccaaagagactttcaacaccatctcttgggacgcgggcccaaagtggagggacacaaatggcgcaaagggcgccaaaagacg

SEQ ID NO: 456436 - DNA, 685 bp, Homo sapiens
gcacgaggtgcaaaaaccaaactgtgcagtgcacaaaagtcatttaaaaaaatctgagtaattgtcaaatattaaaagaaagatattcttcctgtaaggaatacagtttttagtcaaagtggccattacatcctctttttaatttacataatacagatacttgagaaagttgttgtggtgttgtatgccaagaaaattctttttattggtgcctatattgtaacaattatttttaatgcattgtattttgaagtaacggttcagttaaatttttcacctgctgtgtaactgaaacacaattacagtttataatcatctgtagaagtctggagataattttgcaactcatgttatgggttaaatgaatatttttgtaaaagtaaaagcaacaaatttataaattgattatttgaaactttacaacacaattgcatcccaaatacaaattgtattgcttattcattatagctattcgtcctgtaatctgtttctaggtgaagcatactccagtgttttaggggttttgaaaataaatatttaaatttcacagtcaaaaaaaaacacaaaaacgatataaaacaacatctttgtggcctctgggccccaaagagactttcaacaccatctcttgggacgcgggcccaaagtggagggacacaaatggcgcaaagggcgccaaaagacg

SEQ ID NO: 456437 - DNA, 3443 bp, Homo sapiens
cgggtggctggggcgcctccacctcctcttcctaaagcggcgaggcgcagaggagcggcatcactcgagcccaggtcccagccaccaccactcacagcgctcggcgttcaggaagaggagcagcagcggaggcggctgcttcagcggcgggcgggcgccagaaaggccccgatcgaaaagcctgggagggccgccgaactacccccggagggaggagccagtccgaacccaaggcgccaccgccgcagaagcggagcgaggcagcattcgcctccatggcccactcgccggtggctgtccaagtgcctgggatgcagaataacatagctgatccagaagaactgttcacaaaattagagcgcattgggaaaggctcatttggggaagttttcaaaggaattgataaccgtacccagcaagtcgttgctattaaaatcatagaccttgaggaagccgaagatgaaatagaagacattcagcaagaaataactgtcttgagtcaatgtgacagctcatatgtaacaaaatactatgggtcatatttaaaggggtctaaattatggataataatggaatacctgggcggtggttcagcactggatcttcttcgagctggtccatttgatgagttccagattgctaccatgctaaaggaaattttaaaaggtctggactatctgcattcagaaaagaaaattcaccgagacataaaagctgccaatgtcttgctctcagaacaaggagatgttaaacttgctgattttggagttgctggtcagctgacagatacacagattaaaagaaatacctttgtgggaactccattttggatggctcctgaagttattcaacagtcagcttatgactcaaaagctgacatttggtcattgggaattactgctattgaactagccaagggagagccacctaactccgatatgcatccaatgagagttctgtttcttattcccaaaaacaatcctccaactcttgttggagactttactaagtcttttaaggagtttattgatgcttgcctgaacaaagatccatcatttcgtcctacagcaaaagaacttctgaaacacaaattcattgtaaaaaattcaaagaagacttcttatctgactgaactgatagatcgttttaagagatggaaggcagaaggacacagtgatgatgaatctgattccgagggctctgattcggaatctaccagcagggaaaacaatactcatcctgaatggagctttaccaccgtacgaaagaagcctgatccaaagaaagtacagaatggggcagagcaagatcttgtgcaaaccctgagttgtttgtctatgataatcacacctgcatttgctgaacttaaacagcaggacgagaataacgctagcaggaatcaggcgattgaagaactcgagaaaagtattgctgtggctgaagccgcctgtcccggcatcacagataaaatggtgaagaaactaattgaaaaatttcaaaagtgttcagcagacgaatccccctaagaaacttattattggcttctgtttcatatggacccagagagccccaccaaacctacgtcaagattaacaatgcttaacccatgagctccatgtgccttttggatctttgcaacactgaagatttggaagaagctattaaactattttgtgatggcgtttatcattttatattttgaaaggattattttgtaaggaataacttttaatactatagtttcacctgtattctagtaaatgttgagacaccgttttgcttttaagtatccctatttcttaagttacgaggatgaatacctttcacattttgatctttagttgactctacagtcatgaaacatacaggtctttcaaagtcattctcaatattcagcttttgtaaattatcaagcttcaaaaagctttttttttaaaaaaaaaacatgcatattctaaaaatgactattggtggggaggtgtaaataagtcataccttcttaaaacagaaaatttaagtaaagtcttttaaatgaaacctgtaaaagtattgactcttctaccaagttggtatgatattccaggcagctcaatgattatcacatttgagaccctgtgtttgaagcatttacaggcaatgtacagcaacagaggtacctcttggtgtatagtatttacattctcttttaggtagaagaggcaattttacccttatttcacatggttagaaatttaaagcaagatcatttacccaaggataggtgtttggtaatgttgaaggagttagtctggcttcatgttttacatcttcaactaaaatcccatactatctgcttggatttggagagccaaaaaataaagctgattgtcatgtgattaaatatctgatcaacaggtatgaatataacttaaatcagcatatttttgccatggtaataaattgtcctataaactatttatatatttttgttcttcataattatcactaataagcatcagtttgttgtttttaaaaggatatttaagtgagcattttctagttcatatgaaaataaccatagtacaggatgatttctgtccacacaaaggttaaattagattgcacagttaattttcacttatatttatggtactattatgtgggtgatgcctttttcttttaagcccagtacatatattatgcctgcctaagttctgaactggggctgtatttcagtagttgtagaattattgatatttagttttgatagctaatgtttaattgtttggatctgcacagtttggtttttgcacaaaagtcatttaaaaaaatctgagtaattgtcaaatattaaaagaaagatattcttcctgtaaggaatacagtttttagtcaaagtggccattacatcctctttttaatttacataatacagatacttgagaaagttgttgtggtgttgtatgccaagaaaattctttttattggtgcctatattgtaacaattatttttaatgcattgtattttgaagtaacggttcagttaaatttttcacctgctgtgtaactgaaacacaattacagtttataatcatctgtagaagtctggagataattttgcaactcatgttatgggttaaatgaatatttttgtaaaagtaaaagcaacaaatttataaattgattatttgaaactttacaacacaattgcatcccaaatacaaattgtattgcttattcattatagctattcgtcctgtaatctgtttctaggtgaagcatactccagtgttttaggggttttgaaaataaatatttaaatttcacagtcaaaaaaaaacacaaaaacgatataaaacaacatctttgtggcctctgggccccaaagagactttcaacaccatctcttgggacgcgggcccaaagtggagggacacaaatggcgcaaagggcgccaaaagacg

SEQ ID NO: 456438 - DNA, 3389 bp, Homo sapiens
cgggtggctggggcgcctccacctcctcttcctaaagcggcgaggcgcagaggagcggcatcactcgagcccaggtcccagccaccaccactcacagcgctcggcgttcaggaagaggagcagcagcggaggcggctgcttcagcggcgggcgggcgccagaaaggccccgatcgaaaagcctgggagggccgccgaactacccccggagggaggagccagtccgaacccaaggcgccaccgccgcagaagcggagcgaggcagcattcgcctccatggcccactcgccggtggctgtccaagtgcctgggatgcagaataacatagctgatccagaagaactgttcacaaaattagagcgcattgggaaaggctcatttggggaagttttcaaaggaattgataaccgtacccagcaagtcgttgctattaaaatcatagaccttgaggaagccgaagatgaaatagaagacattcagcaagaaataactgtcttgagtcaatgtgacagctcatatgtaacaaaatactatgggtcatatttaaaggggtctaaattatggataataatggaatacctgggcggtggttcagcactggatcttcttcgagctggtccatttgatgagttccagattgctaccatgctaaaggaaattttaaaaggtctggactatctgcattcagaaaagaaaattcaccgagacataaaagctgccaatgtcttgctctcagaacaaggagatgttaaacttgctgattttggagttgctggtcagctgacagatacacagattaaaagaaatacctttgtgggaactccattttggatggctcctgaagttattcaacagtcagcttatgactcaaaagctgacatttggtcattgggaattactgctattgaactagccaagggagagccacctaactccgatatgcatccaatgagagttctgtttcttattcccaaaaacaatcctccaactcttgttggagactttactaagtcttttaaggagtttattgatgcttgcctgaacaaagatccatcatttcgtcctacagcaaaagaacttctgaaacacaaattcattgtaaaaaattcaaagaagacttcttatctgactgaactgatagatcgttttaagagatggaaggcagaaggacacagtgatgatgaatctgattccgagggctctgattcggaatctaccagcagggaaaacaatactcatcctgaatggagctttaccaccgtacgaaagaagcctgatccaaagaaagtacagaatggggcagagcaagatcttgtgcaaaccctgagttgtttgtctatgataatcacacctgcatttgctgaacttaaacagcaggacgagaataacgctagcaggaatcaggcgattgaagaactcgagaaaagtattgctgtggctgaagccgcctgtcccggcatcacagataaaatggtgaagaaactaattgaaaaatttcaaaagtgttcagcagacgaatccccctaagaaacttattattggcttctgtttcatatggacccagagagccccaccaaacctacgtcaagattaacaatgcttaacccatgagctccatgtgccttttggatctttgcaacactgaagatttggaagaagctattaaactattttgtgatggcgtttatcattttatattttgaaaggattattttgtaaggaataacttttaatactatagtttcacctgtattctagtaaatgttgagacaccgttttgcttttaagtatccctatttcttaagttacgaggatgaatacctttcacattttgatctttagttgactctacagtcatgaaacatacaggtctttcaaagtcattctcaatattcagcttttgtaaattatcaagcttcaaaaagctttttttttaaaaaaaaaacatgcatattctaaaaatgactattggtggggaggtgtaaataagtcataccttcttaaaacagaaaatttaagtaaagtcttttaaatgaaacctgtaaaagtattgactcttctaccaagttggtatgatattccaggcagctcaatgattatcacatttgagaccctgtgtttgaagcatttacaggcaatgtacagcaacagaggtacctcttggtgtatagtatttacattctcttttaggtagaagaggcaattttacccttatttcacatggttagaaatttaaagcaagatcatttacccaaggataggtgtttggtaatgttgaaggagttagtctggcttcatgttttacatcttcaactaaaatcccatactatctgcttggatttggagagccaaaaaataaagctgattgtcatgtgattaaatatctgatcaacaggtatgaatataacttaaatcagcatatttttgccatggtaataaattgtcctataaactatttatatatttttgttcttcataattatcactaataagcatcagtttgttgtttttaaaaggatatttaagtgagcattttctagttcatatgaaaataaccatagtacaggatgatttctgtccacacaaaggttaaattagattgcacagttaattttcacttatatttatggtactattatgtgggtgatgcctttttcttttaagcccagtacatatattatgcctgcctaagttctgaactggggctgtatttcagtagttgtagaattattgatatttagttttgatagctaatgtttaattgtttggatctgcacagtttggtttttgcacaaaagtcatttaaaaaaatctgagtaattgtcaaatattaaaagaaagatattcttcctgtaaggaatacagtttttagtcaaagtggccattacatcctctttttaatttacataatacagatacttgagaaagttgttgtggtgttgtatgccaagaaaattctttttattggtgcctatattgtaacaattatttttaatgcattgtattttgaagtaacggttcagttaaatttttcacctgctgtgtaactgaaacacaattacagtttataatcatctgtagaagtctggagataattttgcaactcatgttatgggttaaatgaatatttttgtaaaagtaaaagcaacaaatttataaattgattatttgaaactttacaacacaattgcatcccaaatacaaattgtattgcttattcattatagctattcgtcctgtaatctgtttctaggtgaagcatactccagtgttttaggggttttgaaaaataacttccaaatttcccacgccgaaaaaacacacccgaccccccagggcccgccccggtacccaacccgcccctattagggagtcgattaccaaattcac

SEQ ID NO: 456439 - DNA, 2806 bp, Homo sapiens
cgggtggctggggcgcctccacctcctcttcctaaagcggcgaggcgcagaggagcggcatcactcgagcccaggtcccagccaccaccactcacagcgctcggcgttcaggaagaggagcagcagcggaggcggctgcttcagcggcgggcgggcgccagaaaggccccgatcgaaaagcctgggagggccgccgaactacccccggagggaggagccagtccgaacccaaggcgccaccgccgcagaagcggagcgaggcagcattcgcctccatggcccactcgccggtggctgtccaagtgcctgggatgcagaataacatagctgatccagaagaactgttcacaaaattagagcgcattgggaaaggctcatttggggaagttttcaaaggaattgataaccgtacccagcaagtcgttgctattaaaatcatagaccttgaggaagccgaagatgaaatagaagacattcagcaagaaataactgtcttgagtcaatgtgacagctcatatgtaacaaaatactatgggtcatatttaaaggggtctaaattatggataataatggaatacctgggcggtggttcagcactggatcttaatggagctttaccaccgtacgaaagaagcctgatccaaagaaagtacagaatggggcagagcaagatcttgtgcaaaccctgagttgtttgtctatgataatcacacctgcatttgctgaacttaaacagcaggacgagaataacgctagcaggaatcaggcgattgaagaactcgagaaaagtattgctgtggctgaagccgcctgtcccggcatcacagataaaatggtgaagaaactaattgaaaaatttcaaaagtgttcagcagacgaatccccctaagaaacttattattggcttctgtttcatatggacccagagagccccaccaaacctacgtcaagattaacaatgcttaacccatgagctccatgtgccttttggatctttgcaacactgaagatttggaagaagctattaaactattttgtgatggcgtttatcattttatattttgaaaggattattttgtaaggaataacttttaatactatagtttcacctgtattctagtaaatgttgagacaccgttttgcttttaagtatccctatttcttaagttacgaggatgaatacctttcacattttgatctttagttgactctacagtcatgaaacatacaggtctttcaaagtcattctcaatattcagcttttgtaaattatcaagcttcaaaaagctttttttttaaaaaaaaaacatgcatattctaaaaatgactattggtggggaggtgtaaataagtcataccttcttaaaacagaaaatttaagtaaagtcttttaaatgaaacctgtaaaagtattgactcttctaccaagttggtatgatattccaggcagctcaatgattatcacatttgagaccctgtgtttgaagcatttacaggcaatgtacagcaacagaggtacctcttggtgtatagtatttacattctcttttaggtagaagaggcaattttacccttatttcacatggttagaaatttaaagcaagatcatttacccaaggataggtgtttggtaatgttgaaggagttagtctggcttcatgttttacatcttcaactaaaatcccatactatctgcttggatttggagagccaaaaaataaagctgattgtcatgtgattaaatatctgatcaacaggtatgaatataacttaaatcagcatatttttgccatggtaataaattgtcctataaactatttatatatttttgttcttcataattatcactaataagcatcagtttgttgtttttaaaaggatatttaagtgagcattttctagttcatatgaaaataaccatagtacaggatgatttctgtccacacaaaggttaaattagattgcacagttaattttcacttatatttatggtactattatgtgggtgatgcctttttcttttaagcccagtacatatattatgcctgcctaagttctgaactggggctgtatttcagtagttgtagaattattgatatttagttttgatagctaatgtttaattgtttggatctgcacagtttggtttttgcacaaaagtcatttaaaaaaatctgagtaattgtcaaatattaaaagaaagatattcttcctgtaaggaatacagtttttagtcaaagtggccattacatcctctttttaatttacataatacagatacttgagaaagttgttgtggtgttgtatgccaagaaaattctttttattggtgcctatattgtaacaattatttttaatgcattgtattttgaagtaacggttcagttaaatttttcacctgctgtgtaactgaaacacaattacagtttataatcatctgtagaagtctggagataattttgcaactcatgttatgggttaaatgaatatttttgtaaaagtaaaagcaacaaatttataaattgattatttgaaactttacaacacaattgcatcccaaatacaaattgtattgcttattcattatagctattcgtcctgtaatctgtttctaggtgaagcatactccagtgttttaggggttttgaaaataaatatttaaatttcacagtcaaaaaaaaacacaaaaacgatataaaacaacatctttgtggcctctgggccccaaagagactttcaacaccatctcttgggacgcgggcccaaagtggagggacacaaatggcgcaaagggcgccaaaagacg

SEQ ID NO: 456440 - DNA, 1253 bp, Homo sapiens
ggcaccgctgcctgaaagacctttctaggccagtcggggtccggcacccagttgacgagacagcgcggcgctttcagagctggggagaggcgaaaactcttccggccccccgatcccccggccagccgcccccggcagctccttgccgcctcccggcctgggcccgcccagccgttctcggcctgccgtcaggcgatctcggcggccagcccagccgcgatgtgacgccgcgcgccccggggtcctcggcgcctgcgccctctcctataaagcagacgccgcgccgcgctgcgacgctgtagtggcttcgtcttcggtttttctcttccttcgctaacgcctcccggctctcgtcagcctcccgccggccgtctccttaacaccgaacaccatgccttcaattaagttgcagagttctgatggagagatatttgaagttgatgtggaaattgccaaacaatctgtgactattaagaccatgttggaagatttgggaatggatgatgaaggagatgatgacccagttcctctaccaaatgtgaatgcagcaatattaaaaaaggtcattcagtggtgcacccaccacaaggatgaccctcctcctcctgaagatgatgagaacaaagaaaagcgaacagatgatatccctgtttgggaccaagaattcctgaaagttgaccaaggaacactttttgaactcattctggctgcaaactacttagacatcaaaggtttgcttgatgttacatgcaagactgttgccaatatgatcaaggggaaaactcctgaggagattcgcaagaccttcaatatcaaaaatgactttactgaagaggaggaagcccaggtacgcaaagagaaccagtggtgtgaagagaagtgaaatgttgtgcctgacactgtaacactgtaaggattgttccaaatactagttgcactgctctgtttataattgttaatattagacaaacagtagacaaatgcagcagcaagtcaattgtattagcagaatattgtcctcattgcatgtgtagtttgagcacagatcccaaaccttacggccaagtttcttctagtatgatggaaagtttcttttttctttgctctgaataaaactgaactgtgggttctctataagtggcattttgggctttccctcttttttgtaaagcaatgtctgcctagtttattgtccagttaactttagtgaccttttaaaagttggcattgtaaataaaacaacttgcaaaaaa

SEQ ID NO: 456441 - DNA, 648 bp, Homo sapiens
cgcgggggagccccccggcccgcccgttcgtttttgaagaaagtacgttttattaaaaccgtgtttcgtcattcagtggtgcacccaccacaaggatgaccctcctcctcctgaagatgatgagaacaaagaaaagcgaacagatgatatccctgtttgggaccaagaattcctgaaagttgaccaaggaacactttttgaactcattctggctgcaaactacttagacatcaaaggtttgcttgatgttacatgcaagactgttgccaatatgatcaaggggaaaactcctgaggagattcgcaagaccttcaatatcaaaaatgactttactgaagaggaggaagcccaggtacgcaaagagaaccagtggtgtgaagagaagtgaaatgttgtgcctgacactgtaacactgtaaggattgttccaaatactagttgcactgctctgtttataattgttaatattagacaaacagtagacaaatgcagcagcaagtcaattgtattagcagaatattgtcctcattgcatgtgtagtttgagcacagatcccaaaccttacggccaagtttcttctagtatgatggaaagtttcttttttctttgctctgaataaaactgaactgtgggttctctataagtggca

SEQ ID NO: 456442 - DNA, 632 bp, Homo sapiens
  misc_feature (10)..(10): n is a, c, g, or t
  misc_feature (15)..(15): n is a, c, g, or t
  misc_feature (22)..(22): n is a, c, g, or t
  misc_feature (41)..(41): n is a, c, g, or t
gcacgagggnccgcnaggggcngaacagtttagttttggangggcttgcgggtcattcagtggtgcacccaccacaaggatgaccctcctcctcctgaagatgatgagaacaaagaaaagcgaacagatgatatccctgtttgggaccaagaattcctgaaagttgaccaaggaacactttttgaactcattctggctgcaaactacttagacatcaaaggtttgcttgatgttacatgcaagactgttgccaatatgatcaaggggaaaactcctgaggagattcgcaagaccttcaatatcaaaaatgactttactgaagaggaggaagcccaggtacgcaaagagaaccagtggtgtgaagagaagtgaaatgttgtgcctgacactgtaacactgtaaggattgttccaaatactagttgcactgctctgtttataattgttaatattagacaaacagtagacaaatgcagcagcaagtcaattgtattagcagaatattgtcctcattgcatgtgtagtttgagcacagatcccaaaccttacggccaagtttcttctagtatgatggaaagtttcttttttctttgctctgaataaaactgaactgtgggttctctataagtggca

SEQ ID NO: 456443 - DNA, 610 bp, Homo sapiens
  misc_feature (7)..(7): n is a, c, g, or t
aaactcnagttcattaaaacctcgttttcgtcattcagtggtgcacccaccacaaggatgaccctcctcctcctgaagatgatgagaacaaagaaaagcgaacagatgatatccctgtttgggaccaagaattcctgaaagttgaccaaggaacactttttgaactcattctggctgcaaactacttagacatcaaaggtttgcttgatgttacatgcaagactgttgccaatatgatcaaggggaaaactcctgaggagattcgcaagaccttcaatatcaaaaatgactttactgaagaggaggaagcccaggtacgcaaagagaaccagtggtgtgaagagaagtgaaatgttgtgcctgacactgtaacactgtaaggattgttccaaatactagttgcactgctctgtttataattgttaatattagacaaacagtagacaaatgcagcagcaagtcaattgtattagcagaatattgtcctcattgcatgtgtagtttgagcacagatcccaaaccttacggccaagtttcttctagtatgatggaaagtttcttttttctttgctctgaataaaactgaactgtgggttctctataagtggca

SEQ ID NO: 456444 - DNA, 502 bp, Homo sapiens
  misc_feature (33)..(33): n is a, c, g, or t
  misc_feature (52)..(52): n is a, c, g, or t
gacaagaagcgacgggatacctgggaccagatncctgaaattgcccaggacncgaactcattctggctgcaaactacttagacatcaaaggtttgcttgatgttacatgcaagactgttgccaatatgatcaaggggaaaactcctgaggagattcgcaagaccttcaatatcaaaaatgactttactgaagaggaggaagcccaggtacgcaaagagaaccagtggtgtgaagagaagtgaaatgttgtgcctgacactgtaacactgtaaggattgttccaaatactagttgcactgctctgtttataattgttaatattagacaaacagtagacaaatgcagcagcaagtcaattgtattagcagaatattgtcctcattgcatgtgtagtttgagcacagatcccaaaccttacggccaagtttcttctagtatgatggaaagtttcttttttctttgctctgaataaaactgaactgtgggttctctataagtggca

SEQ ID NO: 456445 - DNA, 250 bp, Homo sapiens
  misc_feature (18)..(18): n is a, c, g, or t
acagatacgaatcgagcntgaccgacaaacagggacaaatgcagcagcaagtcaattgtattagcagaatattgtcctcattgcatgtgtagtttgagcacagatcccaaaccttacggccaagtttcttctagtatgatggaaagtttcttttttctttgctctgaataaaactgaactgtgggttctctataagtggcacgataaacaccaggtggcatcgataaacaccaggtggcatcgataaaca

SEQ ID NO: 456446 - DNA, 1395 bp, Homo sapiens
tcaaaggggttataccaatttatactctctagaagagtttgtgtttcctttccactattgcccaacaattagtatcagtttcttgattttttttcaatctagagaagtatctgtagtgttagttttgcttctagtaaagttgagcgttccttatgtttggctattcagatttcatttattggctgtacatattaacccatttctctttaatgatttttgaaagattttatattctctcagctaatcattgttgtacatattgcaggtatcttccagtcattgtcctaacttttctttttgcatagaagctttttaatgtagtcaagtacagtactctgtctgcatggcttgcttttatctaataagatcttctcccttctagggttataatgattcttcaagcttcatttttgtttttcaagcttggctgttaatggctcaagtcaacctctagctagttattattccaatatagggataagttgtcccagcagtggaatgagtaccttgtgacaaagtgccacagaggaatgaacttttgttgttgtaggtgtcattcagtggtgcacccaccacaaggatgaccctcctcctcctgaagatgatgagaacaaagaaaagcgaacagatgatatccctgtttgggaccaagaattcctgaaagttgaccaaggaacactttttgaactcattctggctgcaaactacttagacatcaaaggtttgcttgatgttacatgcaagactgttgccaatatgatcaaggggaaaactcctgaggagattcgcaagaccttcaatatcaaaaatgactttactgaagaggaggaagcccaggtaggtagcacacagttttgtctttgatcacatgctcttaaaaagggagtaacacctataacatgccagcaaaagaggtgactgtatcaagtagtcttgatactttagggataatatgtacttaatgtgtcttaaacatactcttactgttctgtctttatgaatctgaacacttagatgatactgcattttaagcataagaacaattagttttcaatgagaagagctcttgttaatgtattaacagttactagttttggcacctgcaactttctgtatagaccatacatatctgacatcagaaaagcaggccctagagagaagtatatactagggtactttagagcaacttaatgaggggaggaatgaaagaatagatcagaatgattttgttgacatgactacagactgaaataatgtgaatgaattaactgaatttgctctgtcaactttagtaaattgcccattgcctttgctttgttcataatttcagcagggcagaataaaaaccatgggaggcaaagaaaggaaatccggaaatatagtcttaacctggtg

SEQ ID NO: 456447 - DNA, 624 bp, Homo sapiens
cgcgagggcgctgggagagagttagtttgaaaagcctgggggagtcattcagtggtgcacccaccacaaggatgaccctcctcctcctgaagatgatgagaacaaagaaaagcgaacagatgatatccctgtttgggaccaagaattcctgaaagttgaccaaggaacactttttgaactcattctggctgcaaactacttagacatcaaaggtttgcttgatgttacatgcaagactgttgccaatatgatcaaggggaaaactcctgaggagattcgcaagaccttcaatatcaaaaatgactttactgaagaggaggaagcccaggtacgcaaagagaaccagtggtgtgaagagaagtgaaatgttgtgcctgacactgtaacactgtaaggattgttccaaatactagttgcactgctctgtttataattgttaatattagacaaacagtagacaaatgcagcagcaagtcaattgtattagcagaatattgtcctcattgcatgtgtagtttgagcacagatcccaaaccttacggccaagtttcttctagtatgatggaaagtttcttttttctttgctctgaataaaactgaactgtgggttctctataagtggca

SEQ ID NO: 456448 - DNA, 638 bp, Homo sapiens
  misc_feature (51)..(51): n is a, c, g, or t
ggcaggggggccgcgggcccgaaagttaagttttggaaggcctgggcggtncttccagtcattcagtggtgcacccaccacaaggatgaccctcctcctcctgaagatgatgagaacaaagaaaagcgaacagatgatatccctgtttgggaccaagaattcctgaaagttgaccaaggaacactttttgaactcattctggctgcaaactacttagacatcaaaggtttgcttgatgttacatgcaagactgttgccaatatgatcaaggggaaaactcctgaggagattcgcaagaccttcaatatcaaaaatgactttactgaagaggaggaagcccaggtacgcaaagagaaccagtggtgtgaagagaagtgaaatgttgtgcctgacactgtaacactgtaaggattgttccaaatactagttgcactgctctgtttataattgttaatattagacaaacagtagacaaatgcagcagcaagtcaattgtattagcagaatattgtcctcattgcatgtgtagtttgagcacagatcccaaaccttacggccaagtttcttctagtatgatggaaagtttcttttttctttgctctgaataaaactgaactgtgggttctctataagtggca

SEQ ID NO: 456449 - DNA, 2239 bp, Homo sapiens
ggcaccgctgcctgaaagacctttctaggccagtcggggtccggcacccagttgacgagacagcgcggcgctttcagagctggggagaggcgaaaactcttccggccccccgatcccccggccagccgcccccggcagctccttgccgcctcccggcctgggcccgcccagccgttctcggcctgccgtcaggcgatctcggcggccagcccagccgcgatgtgacgccgcgcgccccggggtcctcggcgcctgcgccctctcctataaagcagacgccgcgccgcgctgcgacgctgtagtggcttcgtcttcggtttttctcttccttcgctaacgcctcccggctctcgtcagcctcccgccggccgtctccttaacaccgaacaccatgccttcaattaagttgcagagttctgatggagagatatttgaagttgatgtggaaattgccaaacaatctgtgactattaagaccatgttggaagatttgggaatggatgatgaaggagatgatgacccagttcctctaccaaatgtgaatgcagcaatattaaaaaaggtcattcagtggtgcacccaccacaaggatgaccctcctcctcctgaagatgatgagaacaaagaaaagcgaacagatgatatccctgtttgggaccaagaattcctgaaagttgaccaaggaacactttttgaactcattctggctgcaaactacttagacatcaaaggtttgcttgatgttacatgcaagactgttgccaatatgatcaaggggaaaactcctgaggagattcgcaagaccttcaatatcaaaaatgactttactgaagaggaggaagcccaggtacgcaaagagaaccagtggtgtgaagagaagtgaaatgttgtgcctgacactgtaacactgtaaggattgttccaaatactagttgcactgctctgtttataattgttaatattagacaaacagtagacaaatgcagcagcaagtcaattgtattagcagaatattgtcctcattgcatgtgtagtttgagcacagatcccaaaccttacggccaagtttcttctagtatgatggaaagtttcttttttctttgctctgaataaaactgaactgtgggttctctataagtggcattttgggctttccctcttttttgtaaagcaatgtctgcctagtttattgtccagttaactttagtgaccttttaaaagttggcattgtaaataaaacaacttgcaaaaaagttttctggaatagaattaacaaaatattatctttattcatgagttggaaactggaaaaaggcttcttgaagtaaatgttctgagtggagctactaggatgtcttccagcctcctgcagtcaaggagtaccactgtattgattagcctgtatgtagcagggctcccttcattgcatctgaggacttgttttctttttctttatttttaatcctcttagttttaaatatattgcctagagactcagttactacccagtttgtggttttttgggagaaatgtaactggacagttagcttttcaattaaaaagacacttaacccatgtgggatgtcatctttttataattagtgttcccatgtggagaaaattattcacactacttgcatgtaaagaataatttaacttttaacattaaaatatgtggtaaaacccagaaagcatccatcatgaatgcaagatactttcaataaaaagtaagttatatagtaggtagttaagtttgcttttgtggacttaaatgtgtctcttcacttaaatgggttgaatgtgtatatatttgttcagcttgaaaagacttagtttatatcctagctcactggaggctgctgacataaccataacttctgtcccttctaattgtcatttatatgcctaactggagctagtactttaattcttaacacaaaattactctgccattgtttccagcttccctcctacaatagaatgaagtttttttgatggcttgagatggctcacaaattttgatttttttttcttccttgtgctccctttttttctccttgcttttccagttaacatctatattcacatgtaatcttgttttctcttcacattcactgagttgttcaggctcagatcatcccttgacagtagtttgccttcatctcacctttcatttgtcccaaattcaccttatttaataaagtcccatatgttgtctcacttaaaattaaaaataatt

SEQ ID NO: 456450 - DNA, 2035 bp, Homo sapiens
ggcaccgctgcctgaaagacctttctaggccagtcggggtccggcacccagttgacgagacagcgcggcgctttcagagctggggagaggcgaaaactcttccggccccccgatcccccggccagccgcccccggcagctccttgccgcctcccggcctgggcccgcccagccgttctcggcctgccgtcaggcgatctcggcggccagcccagccgcgatgtgacgccgcgcgccccggggtcctcggcgcctgcgccctctcctataaagcagacgccgcgccgcgctgcgacgctgtagtggcttcgtcttcggtttttctcttccttcgctaacgcctcccggctctcgtcagcctcccgccggccgtctccttaacaccgaacaccatgccttcaattaagttgcagagttctgatggagagatatttgaagttgatgtggaaattgccaaacaatctgtgactattaagaccatgttggaagatttgggaatggatgatgaaggagatgatgacccagttcctctaccaaatgtgaatgcagcaatattaaaaaaggtcattcagtggtgcacccaccacaaggatgaccctcctcctcctgaagatgatgagaacaaagaaaagcgaacagatgatatccctgtttgggaccaagaattcctgaaagttgaccaaggaacactttttgaactcattctggctgcaaactacttagacatcaaaggtttgcttgatgttacatgcaagactgttgccaatatgatcaaggggaaaactcctgaggagattcgcaagaccttcaatatcaaaaatgactttactgaagaggaggaagcccaggtacgcaaagagaaccagtggtgtgaagagaagtgaaatgttgtgcctgacactgtaacactgtaaggattgttccaaatactagttgcactgctctgtttataattgttaatattagacaaacagtagacaaatgcagcagcaagtcaattgtattagcagaatattgtcctcattgcatgtgtagtttgagcacagatcccaaaccttacggccaagtttcttctagtatgatggaaagtttcttttttctttgctctgaataaaactgaactgtgggttctctataagtggcattttgggctttccctcttttttgtaaagcaatgtctgcctagtttattgtccagttaactttagtgaccttttaaaagttggcattgtaaataaaacaacttgcaaaaaagttttctggaatagaattaacaaaatattatctttattcatgagttggaaactggaaaaaggcttcttgaagtaaatgttctgagtggagctactaggatgtcttccagcctcctgcagtcaaggagtaccactgtattgattagcctgtatgtagcagggctcccttcattgcatctgaggacttgttttctttttctttatttttaatcctcttagttttaaatatattgcctagagactcagttactacccagtttgtggttttttgggagaaatgtaactggacagttagcttttcaattaaaaagacacttaacccatgtgggatgtcatctttttataattagtgttcccatgtggagaaaattattcacactacttgcatgtaaagaataatttaacttttaacattaaaatatgtggtaaaacccagaaagcatccatcatgaatgcaagatactttcaataaaaagtaagttatataaaaaaaaaaaaaaaaaaaaaaaaaaacctacaatagaatgaagtttttttgatggcttgagatggctcacaaattttgatttttttttcttccttgtgctccctttttttctccttgcttttccagttaacatctatattcacatgtaatcttgttttctcttcacattcactgagttgttcaggctcagatcatcccttgacagtagtttgccttcatctcacctttcatttgtcccaaattcaccttatttaataaagtcccatatgttgtctcacttaaaattaaaaataatt

SEQ ID NO: 456451 - DNA, 1757 bp, Homo sapiens
ggcaccgctgcctgaaagacctttctaggccagtcggggtccggcacccagttgacgagacagcgcggcgctttcagagctggggagaggcgaaaactcttccggccccccgatcccccggccagccgcccccggcagctccttgccgcctcccggcctgggcccgcccagccgttctcggcctgccgtcaggcgatctcggcggccagcccagccgcgatgtgacgccgcgcgccccggggtcctcggcgcctgcgccctctcctataaagcagacgccgcgccgcgctgcgacgctgtagtggcttcgtcttcggtttttctcttccttcgctaacgcctcccggctctcgtcagcctcccgccggccgtctccttaacaccgaacaccatgccttcaattaagttgcagagttctgatggagagatatttgaagttgatgtggaaattgccaaacaatctgtgactattaagaccatgttggaagatttgggaatggatgatgaaggagatgatgacccagttcctctaccaaatgtgaatgcagcaatattaaaaaaggtcattcagtggtgcacccaccacaaggatgaccctcctcctcctgaagatgatgagaacaaagaaaagcgaacagatgatatccctgtttgggaccaagaattcctgaaagttgaccaaggaacactttttgaactcattctggctgcaaactacttagacatcaaaggtttgcttgatgttacatgcaagactgttgccaatatgatcaaggggaaaactcctgaggagattcgcaagaccttcaatatcaaaaatgactttactgaagaggaggaagcccaggtacgcaaagagaaccagtggtgtgaagagaagtgaaatgttgtgcctgacactgtaacactgtaaggattgttccaaatactagttgcactgctctgtttataattgttaatattagacaaacagtagacaaatgcagcagcaagtcaattgtattagcagaatattgtcctcattgcatgtgtagtttgagcacagatcccaaaccttacggccaagtttcttctagtatgatggaaagtttcttttttctttgctctgaataaaactgaactgtgggttctctataagtggcattttgggctttccctcttttttgtaaagcaatgtctgcctagtttattgtccagttaactttagtgaccttttaaaagttggcattgtaaataaaacaacttgcaaaaaagttttctggaatagaattaacaaaatattatctttattcatgagttggaaactggaaaaaggcttcttgaagtaaatgttctgagtggagctactaggatgtcttccagcctcctgcagtcaaggagtaccactgtattgattagcctgtatgtagcagggctcccttcattgcatctgaggacttgttttctttttctttatttttaatcctcttagttttaaatatattgcctagagactcagttactacccagtttgtggttttttgggagaaatgtaactggacagttagcttttcaattaaaaagacacttaacccatgtgggatgtcatctttttataattagtgttcccatgtggagaaaattattcacactacttgcatgtaaagaataatttaacttttaacattaaaatatgtggtaaaacccagaaagcatccatcatacgccggatacttcaatatgtatccggccggaggggcgggggggggggagggggg

SEQ ID NO: 456452 - DNA, 859 bp, Homo sapiens
aggatcctcgaggccacgaaggcccgtcttcggtttttctcttccttcgctaacgcctcccggctctcgtcagcctcccgccggccgtctccttaacaccgaacaccatgccttcaattaagttgcagagttctgatggagagatatttgaagttgatgtggaaattgccaaacaatctgtgactattaagaccatgttggaagatttgggaatggatgatgaaggagatgatgacccagttcctctaccaaatgtgaatgcagcaatattaaaaaaggtcattcagtggtgcacccaccacaaggatgaccctcctcctcctgaagatgatgagaacaaagaaaagcgaacagatgatatccctgtttgggaccaagaattcctgaaagttgaccaaggaacactttttgaactcattctggctgcaaactacttagacatcaaaggtttgcttgatgttacatgcaagactgttgccaatatgatcaaggggaaaactcctgaggagattcgcaagaccttcaatatcaaaaatgactttactgaagaggaggaagcccaggtacgcaaagagaaccagtggtgtgaagagaagtgaaatgttgtgcctgacactgtaacactgtaaggattgttccaaatactagttgcactgctctgtttataattgttaatattagacaaacagtagacaaatgcagcagcaagtcaattgtattagcagaatattgtcctcattgcatgtgtagtttgagcacagatcccaaaccttacggccaagtttcttctagtatgatggaaagtttcttttttctttgctctgaataaaactgaactgtgggttctctataagtggca

SEQ ID NO: 456453 - DNA, 1574 bp, Homo sapiens
ggcaccgctgcctgaaagacctttctaggccagtcggggtccggcacccagttgacgagacagcgcggcgctttcagagctggggagaggcgaaaactcttccggccccccgatcccccggccagccgcccccggcagctccttgccgcctcccggcctgggcccgcccagccgttctcggcctgccgtcaggcgatctcggcggccagcccagccgcgatgtgacgccgcgcgccccggggtcctcggcgcctgcgccctctcctataaagcagacgccgcgccgcgctgcgacgctgtagtggcttcgtcttcggtttttctcttccttcgctaacgcctcccggctctcgtcagcctcccgccggccgtctccttaacaccgaacaccatgccttcaattaagttgcagagttctgatggagagatatttgaagttgatgtggaaattgccaaacaatctgtgactattaagaccatgttggaagatttgggaatggatgatgaaggagatgatgacccagttcctctaccaaatgtgaatgcagcaatattaaaaaaggtcattcagtggtgcacccaccacaaggatgaccctcctcctcctgaagatgatgagaacaaagaaaagcgaacagatgatatccctgtttgggaccaagaattcctgaaagttgaccaaggaacactttttgaactcattctggctgcaaactacttagacatcaaaggtttgcttgatgttacatgcaagactgttgccaatatgatcaaggggaaaactcctgaggagattcgcaagaccttcaatatcaaaaatgactttactgaagaggaggaagcccaggtacgcaaagagaaccagtggtgtgaagagaagtgaaatgttgtgcctgacactgtaacactgtaaggattgttccaaatactagttgcactgctctgtttataattgttaatattagacaaacagtagacaaatgcagcagcaagtcaattgtattagcagaatattgtcctcattgcatgtgtagtttgagcacagatcccaaaccttacggccaagtttcttctagtatgatggaaagtttcttttttctttgctctgaataaaactgaactgtgggttctctataagtggcattttgggctttccctcttttttgtaaagcaatgtctgcctagtttattgtccagttaactttagtgaccttttaaaagttggcattgtaaataaaacaacttgcaaaaaagttttctggaatagaattaacaaaaaaaaaaaaaaaaaaaaaaaaaaaaaacctacaatagaatgaagtttttttgatggcttgagatggctcacaaattttgatttttttttcttccttgtgctccctttttttctccttgcttttccagttaacatctatattcacatgtaatcttgttttctcttcacattcactgagttgttcaggctcagatcatcccttgacagtagtttgccttcatctcacctttcatttgtcccaaattcaccttatttaataaagtcccatatgttgtctcacttaaaattaaaaataatt

SEQ ID NO: 456454 - DNA, 1542 bp, Homo sapiens
ggcaccgctgcctgaaagacctttctaggccagtcggggtccggcacccagttgacgagacagcgcggcgctttcagagctggggagaggcgaaaactcttccggccccccgatcccccggccagccgcccccggcagctccttgccgcctcccggcctgggcccgcccagccgttctcggcctgccgtcaggcgatctcggcggccagcccagccgcgatgtgacgccgcgcgccccggggtcctcggcgcctgcgccctctcctataaagcagacgccgcgccgcgctgcgacgctgtagtggcttcgtcttcggtttttctcttccttcgctaacgcctcccggctctcgtcagcctcccgccggccgtctccttaacaccgaacaccatgccttcaattaagttgcagagttctgatggagagatatttgaagttgatgtggaaattgccaaacaatctgtgactattaagaccatgttggaagatttgggaatggatgatgaaggagatgatgacccagttcctctaccaaatgtgaatgcagcaatattaaaaaaggtcattcagtggtgcacccaccacaaggatgaccctcctcctcctgaagatgatgagaacaaagaaaagcgaacagatgatatccctgtttgggaccaagaattcctgaaagttgaccaaggaacactttttgaactcattctggctgcaaactacttagacatcaaaggtttgcttgatgttacatgcaagactgttgccaatatgatcaaggggaaaactcctgaggagattcgcaagaccttcaatatcaaaaatgactttactgaagaggaggaagcccaggtacgcaaagagaaccagtggtgtgaagagaagtgaaatgttgtgcctgacactgtaacactgtaaggattgttccaaatactagttgcactgctctgtttataattgttaatattagacaaacagtagacaaatgcagcagcaagtcaattgtattagcagaatattgtcctcattgcatgtgtagtttgagcacagatcccaaaccttacggccaagtttcttctagtatgatggaaagtttcttttttctttgctctgaataaaactgaactgtgggttctctataagtggcattttgggctttccctcttttttgtaaagcaatgtctgcctagtttattgtccagttaactttagtgaccttttaaaagttggcattgtaaataaaacaacttgcaaaaaaaacacacacacgaaaaacgcaagaaaaacagatagaaacaagaggtagacaggcacattcacaaggacaacaccaacaagaaacagaggccacaccacagttcacacaaacaacacaccgccaaaacggaacacaaaacacccagacaagcaccagaaaaacagccaagcaaaaacaaaaacaaaccagagcaccaagaaaaaaaacggaacaaaaaaggaaacgagatagacggagaaaaaacactgaagaccaaaaccacagagagacaacaaccgaacagcaaccg

SEQ ID NO: 456455 - DNA, 1262 bp, Homo sapiens
ggcaccgctgcctgaaagacctttctaggccagtcggggtccggcacccagttgacgagacagcgcggcgctttcagagctggggagaggcgaaaactcttccggccccccgatcccccggccagccgcccccggcagctccttgccgcctcccggcctgggcccgcccagccgttctcggcctgccgtcaggcgatctcggcggccagcccagccgcgatgtgacgccgcgcgccccggggtcctcggcgcctgcgccctctcctataaagcagacgccgcgccgcgctgcgacgctgtagtggcttcgtcttcggtttttctcttccttcgctaacgcctcccggctctcgtcagcctcccgccggccgtctccttaacaccgaacaccatgccttcaattaagttgcagagttctgatggagagatatttgaagttgatgtggaaattgccaaacaatctgtgactattaagaccatgttggaagatttgggaatggatgatgaaggagatgatgacccagttcctctaccaaatgtgaatgcagcaatattaaaaaaggtcattcagtggtgcacccaccacaaggatgaccctcctcctcctgaagatgatgagaacaaagaaaagcgaacagatgatatccctgtttgggaccaagaattcctgaaagttgaccaaggaacactttttgaactcattctggctgcaaactacttagacatcaaaggtttgcttgatgttacatgcaagactgttgccaatatgatcaaggggaaaactcctgaggagattcgcaagaccttcaatatcaaaaatgactttactgaagaggaggaagcccaggtacgcaaagagaaccagtggtgtgaagagaagtgaaatgttgtgcctgacactgtaacactgtaaggattgttccaaatactagttgcactgctctgtttataattgttaatattagacaaacagtagacaaatgcagcagcaagtcaattgtattagcagaatattgtcctcattgcatgtgtagtttgagcacagatcccaaaccttacggccaagtttcttctagtatgatggaaagtttcttttttctttgctctgaataaaactgaactgtgggttctctataagtggcattttgggctttccctcttttttgtaaagcaatgtctgcctagtttattgtccagttaactttagtgaccttttaaagtgcctgtatacacgcttgctaaaaaaaaaagggggcgtcaat

SEQ ID NO: 456456 - DNA, 874 bp, Homo sapiens
cccacgcgtacgcggacgcgtgggcgacccacgcgtccgcgtcttcggtttttctcttccttcgctaacgcctcccggctctcgtcagcctcccgccggccgtctccttaacaccgaacaccatgccttcaattaagttgcagagttctgatggagagatatttgaagttgatgtggaaattgccaaacaatctgtgactattaagaccatgttggaagatttgggaatggatgatgaaggagatgatgacccagttcctctaccaaatgtgaatgcagcaatattaaaaaaggtcattcagtggtgcacccaccacaaggatgaccctcctcctcctgaagatgatgagaacaaagaaaagcgaacagatgatatccctgtttgggaccaagaattcctgaaagttgaccaaggaacactttttgaactcattctggctgcaaactacttagacatcaaaggtttgcttgatgttacatgcaagactgttgccaatatgatcaaggggaaaactcctgaggagattcgcaagaccttcaatatcaaaaatgactttactgaagaggaggaagcccaggtacgcaaagagaaccagtggtgtgaagagaagtgaaatgttgtgcctgacactgtaacactgtaaggattgttccaaatactagttgcactgctctgtttataattgttaatattagacaaacagtagacaaatgcagcagcaagtcaattgtattagcagaatattgtcctcattgcatgtgtagtttgagcacagatcccaaaccttacggccaagtttcttctagtatgatggaaagtttcttttttctttgctctgaataaaactgaactgtgggttctctataagtggca

SEQ ID NO: 456457 - DNA, 1277 bp, Homo sapiens
  misc_feature (1152)..(1153): n is a, c, g, or t
  misc_feature (1156)..(1156): n is a, c, g, or t
  misc_feature (1173)..(1173): n is a, c, g, or t
  misc_feature (1182)..(1182): n is a, c, g, or t
  misc_feature (1184)..(1184): n is a, c, g, or t
ggcaccgctgcctgaaagacctttctaggccagtcggggtccggcacccagttgacgagacagcgcggcgctttcagagctggggagaggcgaaaactcttccggccccccgatcccccggccagccgcccccggcagctccttgccgcctcccggcctgggcccgcccagccgttctcggcctgccgtcaggcgatctcggcggccagcccagccgcgatgtgacgccgcgcgccccggggtcctcggcgcctgcgccctctcctataaagcagacgccgcgccgcgctgcgacgctgtagtggcttcgtcttcggtttttctcttccttcgctaacgcctcccggctctcgtcagcctcccgccggccgtctccttaacaccgaacaccatgccttcaattaagttgcagagttctgatggagagatatttgaagttgatgtggaaattgccaaacaatctgtgactattaagaccatgttggaagatttgggaatggatgatgaaggagatgatgacccagttcctctaccaaatgtgaatgcagcaatattaaaaaaggtcattcagtggtgcacccaccacaaggatgaccctcctcctcctgaagatgatgagaacaaagaaaagcgaacagatgatatccctgtttgggaccaagaattcctgaaagttgaccaaggaacactttttgaactcattctggctgcaaactacttagacatcaaaggtttgcttgatgttacatgcaagactgttgccaatatgatcaaggggaaaactcctgaggagattcgcaagaccttcaatatcaaaaatgactttactgaagaggaggaagcccaggtacgcaaagagaaccagtggtgtgaagagaagtgaaatgttgtgcctgacactgtaacactgtaaggattgttccaaatactagttgcactgctctgtttataattgttaatattagacaaacagtagacaaatgcagcagcaagtcaattgtattagcagaatattgtcctcattgcatgtgtagtttgagcacagatcccaaaccttacggccaagtttcttctagtatgatggaaagtttcttttttctttgctctgaataaaactgaactgtgggttctctataagtggcagtaagcagnngcngttatgccgattgggcntaaatggtngntaacactgcgaggttgggattccttttttggtggagagaggggggagggtggggggaaaaaacggttggggggagggggggggggagaaggtg

SEQ ID NO: 456458 - DNA, 1216 bp, Homo sapiens
  misc_feature (1206)..(1206): n is a, c, g, or t
  misc_feature (1208)..(1208): n is a, c, g, or t
ggcaccgctgcctgaaagacctttctaggccagtcggggtccggcacccagttgacgagacagcgcggcgctttcagagctggggagaggcgaaaactcttccggccccccgatcccccggccagccgcccccggcagctccttgccgcctcccggcctgggcccgcccagccgttctcggcctgccgtcaggcgatctcggcggccagcccagccgcgatgtgacgccgcgcgccccggggtcctcggcgcctgcgccctctcctataaagcagacgccgcgccgcgctgcgacgctgtagtggcttcgtcttcggtttttctcttccttcgctaacgcctcccggctctcgtcagcctcccgccggccgtctccttaacaccgaacaccatgccttcaattaagttgcagagttctgatggagagatatttgaagttgatgtggaaattgccaaacaatctgtgactattaagaccatgttggaagatttgggaatggatgatgaaggagatgatgacccagttcctctaccaaatgtgaatgcagcaatattaaaaaaggtcattcagtggtgcacccaccacaaggatgaccctcctcctcctgaagatgatgagaacaaagaaaagcgaacagatgatatccctgtttgggaccaagaattcctgaaagttgaccaaggaacactttttgaactcattctggctgcaaactacttagacatcaaaggtttgcttgatgttacatgcaagactgttgccaatatgatcaaggggaaaactcctgaggagattcgcaagaccttcaatatcaaaaatgactttactgaagaggaggaagcccaggtacgcaaagagaaccagtggtgtgaagagaagtgaaatgttgtgcctgacactgtaacactgtaaggattgttccaaatactagttgcactgctctgtttataattgttaatattagacaaacagtagacaaatgcagcagcaagtcaattgtattagcagaatattgtcctcattgcatgtgtagtttgagcacagatcccaaaccttacggccaagtttcttctagtatgatggaaagtttcttttttctttgctctgaataaaactgaactgtgggttctctataagtggcaaaaaaaaaaaaaaaaaaaaaaaaaaaaaaaaaacaaaaaaaaaaaaaaaaaaaagaaaaaacnanccgggacg

SEQ ID NO: 456459 - DNA, 1200 bp, Homo sapiens
  misc_feature (1190)..(1190): n is a, c, g, or t
  misc_feature (1192)..(1192): n is a, c, g, or t
ggcaccgctgcctgaaagacctttctaggccagtcggggtccggcacccagttgacgagacagcgcggcgctttcagagctggggagaggcgaaaactcttccggccccccgatcccccggccagccgcccccggcagctccttgccgcctcccggcctgggcccgcccagccgttctcggcctgccgtcaggcgatctcggcggccagcccagccgcgatgtgacgccgcgcgccccggggtcctcggcgcctgcgccctctcctataaagcagacgccgcgccgcgctgcgacgctgtagtggcttcgtcttcggtttttctcttccttcgctaacgcctcccggctctcgtcagcctcccgccggccgtctccttaacaccgaacaccatgccttcaattaagttgcagagttctgatggagagatatttgaagttgatgtggaaattgccaaacaatctgtgactattaagaccatgttggaagatttgggaatggatgatgaaggagatgatgacccagttcctctaccaaatgtgaatgcagcaatattaaaaaaggtcattcagtggtgcacccaccacaaggatgaccctcctcctcctgaagatgatgagaacaaagaaaagcgaacagatgatatccctgtttgggaccaagaattcctgaaagttgaccaaggaacactttttgaactcattctggctgcaaactacttagacatcaaaggtttgcttgatgttacatgcaagactgttgccaatatgatcaaggggaaaactcctgaggagattcgcaagaccttcaatatcaaaaatgactttactgaagaggaggaagcccaggtacgcaaagagaaccagtggtgtgaagagaagtgaaatgttgtgcctgacactgtaacactgtaaggattgttccaaatactagttgcactgctctgtttataattgttaatattagacaaacagtagacaaatgcagcagcaagtcaattgtattagcagaatattgtcctcattgcatgtgtagtttgagcacagatcccaaaccttacggccaagtttcttctagtatgatggaaagtttcttttttctttgctctgaataaaactgaactgtgggttctctataagtggcaaaaaaaaaaaaaaaaaaaaaaaaaaaaaaaaaaaaaaagaaaaaacnanccgggacg

SEQ ID NO: 456460 - DNA, 2144 bp, Homo sapiens
ggcaccgctgcctgaaagacctttctaggccagtcggggtccggcacccagttgacgagacagcgcggcgctttcagagctggggagaggcgaaaactcttccggccccccgatcccccggccagccgcccccggcagctccttgccgcctcccggcctgggcccgcccagccgttctcggcctgccgtcaggcgatctcggcggccagcccagccgcgatgtgacgccgcgcgccccggggtcctcggcgcctgcgccctctcctataaagcagacgccgcgccgcgctgcgacgctgtagtggcttcgtcttcggtttttctcttccttcgctaacgcctcccggctctcgtcagcctcccgccggccgtctccttaacaccgaacaccatgccttcaattaagttgcagagttctgatggagagatatttgaagttgatgtggaaattgccaaacaatctgtgactattaagaccatgttggaagatttgggaatggatgatgaaggagatgatgacccagttcctctaccaaatgtgaatgcagcaatattaaaaaaggtcattcagtggtgcacccaccacaaggatgaccctcctcctcctgaagatgatgagaacaaagaaaagcgaacagatgatatccctgtttgggaccaagaattcctgaaagttgaccaaggaacactttttgaactcattctggctgcaaactacttagacatcaaaggtttgcttgatgttacatgcaagactgttgccaatatgatcaaggggaaaactcctgaggagattcgcaagaccttcaatatcaaaaatgactttactgaagaggaggaagcccaggtacgcaaagagaaccagtggtgtgaagagaagtgaaatgttgtgcctgacactgtaacactgtaaggattgttccaaatactagttgcactgctctgtttataattgttaatattagacaaacagtagactagtatgatggaaagtttcttttttctttgctctgaataaaactgaactgtgggttctctataagtggcattttgggctttccctcttttttgtaaagcaatgtctgcctagtttattgtccagttaactttagtgaccttttaaaagttggcattgtaaataaaacaacttgcaaaaaagttttctggaatagaattaacaaaatattatctttattcatgagttggaaactggaaaaaggcttcttgaagtaaatgttctgagtggagctactaggatgtcttccagcctcctgcagtcaaggagtaccactgtattgattagcctgtatgtagcagggctcccttcattgcatctgaggacttgttttctttttctttatttttaatcctcttagttttaaatatattgcctagagactcagttactacccagtttgtggttttttgggagaaatgtaactggacagttagcttttcaattaaaaagacacttaacccatgtgggatgtcatctttttataattagtgttcccatgtggagaaaattattcacactacttgcatgtaaagaataatttaacttttaacattaaaatatgtggtaaaacccagaaagcatccatcatgaatgcaagatactttcaataaaaagtaagttatatagtaggtagttaagtttgcttttgtggacttaaatgtgtctcttcacttaaatgggttgaatgtgtatatatttgttcagcttgaaaagacttagtttatatcctagctcactggaggctgctgacataaccataacttctgtcccttctaattgtcatttatatgcctaactggagctagtactttaattcttaacacaaaattactctgccattgtttccagcttccctcctacaatagaatgaagtttttttgatggcttgagatggctcacaaattttgatttttttttcttccttgtgctccctttttttctccttgcttttccagttaacatctatattcacatgtaatcttgttttctcttcacattcactgagttgttcaggctcagatcatcccttgacagtagtttgccttcatctcacctttcatttgtcccaaattcaccttatttaataaagtcccatatgttgtctcacttaaaattaaaaataatt

SEQ ID NO: 456461 - DNA, 1196 bp, Homo sapiens
ggcaccgctgcctgaaagacctttctaggccagtcggggtccggcacccagttgacgagacagcgcggcgctttcagagctggggagaggcgaaaactcttccggccccccgatcccccggccagccgcccccggcagctccttgccgcctcccggcctgggcccgcccagccgttctcggcctgccgtcaggcgatctcggcggccagcccagccgcgatgtgacgccgcgcgccccggggtcctcggcgcctgcgccctctcctataaagcagacgccgcgccgcgctgcgacgctgtagtggcttcgtcttcggtttttctcttccttcgctaacgcctcccggctctcgtcagcctcccgccggccgtctccttaacaccgaacaccacataaatgagcatattctgatgtactctttggatctgaactcatcttcacagatgccttcaattaagttgcagagttctgatggagagatatttgaagttgatgtggaaattgccaaacaatctgtgactattaagaccatgttggaagatttgggaatggatgatgaaggagatgatgacccagttcctctaccaaatgtgaatgcagcaatattaaaaaaggtcattcagtggtgcacccaccacaaggatgaccctcctcctcctgaagatgatgagaacaaagaaaagcgaacagatgatatccctgtttgggaccaagaattcctgaaagttgaccaaggaacactttttgaactcattctggctgcaaactacttagacatcaaaggtttgcttgatgttacatgcaagactgttgccaatatgatcaaggggaaaactcctgaggagattcgcaagaccttcaatatcaaaaatgactttactgaagaggaggaagcccaggtacgcaaagagaaccagtggtgtgaagagaagtgaaatgttgtgcctgacactgtaacactgtaaggattgttccaaatactagttgcactgctctgtttataattgttaatattagacaaacagtagacaaatgcagcagcaagtcaattgtattagcagaatattgtcctcattgcatgtgtagtttgagcacagatcccaaaccttacggccaagtttcttctagtatgatggaaagtttcttttttctttgctctgaataaaactgaactgtgggttctctataagtggca

SEQ ID NO: 456462 - DNA, 1636 bp, Homo sapiens
ggcaccgctgcctgaaagacctttctaggccagtcggggtccggcacccagttgacgagacagcgcggcgctttcagagctggggagaggcgaaaactcttccggccccccgatcccccggccagccgcccccggcagctccttgccgcctcccggcctgggcccgcccagccgttctcggcctgccgtcaggcgatctcggcggccagcccagccgcgatgtgacgccgcgcgccccggggtcctcggcgcctgcgccctctcctataaagcagacgccgcgccgcgctgcgacgctgtagtggcttcgtcttcggtttttctcttccttcgctaacgcctcccggctctcgtcagcctcccgccggccgtctccttaacaccgaacaccacataaatgagcatattctgatgtactctttggatctgaactcatcttcacaggtaggactcactgtggggaaaatttctatcttatttagtagcgttgtttgttttggactgaccttcctcaggttcgcatgtagttaattgtggcagttaactgttcagatggagtccagtattcagtgggagacgaaaggcaggcagaaagcaaatacaaatatgtatgttttattaaatttataccaatagtgagttcagtagggcaggccttaaaagcttctgttcctagtagttatactttgaaaaaattttaatagaaatactcggagactaacttgtgaataactgcttacaacagtgctttacagggttatgtattgtaggttcttagaactttgtggtcaataagttagagccttctgatggactgtagttgatgaaatgtcatgtagaactctctctcttaaattttatatttaatgtccttttttttttagatgccttcaattaagttgcagagttctgatggagagatatttgaagttgatgtggaaattgccaaacaatctgtgactattaagaccatgttggaagatttgggaatggatgatgaaggagatgatgacccagttcctctaccaaatgtgaatgcagcaatattaaaaaaggtcattcagtggtgcacccaccacaaggatgaccctcctcctcctgaagatgatgagaacaaagaaaagcgaacagatgatatccctgtttgggaccaagaattcctgaaagttgaccaaggaacactttttgaactcattctggctgcaaactacttagacatcaaaggtttgcttgatgttacatgcaagactgttgccaatatgatcaaggggaaaactcctgaggagattcgcaagaccttcaatatcaaaaatgactttactgaagaggaggaagcccaggtacgcaaagagaaccagtggtgtgaagagaagtgaaatgttgtgcctgacactgtaacactgtaaggattgttccaaatactagttgcactgctctgtttataattgttaatattagacaaacagtagacaaatgcagcagcaagtcaattgtattagcagaatattgtcctcattgcatgtgtagtttgagcacagatcccaaaccttacggccaagtttcttctagtatgatggaaagtttcttttttctttgctctgaataaaactgaactgtgggttctctataagtggca

SEQ ID NO: 456463 - DNA, 782 bp, Homo sapiens
tcccgggagtaactcgatgcgttctgtaatcaagatccttaggatggtagttcttgaggtcattactgtggtctatactatcagagacgtcgcaagcgagacctcggtatctggattactccccgcgatttgggaatggatgatgaaggagatgatgacccagttcctctaccaaatgtgaatgcagcaatattaaaaaaggtcattcagtggtgcacccaccacaaggatgaccctcctcctcctgaagatgatgagaacaaagaaaagcgaacagatgatatccctgtttgggaccaagaattcctgaaagttgaccaaggaacactttttgaactcattctggctgcaaactacttagacatcaaaggtttgcttgatgttacatgcaagactgttgccaatatgatcaaggggaaaactcctgaggagattcgcaagaccttcaatatcaaaaatgactttactgaagaggaggaagcccaggtacgcaaagagaaccagtggtgtgaagagaagtgaaatgttgtgcctgacactgtaacactgtaaggattgttccaaatactagttgcactgctctgtttataattgttaatattagacaaacagtagacaaatgcagcagcaagtcaattgtattagcagaatattgtcctcattgcatgtgtagtttgagcacagatcccaaaccttacggccaagtttcttctagtatgatggaaagtttcttttttctttgctctgaataaaactgaactgtgggttctctataagtggca

SEQ ID NO: 456464 - DNA, 1875 bp, Homo sapiens
cccacgcgtacgcggacgcgtgggcgacccacgcgtccgcgtcttcggtttttctcttccttcgctaacgcctcccggctctcgtcagcctcccgccggccgtctccttaacaccgaacaccatgccttcaattaagttgcagagttctgatggagagatatttgaagttgatgtggaaattgccaaacaatctgtgactattaagaccatgttggaagatttgggaatggatgatgaaggagatgatgacccagttcctctaccaaatgtgaatgcagcaatattaaaaaaggtcattcagtggtgcacccaccacaaggatgaccctcctcctcctgaagatgatgagaacaaagaaaagcgaacagatgatatccctgtttgggaccaagaattcctgaaagttgaccaaggaacactttttgaactcattctggctgcaaactacttagacatcaaaggtttgcttgatgttacatgcaagactgttgccaatatgatcaaggggaaaactcctgaggagattcgcaagaccttcaatatcaaaaatgactttactgaagaggaggaagcccaggtacgcaaagagaaccagtggtgtgaagagaagtgaaatgttgtgcctgacactgtaacactgtaaggattgttccaaatactagttgcactgctctgtttataattgttaatattagacaaacagtagactagtatgatggaaagtttcttttttctttgctctgaataaaactgaactgtgggttctctataagtggcattttgggctttccctcttttttgtaaagcaatgtctgcctagtttattgtccagttaactttagtgaccttttaaaagttggcattgtaaataaaacaacttgcaaaaaagttttctggaatagaattaacaaaatattatctttattcatgagttggaaactggaaaaaggcttcttgaagtaaatgttctgagtggagctactaggatgtcttccagcctcctgcagtcaaggagtaccactgtattgattagcctgtatgtagcagggctcccttcattgcatctgaggacttgttttctttttctttatttttaatcctcttagttttaaatatattgcctagagactcagttactacccagtttgtggttttttgggagaaatgtaactggacagttagcttttcaattaaaaagacacttaacccatgtgggatgtcatctttttataattagtgttcccatgtggagaaaattattcacactacttgcatgtaaagaataatttaacttttaacattaaaatatgtggtaaaacccagaaagcatccatcatgaatgcaagatactttcaataaaaagtaagttatatagtaggtagttaagtttgcttttgtggacttaaatgtgtctcttcacttaaatgggttgaatgtgtatatatttgttcagcttgaaaagacttagtttatatcctagctcactggaggctgctgacataaccataacttctgtcccttctaattgtcatttatatgcctaactggagctagtactttaattcttaacacaaaattactctgccattgtttccagcttccctcctacaatagaatgaagtttttttgatggcttgagatggctcacaaattttgatttttttttcttccttgtgctccctttttttctccttgcttttccagttaacatctatattcacatgtaatcttgttttctcttcacattcactgagttgttcaggctcagatcatcccttgacagtagtttgccttcatctcacctttcatttgtcccaaattcaccttatttaataaagtcccatatgttgtctcacttaaaattaaaaataatt

SEQ ID NO: 456465 - DNA, 2078 bp, Homo sapiens
ggcaccgctgcctgaaagacctttctaggccagtcggggtccggcacccagttgacgagacagcgcggcgctttcagagctggggagaggcgaaaactcttccggccccccgatcccccggccagccgcccccggcagctccttgccgcctcccggcctgggcccgcccagccgttctcggcctgccgtcaggcgatctcggcggccagcccagccgcgatgtgacgccgcgcgccccggggtcctcggcgcctgcgccctctcctataaagcagacgccgcgccgcgctgcgacgctgtagtggcttcgtcttcggtttttctcttccttcgctaacgcctcccggctctcgtcagcctcccgccggccgtctccttaacaccgaacaccatgccttcaattaagttgcagagttctgatggagagatatttgaagttgatgtggaaattgccaaacaatctgtgactattaagaccatgttggaagatttgggaatggatgatgaaggagatgatgacccagttcctctaccaaatgtgaatgcagcaatattaaaaaaggtcattcagtggtgcacccaccacaaggatgaccctcctcctcctgaagatgatgagaacaaagaaaagcgaacagatgatatccctgtttgggaccaagaattcctgaaagttgaccaaggaacactttttgaactcattctggctgcaaactacttagacatcaaaggtttgcttgatgttacatgcaagactgttgccaatatgatcaaggggaaaactcctgaggagattcgcaagaccttcaatatcaaaaatgactttactgaagaggaggaagcccaggtacgcaaagagaaccagtggtgtgatttgagcacagatcccaaaccttacggccaagtttcttctagtatgatggaaagtttcttttttctttgctctgaataaaactgaactgtgggttctctataagtggcattttgggctttccctcttttttgtaaagcaatgtctgcctagtttattgtccagttaactttagtgaccttttaaaagttggcattgtaaataaaacaacttgcaaaaaagttttctggaatagaattaacaaaatattatctttattcatgagttggaaactggaaaaaggcttcttgaagtaaatgttctgagtggagctactaggatgtcttccagcctcctgcagtcaaggagtaccactgtattgattagcctgtatgtagcagggctcccttcattgcatctgaggacttgttttctttttctttatttttaatcctcttagttttaaatatattgcctagagactcagttactacccagtttgtggttttttgggagaaatgtaactggacagttagcttttcaattaaaaagacacttaacccatgtgggatgtcatctttttataattagtgttcccatgtggagaaaattattcacactacttgcatgtaaagaataatttaacttttaacattaaaatatgtggtaaaacccagaaagcatccatcatgaatgcaagatactttcaataaaaagtaagttatatagtaggtagttaagtttgcttttgtggacttaaatgtgtctcttcacttaaatgggttgaatgtgtatatatttgttcagcttgaaaagacttagtttatatcctagctcactggaggctgctgacataaccataacttctgtcccttctaattgtcatttatatgcctaactggagctagtactttaattcttaacacaaaattactctgccattgtttccagcttccctcctacaatagaatgaagtttttttgatggcttgagatggctcacaaattttgatttttttttcttccttgtgctccctttttttctccttgcttttccagttaacatctatattcacatgtaatcttgttttctcttcacattcactgagttgttcaggctcagatcatcccttgacagtagtttgccttcatctcacctttcatttgtcccaaattcaccttatttaataaagtcccatatgttgtctcacttaaaattaaaaataatt

SEQ ID NO: 456466 - DNA, 650 bp, Homo sapiens
  misc_feature (51)..(51): n is a, c, g, or t
  misc_feature (53)..(54): n is a, c, g, or t
cggaggggggggccccgtcatgggcgatgtacatgtttttagtttttaggnanngggccctcggcgcgagtcattcagtggtgcacccaccacaaggatgaccctcctcctcctgaagatgatgagaacaaagaaaagcgaacagatgatatccctgtttgggaccaagaattcctgaaagttgaccaaggaacactttttgaactcattctggctgcaaactacttagacatcaaaggtttgcttgatgttacatgcaagactgttgccaatatgatcaaggggaaaactcctgaggagattcgcaagaccttcaatatcaaaaatgactttactgaagaggaggaagcccaggtacgcaaagagaaccagtggtgtgaagagaagtgaaatgttgtgcctgacactgtaacactgtaaggattgttccaaatactagttgcactgctctgtttataattgttaatattagacaaacagtagacaaatgcagcagcaagtcaattgtattagcagaatattgtcctcattgcatgtgtagtttgagcacagatcccaaaccttacggccaagtttcttctagtatgatggaaagtttcttttttctttgctctgaataaaactgaactgtgggttctctataagtggca

SEQ ID NO: 456467 - DNA, 2184 bp, Homo sapiens
ggcaccgctgcctgaaagacctttctaggccagtcggggtccggcacccagttgacgagacagcgcggcgctttcagagctggggagaggcgaaaactcttccggccccccgatcccccggccagccgcccccggcagctccttgccgcctcccggcctgggcccgcccagccgttctcggcctgccgtcaggcgatctcggcggccagcccagccgcgatgtgacgccgcgcgccccggggtcctcggcgcctgcgccctctcctataaagcagacgccgcgccgcgctgcgacgctgtagtggcttcgtcttcggtttttctcttccttcgctaacgcctcccggctctcgtcagcctcccgccggccgtctccttaacaccgaacaccatgccttcaattaagttgcagagttctgatggagagatatttgaagttgatgtggaaattgccaaacaatctgtgactattaagaccatgttggaagatttgggaatggatgatgaaggagatgatgacccagttcctctaccaaatgtgaatgcagcaatattaaaaaaggtcattcagtggtgcacccaccacaaggatgaccctcctcctcctgaagatgatgagaacaaagaaaagcgaacagatgatatccctgtttgggaccaagaattcctgaaagttgaccaaggaacactttttgaactcattctggctgcaaactacttagacatcaaaggtttgcttgatgttacatgcaagactgttgccaatatgatcaaggggaaaactcctgaggagattcgcaagaccttcaatatcaaaaagagaagtgaaatgttgtgcctgacactgtaacactgtaaggattgttccaaatactagttgcactgctctgtttataattgttaatattagacaaacagtagacaaatgcagcagcaagtcaattgtattagcagaatattgtcctcattgcatgtgtagtttgagcacagatcccaaaccttacggccaagtttcttctagtatgatggaaagtttcttttttctttgctctgaataaaactgaactgtgggttctctataagtggcattttgggctttccctcttttttgtaaagcaatgtctgcctagtttattgtccagttaactttagtgaccttttaaaagttggcattgtaaataaaacaacttgcaaaaaagttttctggaatagaattaacaaaatattatctttattcatgagttggaaactggaaaaaggcttcttgaagtaaatgttctgagtggagctactaggatgtcttccagcctcctgcagtcaaggagtaccactgtattgattagcctgtatgtagcagggctcccttcattgcatctgaggacttgttttctttttctttatttttaatcctcttagttttaaatatattgcctagagactcagttactacccagtttgtggttttttgggagaaatgtaactggacagttagcttttcaattaaaaagacacttaacccatgtgggatgtcatctttttataattagtgttcccatgtggagaaaattattcacactacttgcatgtaaagaataatttaacttttaacattaaaatatgtggtaaaacccagaaagcatccatcatgaatgcaagatactttcaataaaaagtaagttatatagtaggtagttaagtttgcttttgtggacttaaatgtgtctcttcacttaaatgggttgaatgtgtatatatttgttcagcttgaaaagacttagtttatatcctagctcactggaggctgctgacataaccataacttctgtcccttctaattgtcatttatatgcctaactggagctagtactttaattcttaacacaaaattactctgccattgtttccagcttccctcctacaatagaatgaagtttttttgatggcttgagatggctcacaaattttgatttttttttcttccttgtgctccctttttttctccttgcttttccagttaacatctatattcacatgtaatcttgttttctcttcacattcactgagttgttcaggctcagatcatcccttgacagtagtttgccttcatctcacctttcatttgtcccaaattcaccttatttaataaagtcccatatgttgtctcacttaaaattaaaaataatt

SEQ ID NO: 456468 - DNA, 1586 bp, Homo sapiens
gctgacttagaggaccccgactagtccaaccatacctttttgaactcattctggctgcaaactacttagacatcaaaggtttgcttgatgttacatgcaagactgttgccaatatgatcaaggggaaaactcctgaggagattcgcaagaccttcaatatcaaaaatgactttactgaagaggaggaagcccaggtacgcaaagagaaccagtggtgtgaagagaagtgaaatgttgtgcctgacactgtaacactgtaaggattgttccaaatactagttgcactgctctgtttataattgttaatattagacaaacagtagacaaatgcagcagcaagtcaattgtattagcagaatattgtcctcattgcatgtgtagtttgagcacagatcccaaaccttacggccaagtttcttctagtatgatggaaagtttcttttttctttgctctgaataaaactgaactgtgggttctctataagtggcattttgggctttccctcttttttgtaaagcaatgtctgcctagtttattgtccagttaactttagtgaccttttaaaagttggcattgtaaataaaacaacttgcaaaaaagttttctggaatagaattaacaaaatattatctttattcatgagttggaaactggaaaaaggcttcttgaagtaaatgttctgagtggagctactaggatgtcttccagcctcctgcagtcaaggagtaccactgtattgattagcctgtatgtagcagggctcccttcattgcatctgaggacttgttttctttttctttatttttaatcctcttagttttaaatatattgcctagagactcagttactacccagtttgtggttttttgggagaaatgtaactggacagttagcttttcaattaaaaagacacttaacccatgtgggatgtcatctttttataattagtgttcccatgtggagaaaattattcacactacttgcatgtaaagaataatttaacttttaacattaaaatatgtggtaaaacccagaaagcatccatcatgaatgcaagatactttcaataaaaagtaagttatatagtaggtagttaagtttgcttttgtggacttaaatgtgtctcttcacttaaatgggttgaatgtgtatatatttgttcagcttgaaaagacttagtttatatcctagctcactggaggctgctgacataaccataacttctgtcccttctaattgtcatttatatgcctaactggagctagtactttaattcttaacacaaaattactctgccattgtttccagcttccctcctacaatagaatgaagtttttttgatggcttgagatggctcacaaattttgatttttttttcttccttgtgctccctttttttctccttgcttttccagttaacatctatattcacatgtaatcttgttttctcttcacattcactgagttgttcaggctcagatcatcccttgacagtagtttgccttcatctcacctttcatttgtcccaaattcaccttatttaataaagtcccatatgttgtctcacttaaaattaaaaataatt

SEQ ID NO: 456469 - DNA, 1405 bp, Homo sapiens
ggcaccgctgcctgaaagacctttctaggccagtcggggtccggcacccagttgacgagacagcgcggcgctttcagagctggggagaggcgaaaactcttccggccccccgatcccccggccagccgcccccggcagctccttgccgcctcccggcctgggcccgcccagccgttctcggcctgccgtcaggcgatctcggcggccagcccagccgcgatgtgacgccgcgcgccccggggtcctcggcgcctgcgccctctcctataaagcagacgccgcgccgcgctgcgacgctgtagtggcttcgtcttcggtttttctcttccttcgctaacgcctcccggctctcgtcagcctcccgccggccgtctccttaacaccgaacaccatgccttcaattaagttgcagagttctgatggagagatatttgaagttgatgtggaaattgccaaacaatctgtgactattaagaccatgttggaagatttgggaatggatgatgaaggagatgatgacccagttcctctaccaaatgtgaatgcagcaatattaaaaaaggtcattcagtggtgcacccaccacaaggatgaccctcctcctcctgaagatgatgagaacaaagaaaagcgaacagatgatatccctgtttgggaccaagaattcctgaaagttgaccaaggaacactttttgaactcattctggctgcaaactacttagacatcaaaggtttgcttgatgttacatgcaagactgttgccaatatgatcaaggggaaaactcctgaggagattcgcaagaccttcaatatcaaaaatgactttactgaagaggaggaagcccaggtaggtagcacacagttttgtctttgatcacatgctcttaaaaagggagtaacacctataacatgccagcaaaagaggtgactgtatcaagtagtcttgatactttagggataatatgtacttaatgtgtcttaaacatactcttactgttctgtctttatgaatctgaacacttagatgatactgcattttaagcataagaacaattagttttcaatgagaagagctcttgttaatgtattaacagttactagttttggcacctgcaactttctgtatagaccatacatatctgacatcagaaaagcaggccctagagagaagtatatactagggtactttagagcaacttaatgaggggaggaatgaaagaatagatcagaatgattttgttgacatgactacagactgaaataatgtgaatgaattaactgaatttgctctgtcaactttagtaaattgcccattgcctttgctttgttcataatttcagcagggcagaataaaaaccatgggaggcaaagaaaggaaatccggaaatatagtcttaacctggtg

SEQ ID NO: 456470 - DNA, 1090 bp, Homo sapiens
ggcaccgctgcctgaaagacctttctaggccagtcggggtccggcacccagttgacgagacagcgcggcgctttcagagctggggagaggcgaaaactcttccggccccccgatcccccggccagccgcccccggcagctccttgccgcctcccggcctgggcccgcccagccgttctcggcctgccgtcaggcgatctcggcggccagcccagccgcgatgtgacgccgcgcgccccggggtcctcggcgcctgcgccctctcctataaagcagacgccgcgccgcgctgcgacgctgtagtggcttcgtcttcggtttttctcttccttcgctaacgcctcccggctctcgtcagcctcccgccggccgtctccttaacaccgaacaccatgccttcaattaagttgcagagttctgatggagagatatttgaagttgatgtggaaattgccaaacaatctgtgactattaagaccatgttggaagatttgggaatggatgatgaaggagatgatgacccagttcctctaccaaatgtgaatgcagcaatattaaaaaaggtcattcagtggtgcacccaccacaaggatgaccctcctcctcctgaagatgatgagaacaaagcaaggaacactttttgaactcattctggctgcaaactacttagacatcaaaggtttgcttgatgttacatgcaagactgttgccaatatgatcaaggggaaaactcctgaggagattcgcaagaccttcaatatcaaaaatgactttactgaagaggaggaagcccaggtacgcaaagagaaccagtggtgtgaagagaagtgaaatgttgtgcctgacactgtaacactgtaaggattgttccaaatactagttgcactgctctgtttataattgttaatattagacaaacagtagacaaatgcagcagcaagtcaattgtattagcagaatattgtcctcattgcatgtgtagtttgagcacagatcccaaaccttacggccaagtttcttctagtatgatggaaagtttcttttttctttgctctgaataaaactgaactgtgggttctctataagtggca

SEQ ID NO: 456471 - DNA, 1258 bp, Homo sapiens
aagatcgaatcgagcctgtaccagtaatctggcccgcgagtattctggcggtatttgagcacagatcccaaaccttacggccaagtttcttctagtatgatggaaagtttcttttttctttgctctgaataaaactgaactgtgggttctctataagtggcattttgggctttccctcttttttgtaaagcaatgtctgcctagtttattgtccagttaactttagtgaccttttaaaagttggcattgtaaataaaacaacttgcaaaaaagttttctggaatagaattaacaaaatattatctttattcatgagttggaaactggaaaaaggcttcttgaagtaaatgttctgagtggagctactaggatgtcttccagcctcctgcagtcaaggagtaccactgtattgattagcctgtatgtagcagggctcccttcattgcatctgaggacttgttttctttttctttatttttaatcctcttagttttaaatatattgcctagagactcagttactacccagtttgtggttttttgggagaaatgtaactggacagttagcttttcaattaaaaagacacttaacccatgtgggatgtcatctttttataattagtgttcccatgtggagaaaattattcacactacttgcatgtaaagaataatttaacttttaacattaaaatatgtggtaaaacccagaaagcatccatcatgaatgcaagatactttcaataaaaagtaagttatatagtaggtagttaagtttgcttttgtggacttaaatgtgtctcttcacttaaatgggttgaatgtgtatatatttgttcagcttgaaaagacttagtttatatcctagctcactggaggctgctgacataaccataacttctgtcccttctaattgtcatttatatgcctaactggagctagtactttaattcttaacacaaaattactctgccattgtttccagcttccctcctacaatagaatgaagtttttttgatggcttgagatggctcacaaattttgatttttttttcttccttgtgctccctttttttctccttgcttttccagttaacatctatattcacatgtaatcttgttttctcttcacattcactgagttgttcaggctcagatcatcccttgacagtagtttgccttcatctcacctttcatttgtcccaaattcaccttatttaataaagtcccatatgttgtctcacttaaaattaaaaataatt

SEQ ID NO: 456472 - DNA, 1143 bp, Homo sapiens
ggcaccgctgcctgaaagacctttctaggccagtcggggtccggcacccagttgacgagacagcgcggcgctttcagagctggggagaggcgaaaactcttccggccccccgatcccccggccagccgcccccggcagctccttgccgcctcccggcctgggcccgcccagccgttctcggcctgccgtcaggcgatctcggcggccagcccagccgcgatgtgacgccgcgcgccccggggtcctcggcgcctgcgccctctcctataaagcagacgccgcgccgcgctgcgacgctgtagtggcttcgtcttcggtttttctcttccttcgctaacgcctcccggctctcgtcagcctcccgccggccgtctccttaacaccgaacaccatgccttcaattaagttgcagagttctgatggagagatatttgaagttgatgtggaaattgccaaacaatctgtgactattaagaccatgttggaagatttgggaatggatgatgaaggagatgatgacccagttcctctaccaaatgtgaatgcagcaatattaaaaaaggtcattcagtggtgcacccaccacaaggatgaccctcctcctcctgaagatgatgagaacaaagaaaagcgaacagatgatatccctgtttgggaccaagaattcctgaaagttgaccaaggaacactttttgaactcattctggctgcaaactacttagacatcaaaggtttgcttgatgttacatgcaagactgttgccaatatgatcaaggggaaaactcctgaggagattcgcaagaccttcaatatcaaaaatgactttactgaagaggaggaagcccaggtacgcaaagagaaccagtggtgtgaagagaagtgaaatgttgtgcctgacactgtaacactgtaaggattgttccaaatactagttgcactgctctgtttataattgttaatattagacaaacagtagacaaatgcagcagcaagtcaattgtattagcagaatattgtcctcattgcatgtgtagtttgagcacagatcccaaaccttacggccaagtttcttctagtatgatggaaagtttcttttttctttgctctgaataaaactgaactgtgggttctctataagtggca

SEQ ID NO: 456473 - DNA, 1077 bp, Homo sapiens
ggcaccgctgcctgaaagacctttctaggccagtcggggtccggcacccagttgacgagacagcgcggcgctttcagagctggggagaggcgaaaactcttccggccccccgatcccccggccagccgcccccggcagctccttgccgcctcccggcctgggcccgcccagccgttctcggcctgccgtcaggcgatctcggcggccagcccagccgcgatgtgacgccgcgcgccccggggtcctcggcgcctgcgccctctcctataaagcagacgccgcgccgcgctgcgacgctgtagtggcttcgtcttcggtttttctcttccttcgctaacgcctcccggctctcgtcagcctcccgccggccgtctccttaacaccgaacaccatgccttcaattaagttgcagagttctgatggagagatatttgaagttgatgtggaaattgccaaacaatctgtgactattaagaccatgttggaagatttgggaatggatgatgaaggagatgatgacccagttcctctaccaaatgtgaatgcagcaatattaaaaaaggtcattcagtggtgcacccaccacaaggatgaccctcctcctcctgaagatgatgagaacaaagaaaagcgaacagatgatatccctgtttgggaccaagaattcctgaaagttgaccaaggaacactttttgaactcattctggctgcaaactacttagacatcaaaggtttgcttgatgttacatgcaagactgttgccaatatgatcaaggggaaaactcctgaggagattcgcaagaccttcaatatcaaaattttgggctttccctcttttttgtaaagcaatgtctgcctagtttattgtccagttaactttagtgaccttttaaaagttggcattgtaaataaaacaacttgcaaaaaagttttctggaatagaattaacaaaatattatctttattcatgagttggaacttggggttttgaagtggcttggggggggtcctaggtggtttcagcctcctcggcaagggagcactgttttggttaccctttggtgaggggtccttttg

SEQ ID NO: 456474 - DNA, 1577 bp, Homo sapiens
ggcaccgctgcctgaaagacctttctaggccagtcggggtccggcacccagttgacgagacagcgcggcgctttcagagctggggagaggcgaaaactcttccggccccccgatcccccggccagccgcccccggcagctccttgccgcctcccggcctgggcccgcccagccgttctcggcctgccgtcaggcgatctcggcggccagcccagccgcgatgtgacgccgcgcgccccggggtcctcggcgcctgcgccctctcctataaagcagacgccgcgccgcgctgcgacgctgtagtggcttcgtcttcggtttttctcttccttcgctaacgcctcccggctctcgtcagcctcccgccggccgtctccttaacaccgaacaccatgccttcaattaagttgcagagttctgatggagagatatttgaagttgatgtggaaattgccaaacaatctgtgactattaagaccatgttggaagatttgggaatggatgatgaaggagatgatgacccagttcctctaccaaatgtgaatgcagcaatattaaaaaaggtcattcagtggtgcacccaccacaaggatgaccctcctcctcctgaagatgatgagaacaaagaaaagcgaacagatgatatccctgtttgggaccaagaattcctgaaagttgaccaaggaacactttttgaactcattctggctgcaaactacttagacatcaaaggtttgcttgatgttacatgcaagactgttgccaatatgatcaaggggaaaactcctgaggagattcgcaagaccttcaatatcaaaaatgactttactgaagaggaggaagcccaggtacgcaaagagaaccagtggtgtgaagagaagtgaaatgttgtgcctgacactgtaacactgtaaggattgttccaaatactagttgcactgctctgtttataattgttaatattagacaaacagtagacaaatgcagcagcaagtcaattgtattagcagaatattgtcctcattgcatgtgtagtttgagcacagatcccaaaccttacggccaagtttcttctagtatgatggaaagtttcttttttctttgctctgaataaaactgaactgtgggttctctataagtggcattttgggctttccctcttttttgtaaagcaatgtctgcctagtttattgtccagttaactttagtgaccttttaaaagttggcattgtaaataaaacaacttgcaaaaaagttttctggaatagaattaacaaaatattatctttattcatgagttggaaactggaaaaaggcttcttgaagtaaatgttctgagtggagctactaggatgtcttccagcctcctgcagtcaaggagtaccactgtattgattagcctgtatgtagcagggctcccttcattgcatctgaggacttgttttctttttctttatttttaatcctcttagttttaaatatattgcctagagactcagttactacccagtttgtggttttttgggagaaatgtaactggacagttagcttttcaattaaaaagacacttaacccatg

SEQ ID NO: 456475 - DNA, 1670 bp, Homo sapiens
  misc_feature (1656)..(1656): n is a, c, g, or t
  misc_feature (1659)..(1659): n is a, c, g, or t
  misc_feature (1664)..(1664): n is a, c, g, or t
ggcaccgctgcctgaaagacctttctaggccagtcggggtccggcacccagttgacgagacagcgcggcgctttcagagctggggagaggcgaaaactcttccggccccccgatcccccggccagccgcccccggcagctccttgccgcctcccggcctgggcccgcccagccgttctcggcctgccgtcaggcgatctcggcggccagcccagccgcgatgtgacgccgcgcgccccggggtcctcggcgcctgcgccctctcctataaagcagacgccgcgccgcgctgcgacgctgtagtggcttcgtcttcggtttttctcttccttcgctaacgcctcccggctctcgtcagcctcccgccggccgtctccttaacaccgaacaccatgccttcaattaagttgcagagttctgatggagagatatttgaagttgatgtggaaattgccaaacaatctgtgactattaagaccatgttggaagatttgggaatggatgatgaaggagatgatgacccagttcctctaccaaatgtgaatgcagcaatattaaaaaaggtcattcagtggtgcacccaccacaaggatgaccctcctcctcctgaagatgatgagaacaaagaaaagcgaacagatgatatccctgtttgggaccaagaattcctgaaagttgaccaaggaacactttttgaactcattctggctgcaaactacttagacatcaaaggtttgcttgatgttacatgcaagactgttgccaatatgatcaaggggaaaactcctgaggagattcgcaagaccttcaatatcaaaaatgactttactgaagaggaggaagcccaggtacgcaaagagaaccagtggtgtgaagagaagtgaaatgttgtgcctgacactgtaacactgtaaggattgttccaaatactagttgcactgctctgtttataattgttaatattagacaaacagtagacaaatgcagcagcaagtcaattgtattagcagaatattgtcctcattgcatgtgtagtttgagcacagatcccaaaccttacggccaagtttcttctagtatgatggaaagtttcttttttctttgctctgaataaaactgaactgtgggttctctataagtggcattttgggctttccctcttttttgtaaagcaatgtctgcctagtttattgtccagttaactttagtgaccttttaaaagttggcattgtaaataaaacaacttgcaaaaaagttttctggaatagaattaacaaaatattatctttattcatgagttggaaactggaaaaaggcttcttgaagtaaatgttctgagtggagctactaggatgtcttccagcctcctgcagtcaaggagtaccactgtattgattagcctgtatgtagcagggctcccttcattgcatctgaggacttgttttctttttctttatttttaatcctcttagttttaaatatattgcctagagactcagttactacccagtttgtggttttttgggagaaatgtaactggacagttagcttttcaattaaaaagacacttaacccatgaaaaaaaaaaaaaaaaaaaaaaaaaaaaaaaacaaaaagggggggggggcaaaaaaataccccccgggggggcccattngcnccccngttttt

SEQ ID NO: 456476 - DNA, 1320 bp, Homo sapiens
  misc_feature (1306)..(1306): n is a, c, g, or t
  misc_feature (1309)..(1309): n is a, c, g, or t
  misc_feature (1314)..(1314): n is a, c, g, or t
ggcaccgctgcctgaaagacctttctaggccagtcggggtccggcacccagttgacgagacagcgcggcgctttcagagctggggagaggcgaaaactcttccggccccccgatcccccggccagccgcccccggcagctccttgccgcctcccggcctgggcccgcccagccgttctcggcctgccgtcaggcgatctcggcggccagcccagccgcgatgtgacgccgcgcgccccggggtcctcggcgcctgcgccctctcctataaagcagacgccgcgccgcgctgcgacgctgtagtggcttcgtcttcggtttttctcttccttcgctaacgcctcccggctctcgtcagcctcccgccggccgtctccttaacaccgaacaccatgccttcaattaagttgcagagttctgatggagagatatttgaagttgatgtggaaattgccaaacaatctgtgactattaagaccatgttggaagatttgggaatggatgatgaaggagatgatgacccagttcctctaccaaatgtgaatgcagcaatattaaaaaaggtcattcagtggtgcacccaccacaaggatgaccctcctcctcctgaagatgatgagaacaaagaaaagcgaacagatgatatccctgtttgggaccaagaattcctgaaagttgaccaaggaacactttttgaactcattctggctgcaaactacttagacatcaaaggtttgcttgatgttacatgcaagactgttgccaatatgatcaaggggaaaactcctgaggagattcgcaagaccttcaatatcaaaaatgactttactgaagaggaggaagcccaggtacgcaaagagaaccagtggtgtgaagagaagtgaaatgttgtgcctgacactgtaacactgtaaggattgttccaaatactagttgcactgctctgtttataattgttaatattagacaaacagtagacaaatgcagcagcaagtcaattgtattagcagaatattgtcctcattgcatgtgtagtttgagcacagatcccaaaccttacggccaagtttcttctagtatgatggaaagtttcttttttctttgctctgaataaaactgaactgtgggttctctataagtggcattttgggctttccctcttttttgtaaagcaatgtctgcctagtttattgtccagttaactttagtgaccttttaaaagttggcattgtaaataaaacaacttgcaaaaaaaaaaaacaaaaagggggggggggcaaaaaaataccccccgggggggcccattngcnccccngttttt

SEQ ID NO: 456477 - DNA, 1336 bp, Homo sapiens
  misc_feature (1290)..(1290): n is a, c, g, or t
ggcaccgctgcctgaaagacctttctaggccagtcggggtccggcacccagttgacgagacagcgcggcgctttcagagctggggagaggcgaaaactcttccggccccccgatcccccggccagccgcccccggcagctccttgccgcctcccggcctgggcccgcccagccgttctcggcctgccgtcaggcgatctcggcggccagcccagccgcgatgtgacgccgcgcgccccggggtcctcggcgcctgcgccctctcctataaagcagacgccgcgccgcgctgcgacgctgtagtggcttcgtcttcggtttttctcttccttcgctaacgcctcccggctctcgtcagcctcccgccggccgtctccttaacaccgaacaccatgccttcaattaagttgcagagttctgatggagagatatttgaagttgatgtggaaattgccaaacaatctgtgactattaagaccatgttggaagatttgggaatggatgatgaaggagatgatgacccagttcctctaccaaatgtgaatgcagcaatattaaaaaaggtcattcagtggtgcacccaccacaaggatgaccctcctcctcctgaagatgatgagaacaaagaaaagcgaacagatgatatccctgtttgggaccaagaattcctgaaagttgaccaaggaacactttttgaactcattctggctgcaaactacttagacatcaaaggtttgcttgatgttacatgcaagactgttgccaatatgatcaaggggaaaactcctgaggagattcgcaagaccttcaatatcaaaaatgactttactgaagaggaggaagcccaggtacgcaaagagaaccagtggtgtgaagagaagtgaaatgttgtgcctgacactgtaacactgtaaggattgttccaaatactagttgcactgctctgtttataattgttaatattagacaaacagtagacaaatgcagcagcaagtcaattgtattagcagaatattgtcctcattgcatgtgtagtttgagcacagatcccaaaccttacggccaagtttcttctagtatgatggaaagtttcttttttctttgctctgaataaaactgaactgtgggttctctataagtggcaaaaaaaaaaaaatgggcctcattggcctcagggggaggagctctggggccgctcccctttaaggagggttaagtcatgatcctacctcactgacccctgcgcctcggatggttcagctggggggagcggttcatcttcactcagggncgtgatccgggattccctagatgagggagacagcgacgcaaaaacg

SEQ ID NO: 456478 - DNA, 1431 bp, Homo sapiens
ggcaccgctgcctgaaagacctttctaggccagtcggggtccggcacccagttgacgagacagcgcggcgctttcagagctggggagaggcgaaaactcttccggccccccgatcccccggccagccgcccccggcagctccttgccgcctcccggcctgggcccgcccagccgttctcggcctgccgtcaggcgatctcggcggccagcccagccgcgatgtgacgccgcgcgccccggggtcctcggcgcctgcgccctctcctataaagcagacgccgcgccgcgctgcgacgctgtagtggcttcgtcttcggtttttctcttccttcgctaacgcctcccggctctcgtcagcctcccgccggccgtctccttaacaccgaacaccatgccttcaattaagttgcagagttctgatggagagatatttgaagttgatgtggaaattgccaaacaatctgtgactattaagaccatgttggaagatttgggaatggatgatgaaggagatgatgacccagttcctctaccaaatgtgaatgcagcaatattaaaaaaggtcattcagtggtgcacccaccacaaggatgaccctcctcctcctgaagatgatgagaacaaagaaaagcgaacagatgatatccctgtttgggaccaagaattcctgaaagttgaccaaggaacactttttgaactcattctggctgcaaactacttagacatcaaaggtttgcttgatgttacatgcaagactgttgccaatatgatcaaggggaaaactcctgaggagattcgcaagaccttcaatatcaaaaatgactttactgaagaggaggaagcccaggtacgcaaagagaaccagtggtgtgaagagaagtgaaatgttgtgcctgacactgtaacactgtaaggattgttccaaatactagttgcactgctctgtttataattgttaatattagacaaacagtagacaaatgcagcagcaagtcaattgtattagcagaatattgtcctcattgcatgtgtagtttgagcacagatcccaaaccttacggccaagtttcttctagtatgatggaaagtttcttttttctttgctctgaataaaactgaactgtgggttctctataagtggcaaaaaaaacaaaaaaaatgtgctttttgtcctcacgcggggagctttgcggccgctccccttaatgagggtaatttcagaacctcgctcattgactcgctcgcttcggccgttagttgcggggacggttcagctccttaaggcggcaatccggtttcccaaaatccgggttacgcggaaaaacattgccaaaagccccacaggcccgaacctaaatggccggtgtggggtttaccatagtcccgcccccagagattaaaaaatatcttaattaaggggccacccccccg

SEQ ID NO: 456479 - DNA, 1251 bp, Homo sapiens
  misc_feature (1144)..(1144): n is a, c, g, or t
  misc_feature (1149)..(1150): n is a, c, g, or t
  misc_feature (1154)..(1154): n is a, c, g, or t
  misc_feature (1156)..(1156): n is a, c, g, or t
  misc_feature (1167)..(1168): n is a, c, g, or t
  misc_feature (1172)..(1173): n is a, c, g, or t
  misc_feature (1180)..(1180): n is a, c, g, or t
  misc_feature (1184)..(1184): n is a, c, g, or t
  misc_feature (1188)..(1188): n is a, c, g, or t
ggcaccgctgcctgaaagacctttctaggccagtcggggtccggcacccagttgacgagacagcgcggcgctttcagagctggggagaggcgaaaactcttccggccccccgatcccccggccagccgcccccggcagctccttgccgcctcccggcctgggcccgcccagccgttctcggcctgccgtcaggcgatctcggcggccagcccagccgcgatgtgacgccgcgcgccccggggtcctcggcgcctgcgccctctcctataaagcagacgccgcgccgcgctgcgacgctgtagtggcttcgtcttcggtttttctcttccttcgctaacgcctcccggctctcgtcagcctcccgccggccgtctccttaacaccgaacaccatgccttcaattaagttgcagagttctgatggagagatatttgaagttgatgtggaaattgccaaacaatctgtgactattaagaccatgttggaagatttgggaatggatgatgaaggagatgatgacccagttcctctaccaaatgtgaatgcagcaatattaaaaaaggtcattcagtggtgcacccaccacaaggatgaccctcctcctcctgaagatgatgagaacaaagaaaagcgaacagatgatatccctgtttgggaccaagaattcctgaaagttgaccaaggaacactttttgaactcattctggctgcaaactacttagacatcaaaggtttgcttgatgttacatgcaagactgttgccaatatgatcaaggggaaaactcctgaggagattcgcaagaccttcaatatcaaaaatgactttactgaagaggaggaagcccaggtacgcaaagagaaccagtggtgtgaagagaagtgaaatgttgtgcctgacactgtaacactgtaaggattgttccaaatactagttgcactgctctgtttataattgttaatattagacaaacagtagacaaatgcagcagcaagtcaattgtattagcagaatattgtcctcattgcatgtgtagtttgagcacagatcccaaaccttacggccaagtttcttctagtatgatggaaagtttcttttttctttgctctgaataaaactgaactgtgggttctctataagtggcanttggnntccncntttgaagcagnngccnnttatgcncganttgngccttaaagtgttgtgtaacactgcaaaaaaaaaacccggtttttggggggaaagaaagcctg

SEQ ID NO: 456480 - DNA, 1076 bp, Homo sapiens
ggcaccgctgcctgaaagacctttctaggccagtcggggtccggcacccagttgacgagacagcgcggcgctttcagagctggggagaggcgaaaactcttccggccccccgatcccccggccagccgcccccggcagctccttgccgcctcccggcctgggcccgcccagccgttctcggcctgccgtcaggcgatctcggcggccagcccagccgcgatgtgacgccgcgcgccccggggtcctcggcgcctgcgccctctcctataaagcagacgccgcgccgcgctgcgacgctgtagtggcttcgtcttcggtttttctcttccttcgctaacgcctcccggctctcgtcagcctcccgccggccgtctccttaacaccgaacaccatgccttcaattaagttgcagagttctgatggagagatatttgaagttgatgtggaaattgccaaacaatctgtgactattaagaccatgttggaagatttgggaatggatgatgaaggagatgatgacccagttcctctaccaaatgtgaatgcagcaatattaaaaaaggtcattcagtggtgcacccaccacaaggatgaccctcctcctcctgaagatgatgagaacaaagaaaagcgaacagatgatatccctgtttgggaccaagaattcctgaaagttgaccaaggaacactttttgaactcattctggctgcaaactacttagacatcaaaggtttgcttgatgttacatgcaagactgttgccaatatgatcaaggggaaaactcctgaggagattcgcaagaccttcaatatcaaaaatgactttactgaagaggaggaagcccaggtacgcaaagagaaccagtggtgtgaagagaagtgaaatgttgtgcctgacactgtaacactgtaaggattgttccaaatactagttgcactgctctgtttataattgttaatattagacaaacagtagacaaatgcagcagcaagtcaattgtattagcagaatattgtcctcattgcatgtgtagtgctctgaataaaactgaactgtgggttctctataagtggca

SEQ ID NO: 456481 - DNA, 1312 bp, Homo sapiens
ggcaccgctgcctgaaagacctttctaggccagtcggggtccggcacccagttgacgagacagcgcggcgctttcagagctggggagaggcgaaaactcttccggccccccgatcccccggccagccgcccccggcagctccttgccgcctcccggcctgggcccgcccagccgttctcggcctgccgtcaggcgatctcggcggccagcccagccgcgatgtgacgccgcgcgccccggggtcctcggcgcctgcgccctctcctataaagcagacgccgcgccgcgctgcgacgctgtagtggcttcgtcttcggtttttctcttccttcgctaacgcctcccggctctcgtcagcctcccgccggccgtctccttaacaccgaacaccgtgagtagccgcccactgaactggaaagggtcgtggctaccggattgcgtgccggctggcctcaccgctgcggtttgggcctgcccgcggcgggcggtgactgggcctggccttctttcgggcccggtggatcgcgttgtcgaccctgttcttcgggagacactaccagatgccttcaattaagttgcagagttctgatggagagatatttgaagttgatgtggaaattgccaaacaatctgtgactattaagaccatgttggaagatttgggaatggatgatgaaggagatgatgacccagttcctctaccaaatgtgaatgcagcaatattaaaaaaggtcattcagtggtgcacccaccacaaggatgaccctcctcctcctgaagatgatgagaacaaagaaaagcgaacagatgatatccctgtttgggaccaagaattcctgaaagttgaccaaggaacactttttgaactcattctggctgcaaactacttagacatcaaaggtttgcttgatgttacatgcaagactgttgccaatatgatcaaggggaaaactcctgaggagattcgcaagaccttcaatatcaaaaatgactttactgaagaggaggaagcccaggtacgcaaagagaaccagtggtgtgaagagaagtgaaatgttgtgcctgacactgtaacactgtaaggattgttccaaatactagttgcactgctctgtttataattgttaatattagacaaacagtagacaaatgcagcagcaagtcaattgtattagcagaatattgtcctcattgcatgtgtagtttgagcacagatcccaaaccttacggccaagtttcttctagtatgatggaaagtttcttttttctttgctctgaataaaactgaactgtgggttctctataagtggca

SEQ ID NO: 456482 - DNA, 1158 bp, Homo sapiens
ggcaccgctgcctgaaagacctttctaggccagtcggggtccggcacccagttgacgagacagcgcggcgctttcagagctggggagaggcgaaaactcttccggccccccgatcccccggccagccgcccccggcagctccttgccgcctcccggcctgggcccgcccagccgttctcggcctgccgtcaggcgatctcggcggccagcccagccgcgatgtgacgccgcgcgccccggggtcctcggcgcctgcgccctctcctataaagcagacgccgcgccgcgctgcgacgctgtagtggcttcgtcttcggtttttctcttccttcgctaacgcctcccggctctcgtcagcctcccgccggccgtctccttaacaccgaacaccatgccttcaattaagttgcagagttctgatggagagatatttgaagttgatgtggaaattgccaaacaatctgtgactattaagaccatgttggaagatttgggaatggatgatgaaggagatgatgacccagttcctctaccaaatgtgaatgcagcaatattaaaaaaggtcattcagtggtgcacccaccacaaggatgaccctcctcctcctgaagatgatgagaacaaagaaaagcgaacagatgatatccctgtttgggaccaagaattcctgaaagttgaccaaggaacactttttgaactcattctggctgcaaactacttagacatcaaaggtttgcttgatgttacatgcaagactgttgccaatatgatcaaggggaaaactcctgaggagattcgcaagaccttcaatatcaaaaatgactttactgaagaggaggaagcccaggtacgcaaagagaaccagtggtgtgaagagaagtgaaatgttgtgcctgacactgtaacactgtaaggattgttccaaatactagttgcactgctctgtttataattgttaatattagacaaacagtagactagtatgatggaaagtttcttttttctttgctctgaataaaactgaactgtgggttctctataagtggcattttgggctttccctcttttttgtaaagcaatgtctgcctagtttattgtccagttaactttagtgaccttttaaaagttggcattgtaaataaaacaacttgcaaaaaa

SEQ ID NO: 456483 - DNA, 1914 bp, Homo sapiens
ggcaccgctgcctgaaagacctttctaggccagtcggggtccggcacccagttgacgagacagcgcggcgctttcagagctggggagaggcgaaaactcttccggccccccgatcccccggccagccgcccccggcagctccttgccgcctcccggcctgggcccgcccagccgttctcggcctgccgtcaggcgatctcggcggccagcccagccgcgatgtgacgccgcgcgccccggggtcctcggcgcctgcgccctctcctataaagcagacgccgcgccgcgctgcgacgctgtagtggcttcgtcttcggtttttctcttccttcgctaacgcctcccggctctcgtcagcctcccgccggccgtctccttaacaccgaacaccatgccttcaattaagttgcagagttctgatggagagatatttgaagttgatgtggaaattgccaaacaatctgtgactattaagaccatgttggaagatttgggaatggatgatgaaggagatgatgacccagttcctctaccaaatgtgaatgcagcaatattaaaaaaggtcattcagtggtgcacccaccacaaggatgaccctcctcctcctgaagatgatgagaacaaagaaaagcgaacagatgatatccctgtttgggaccaagaattcctgaaagttgaccaaggaacactttttgaactcattctggctgcaaactacttagacatcaaaggtttgcttgatgttacatgcaagactgttgccaatatgatcaaggggaaaactcctgaggagattcgcaagaccttcaatatcaaaattttgggctttccctcttttttgtaaagcaatgtctgcctagtttattgtccagttaactttagtgaccttttaaaagttggcattgtaaataaaacaacttgcaaaaaagttttctggaatagaattaacaaaatattatctttattcatgagttggaaactggaaaaaggcttcttgaagtaaatgttctgagtggagctactaggatgtcttccagcctcctgcagtcaaggagtaccactgtattgattagcctgtatgtagcagggctcccttcattgcatctgaggacttgttttctttttctttatttttaatcctcttagttttaaatatattgcctagagactcagttactacccagtttgtggttttttgggagaaatgtaactggacagttagcttttcaattaaaaagacacttaacccatgtgggatgtcatctttttataattagtgttcccatgtggagaaaattattcacactacttgcatgtaaagaataatttaacttttaacattaaaatatgtggtaaaacccagaaagcatccatcatgaatgcaagatactttcaataaaaagtaagttatatagtaggtagttaagtttgcttttgtggacttaaatgtgtctcttcacttaaatgggttgaatgtgtatatatttgttcagcttgaaaagacttagtttatatcctagctcactggaggctgctgacataaccataacttctgtcccttctaattgtcatttatatgcctaactggagctagtactttaattcttaacacaaaattactctgccattgtttccagcttccctcctacaatagaatgaagtttttttgatggcttgagatggctcacaaattttgatttttttttcttccttgtgctccctttttttctccttgcttttccagttaacatctatattcacatgtaatcttgttttctcttcacattcactgagttgttcaggctcagatcatcccttgacagtagtttgccttcatctcacctttcatttgtcccaaattcaccttatttaataaagtcccatatgttgtctcacttaaaattaaaaataatt

SEQ ID NO: 456484 - DNA, 2186 bp, Homo sapiens
ggcaccgctgcctgaaagacctttctaggccagtcggggtccggcacccagttgacgagacagcgcggcgctttcagagctggggagaggcgaaaactcttccggccccccgatcccccggccagccgcccccggcagctccttgccgcctcccggcctgggcccgcccagccgttctcggcctgccgtcaggcgatctcggcggccagcccagccgcgatgtgacgccgcgcgccccggggtcctcggcgcctgcgccctctcctataaagcagacgccgcgccgcgctgcgacgctgtagtggcttcgtcttcggtttttctcttccttcgctaacgcctcccggctctcgtcagcctcccgccggccgtctccttaacaccgaacaccatgccttcaattaagttgcagagttctgatggagagatatttgaagttgatgtggaaattgccaaacaatctgtgactattaagaccatgttggaagatttgggaatggatgatgaaggagatgatgacccagttcctctaccaaatgtgaatgcagcaatattaaaaaaggtcattcagtggtgcacccaccacaaggatgaccctcctcctcctgaagatgatgagaacaaagcaaggaacactttttgaactcattctggctgcaaactacttagacatcaaaggtttgcttgatgttacatgcaagactgttgccaatatgatcaaggggaaaactcctgaggagattcgcaagaccttcaatatcaaaaatgactttactgaagaggaggaagcccaggtacgcaaagagaaccagtggtgtgaagagaagtgaaatgttgtgcctgacactgtaacactgtaaggattgttccaaatactagttgcactgctctgtttataattgttaatattagacaaacagtagacaaatgcagcagcaagtcaattgtattagcagaatattgtcctcattgcatgtgtagtttgagcacagatcccaaaccttacggccaagtttcttctagtatgatggaaagtttcttttttctttgctctgaataaaactgaactgtgggttctctataagtggcattttgggctttccctcttttttgtaaagcaatgtctgcctagtttattgtccagttaactttagtgaccttttaaaagttggcattgtaaataaaacaacttgcaaaaaagttttctggaatagaattaacaaaatattatctttattcatgagttggaaactggaaaaaggcttcttgaagtaaatgttctgagtggagctactaggatgtcttccagcctcctgcagtcaaggagtaccactgtattgattagcctgtatgtagcagggctcccttcattgcatctgaggacttgttttctttttctttatttttaatcctcttagttttaaatatattgcctagagactcagttactacccagtttgtggttttttgggagaaatgtaactggacagttagcttttcaattaaaaagacacttaacccatgtgggatgtcatctttttataattagtgttcccatgtggagaaaattattcacactacttgcatgtaaagaataatttaacttttaacattaaaatatgtggtaaaacccagaaagcatccatcatgaatgcaagatactttcaataaaaagtaagttatatagtaggtagttaagtttgcttttgtggacttaaatgtgtctcttcacttaaatgggttgaatgtgtatatatttgttcagcttgaaaagacttagtttatatcctagctcactggaggctgctgacataaccataacttctgtcccttctaattgtcatttatatgcctaactggagctagtactttaattcttaacacaaaattactctgccattgtttccagcttccctcctacaatagaatgaagtttttttgatggcttgagatggctcacaaattttgatttttttttcttccttgtgctccctttttttctccttgcttttccagttaacatctatattcacatgtaatcttgttttctcttcacattcactgagttgttcaggctcagatcatcccttgacagtagtttgccttcatctcacctttcatttgtcccaaattcaccttatttaataaagtcccatatgttgtctcacttaaaattaaaaataatt

SEQ ID NO: 456485 - DNA, 928 bp, Homo sapiens
ggcaccgctgcctgaaagacctttctaggccagtcggggtccggcacccagttgacgagacagcgcggcgctttcagagctggggagaggcgaaaactcttccggccccccgatcccccggccagccgcccccggcagctccttgccgcctcccggcctgggcccgcccagccgttctcggcctgccgtcaggcgatctcggcggccagcccagccgcgatgtgacgccgcgcgccccggggtcctcggcgcctgcgccctctcctataaagcagacgccgcgccgcgctgcgacgctgtagtggcttcgtcttcggtttttctcttccttcgctaacgcctcccggctctcgtcagcctcccgccggccgtctccttaacaccgaacaccatgccttcaattaagttgcagagttctgatggagagatatttgaagttgatgtggaaattgccaaacaatctgtgactattaagaccatgttggaagatttgggaatggatgatgaaggagatgatgacccagttcctctaccaaatgtgaatgcagcaatattaaaaaaggtcattcagtggtgcacccaccacaaggatgaccctcctcctcctgaagatgatgagaacaaagaaaagcgaacagatgatatccctgtttgggaccaagaattcctgaaagttgaccaaggaacactttttgaactcattctggctgcaaactacttagacatcaaaggtttgcttgatgttacatgcaagactgttgccaatatgatcaaggggaaaactcctgaggagattcgcaagaccttcaatatcaaaattttgggctttccctcttttttgtaaagcaatgtctgcctagtttattgtccagttaactttagtgaccttttaaaagttggcattgtaaataaaacaacttgcaaaaaa

SEQ ID NO: 456486 - DNA, 2163 bp, Homo sapiens
ccggggcaagggaagctagtagcggagccggaagtgaggcaccctcgggctcgagacagcggcgacgtttaaagctgagcgacccagtgccactggagacggtcagcttctccactcaggctcctccagcccgagccagaagaccccctcccccagaattctgggggccgatggaagggagccgagtcagatcgcgaggtacccagagccgacagaccggagcgacagggagttgccagaagccccgcccctaggagtgatcggaaagcctcacccatccgggtgaggaacccggagggaccgcctccgggcggagcccgccgaccatggctacgcccctggtggcgggtcccgcagctctacgcttcgccgccgcggctagctggcaggttgtgcgcggacgctgcgtggaacattttccgcgagtactggagtttctgcgatctctgcgcgctgttgcccctggcttggttcgctaccggcaccacgaacgcctttgtatgggcctaaaggccaaggtggtggtggagctgatcctgcagggccggccttgggcccaagtcctgaaagccctgaatcaccactttccagaatctggacctatagtgcgggatcccaaggctacaaagcaggatctgaggaagattttggaggcacaggaaactttttaccagcaggtgaagcagctgtcagaggctcctgtggatttggcctcgaagctgcaggaacttgaacaagagtatggggaaccctttctggctgccatggaaaagctgctttttgagtacttgtgtcagctggagaaagcactgcctacaccgcaggcacagcagcttcaggatgtgctgagttggatgcagcctggagtctctatcacctcttctcttgcctggagacaatatggtgtggacatggggtggctgcttccagagtgctctgttactgactcagtgaacctggctgagcccatggaacagaatcctcctcagcaacaaagactagcactccacaatcccctgccaaaagccaagcctggcacacatcttcctcagggaccatcttcaaggacgcacccagaacctctagctggccgacacttcaatctggcccctctaggccgacgaagagttcagtcccaatgggcctccactaggggaggccataaggagcgccccacagtcatgctgtttccctttaggaatctcggctcaccaacccaggtcatatctaagcctgagagcaaggaagaacatgcgatatacacagcagacctagccatgggcacaagagcagcctccactgggaagtctaagagtccatgccagaccctggggggaagggctctgaaggagaacccagttgacttgcctgccacagagcaaaaggagtgagtggaacagagttgcttcttactaggagcacattctttgcctgccttcccttcatcctatcctctttgcttgctctcacctcaggaattgcttggattgctacatggaccccctgagactatcattattacctcctagggccaggaagccaggtaggtagtctgagtcaggattggatcaacagcctcctctcttggggactctcaagagcctgtgttcatctagaagtagtagtttgattctggtttccctcctacagtgtgtcctccgtctctgtgcagctccgtcattaccataggggacttggttttagactctgatgaggaagaaaatggccagggggaaggaaaggtgagtgggaaggagcagaaagctgggaaaggggatgggtagaacaagactgagaaatccacatgcttcagaattcagagggttcagggaatggtttcggatagtaggctctccctgctcccttctctacaggaatctctggaaaactatcagaagacaaagtttgacaccttgatacccactctctgtgaatacctacccccttctggccacggtgccatacctgtttcttcctgtgactgtagagacagttctagacctttgtgatagaactaaaatgctctctgtactctagtctcctgcctcctcagctctgcaagtagtttagtaggaatgaagtggaagtccaggcttggattgcctaactacactgctaaaaatatttgtaatccttaataattaaactttggatttgttaaaa

SEQ ID NO: 456487 - DNA, 1971 bp, Homo sapiens
ccggggcaagggaagctagtagcggagccggaagtgaggcaccctcgggctcgagacagcggcgacgtttaaagctgagcgacccagtgccactggagacggtcagcttctccactcaggctcctccagcccgagccagaagaccccctcccccagaattctgggggccgatggaagggagccgagtcagatcgcgaggtacccagagccgacagaccggagcgacagggagttgccagaagccccgcccctaggagtgatcggaaagcctcacccatccgggtgaggaacccggagggaccgcctccgggcggagcccgccgaccatggctacgcccctggtggcgggtcccgcagctctacgcttcgccgccgcggctagctggcaggttgtgcgcggacgctgcgtggaacattttccgcgagtactggagtttctgcgatctctgcgcgctgttgcccctggcttggttcgctaccggcaccacgaacgcctttgtatgggcctaaaggccaaggtggtggtggagctgatcctgcagggccggccttgggcccaagtcctgaaagccctgaatcaccactttccagaatctggacctatagtgcgggatcccaaggctacaaagcaggatctgaggaagattttggaggcacaggaaactttttaccagcaggtgaagcagctgtcagaggctcctgtggatttggcctcgaagctgcaggaacttgaacaagagtatggggaaccctttctggctgccatggaaaagctgctttttgagtacttgtgtcagctggagaaagcactgcctacaccgcaggcacagcagcttcaggatgtgctgagttggatgcagcctggagtctctatcacctcttctcttgcctggagacaatatggtgtggacatggggtggctgcttccagagtgctctgttactgactcagtgaacctggctgagcccatggaacagaatcctcctcagcaacaaagactagcactccacaatcccctgccaaaagccaagcctggcacacatcttcctcagggaccatcttcaaggacgcacccagaacctctagctggccgacacttcaatctggcccctctaggccgacgaagagttcagtcccaatgggcctccactaggggaggccataaggagcgccccacagtcatgctgtttccctttaggaatctcggctcaccaacccaggtcatatctaagcctgagagcaaggaagaacatgcgatatacacagcagacctagccatgggcacaagagcagcctccactgggaagtctaagagtccatgccagaccctggggggaagggctctgaaggagaacccagttgacttgcctgccacagagcaaaaggatcaggaattgcttggattgctacatggaccccctgagactatcattattacctcctagggccaggaagccatgtgtcctccgtctctgtgcagctccgtcattaccataggggacttggttttagactctgatgaggaagaaaatggccagggggaaggaaaggtgagtgggaaggagcagaaagctgggaaaggggatgggtagaacaagactgagaaatccacatgcttcagaattcagagggttcagggaatggtttcggatagtaggctctccctgctcccttctctacaggaatctctggaaaactatcagaagacaaagtttgacaccttgatacccactctctgtgaatacctacccccttctggccacggtgccatacctgtttcttcctgtgactgtagagacagttctagacctttgtgatagaactaaaatgctctctgtactctagtctcctgcctcctcagctctgcaagtagtttagtaggaatgaagtggaagtccaggcttggattgcctaactacactgctaaaaatatttgtaatccttaataattaaactttggatttgttaaaa

SEQ ID NO: 456488 - DNA, 2613 bp, Homo sapiens
ccggggcaagggaagctagtagcggagccggaagtgaggcaccctcgggctcgagacagcggcgacgtttaaagctgagcgacccagtgccactggagacggtcagcttctccactcaggctcctccagcccgagccagaagaccccctcccccagaattctgggggccgatggaagggagccgagtcagatcgcgaggtacccagagccgacagaccggagcgacagggagttgccagaagccccgcccctaggagtgatcggaaagcctcacccatccgggtgaggaacccggagggaccgcctccgggcggagcccgccgaccatggctacgcccctggtggcgggtcccgcagctctacgcttcgccgccgcggctagctggcaggttgtgcgcggacgctgcgtggaacattttccgcgagtactggagtttctgcgatctctgcgcgctgttgcccctggcttggttcgctaccggcaccacgaacgcctttgtatgggcctaaaggccaaggtggtggtggagctgatcctgcagggccggccttgggcccaagtcctgaaagccctgaatcaccactttccagaatctggacctatagtgcgggatcccaaggctacaaagcaggatctgaggaagattttggaggcacaggaaactttttaccagcaggtgaagcagctgtcagaggctcctgtggatttggcctcgaagctgcaggtgagactggtttgaaggctattatgtggctattttctctaacccatttttttttttttttgaggaatcttgctctgtcgcccaggctggagtgcagtggcacaatctcggctcactgcaacctctgcctcccgggttcaagcgattctcctgcctcagcctcccgagtagctgggattacaaatgcccagctaatttttgtattttagtagagatggggtttcaccatgttggccaggctggtctcgaactcctgacctcaagtgatccgcccacctcggcctcccaaatggccaggattacaggcgtgagccaccgtgcctggccactaacccacttttgacctaatctcccctgctgtaggaacttgaacaagagtatggggaaccctttctggctgccatggaaaagctgctttttgagtacttgtgtcagctggagaaagcactgcctacaccgcaggcacagcaggtttcgctggggcaaaacatgtaagggcagagtgtggggtggctgtttcaaggattgtggtcttcatacctctgtccctgcccacagcttcaggatgtgctgagttggatgcagcctggagtctctatcacctcttctcttgcctggagacaatatggtgtggacatggggtggctgcttccagagtgctctgttactgactcagtgaacctggctgagcccatggaacagaatcctcctcagcaacaaagactagcactccacaatcccctgccaaaagccaagcctggcacacatcttcctcagggaccatcttcaaggacgcacccagaacctctagctggccgacacttcaatctggcccctctaggccgacgaagagttcagtcccaatgggcctccactaggggaggccataaggagcgccccacagtcatgctgtttccctttaggaatctcggctcaccaacccaggtcatatctaagcctgagagcaaggaagaacatgcgatatacacagcagacctagccatgggcacaagagcagcctccactgggaagtctaagagtccatgccagaccctggggggaagggctctgaaggagaacccagttgacttgcctgccacagagcaaaaggagtgagtggaacagagttgcttcttactaggagcacattctttgcctgccttcccttcatcctatcctctttgcttgctctcacctcaggaattgcttggattgctacatggaccccctgagactatcattattacctcctagggccaggaagccaggtaggtagtctgagtcaggattggatcaacagcctcctctcttggggactctcaagagcctgtgttcatctagaagtagtagtttgattctggtttccctcctacagtgtgtcctccgtctctgtgcagctccgtcattaccataggggacttggttttagactctgatgaggaagaaaatggccagggggaaggaaaggtgagtgggaaggagcagaaagctgggaaaggggatgggtagaacaagactgagaaatccacatgcttcagaattcagagggttcagggaatggtttcggatagtaggctctccctgctcccttctctacaggaatctctggaaaactatcagaagacaaagtttgacaccttgatacccactctctgtgaatacctacccccttctggccacggtgccatacctgtttcttcctgtgactgtagagacagttctagacctttgtgatagaactaaaatgctctctgtactctagtctcctgcctcctcagctctgcaagtagtttagtaggaatgaagtggaagtccaggcttggattgcctaactacactgctaaaaatatttgtaatccttaataattaaactttggatttgttaaaa

SEQ ID NO: 456489 - DNA, 1923 bp, Homo sapiens
ccggggcaagggaagctagtagcggagccggaagtgaggcaccctcgggctcgagacagcggcgacgtttaaagctgagcgacccagtgccactggagacggtcagcttctccactcaggctcctccagcccgagccagaagaccccctcccccagaattctgggggccgatggaagggagccgagtcagatcgcgaggtacccagagccgacagaccggagcgacagggagttgccagaagccccgcccctaggagtgatcggaaagcctcacccatccgggtgaggaacccggagggaccgcctccgggcggagcccgccgaccatggctacgcccctggtggcgggtcccgcagctctacgcttcgccgccgcggctagctggcaggttgtgcgcggacgctgcgtggaacattttccgcgagtactggagtttctgcgatctctgcgcgctgttgcccctggcttggttcgctaccggcaccacgaacgcctttgtatgggcctaaaggccaaggtggtggtggagctgatcctgcagggccggccttgggcccaagtcctgaaagccctgaatcaccactttccagaatctggacctatagtgcgggatcccaaggctacaaagcaggatctgaggaagattttggaggcacaggaaactttttaccagcaggtgaagcagctgtcagaggctcctgtggatttggcctcgaagctgcaggaacttgaacaagagtatggggaaccctttctggctgccatggaaaagctgctttttgagtacttgtgtcagctggagaaagcactgcctacaccgcaggcacagcagcttcaggatgtgctgagttggatgcagcctggagtctctatcacctcttctcttgcctggagacaatatggtgtggacatggggtggctgcttccagagtgctctgttactgactcagtgaacctggctgagcccatggaacagaatcctcctcagcaacaaagactagcactccacaatcccctgccaaaagccaagcctggcacacatcttcctcagggaccatcttcaaggacgcacccagaacctctagctggccgacacttcaatctggcccctctaggccgacgaagagttcagtcccaatgggcctccactaggggaggccataaggagcgccccacagtcatgctgtttccctttaggaatctcggctcaccaacccaggtcatatctaagcctgagagcaaggaagaacatgcgatatacacagcagacctagccatgggcacaagagcagcctccactgggaagtctaagagtccatgccagaccctggggggaagggctctgaaggagaacccagttgacttgcctgccacagagcaaaaggagtgagtggaacagagttgcttcttactaggagcacattctttgcctgccttcccttcatcctatcctctttgcttgctctcacctcaggaattgcttggattgctacatggaccccctgagactatcattattacctcctagggccaggaagccatgtgtcctccgtctctgtgcagctccgtcattaccataggggacttggttttagactctgatgaggaagaaaatggccagggggaaggaaaggaatctctggaaaactatcagaagacaaagtttgacaccttgatacccactctctgtgaatacctacccccttctggccacggtgccatacctgtttcttcctgtgactgtagagacagttctagacctttgtgatagaactaaaatgctctctgtactctagtctcctgcctcctcagctctgcaagtagtttagtaggaatgaagtggaagtccaggcttggattgcctaactacactgctaaaaatatttgtaatccttaataattaaactttggatttgttaaaa

SEQ ID NO: 456490 - DNA, 1751 bp, Homo sapiens
ccggggcaagggaagctagtagcggagccggaagtgaggcaccctcgggctcgagacagcggcgacgtttaaagctgagcgacccagtgccactggagacggtcagcttctccactcaggctcctccagcccgagccagaagaccccctcccccagaattctgggggccgatggaagggagccgagtcagatcgcgaggtacccagagccgacagaccggagcgacagggagttgccagaagccccgcccctaggagtgatcggaaagcctcacccatccgggtgaggaacccggagggaccgcctccgggcggagcccgccgaccatggctacgcccctggtggcgggtcccgcagctctacgcttcgccgccgcggctagctggcaggttgtgcgcggacgctgcgtggaacattttccgcgagtactggagtttctgcgatctctgcgcgctgttgcccctggcttggttcgctaccggcaccacgaacgcctttgtatgggcctaaaggccaagagtgctctgttactgactcagtgaacctggctgagcccatggaacagaatcctcctcagcaacaaagactagcactccacaatcccctgccaaaagccaagcctggcacacatcttcctcagggaccatcttcaaggacgcacccagaacctctagctggccgacacttcaatctggcccctctaggccgacgaagagttcagtcccaatgggcctccactaggggaggccataaggagcgccccacagtcatgctgtttccctttaggaatctcggctcaccaacccaggtcatatctaagcctgagagcaaggaagaacatgcgatatacacagcagacctagccatgggcacaagagcagcctccactgggaagtctaagagtccatgccagaccctggggggaagggctctgaaggagaacccagttgacttgcctgccacagagcaaaaggagtgagtggaacagagttgcttcttactaggagcacattctttgcctgccttcccttcatcctatcctctttgcttgctctcacctcaggaattgcttggattgctacatggaccccctgagactatcattattacctcctagggccaggaagccaggtaggtagtctgagtcaggattggatcaacagcctcctctcttggggactctcaagagcctgtgttcatctagaagtagtagtttgattctggtttccctcctacagtgtgtcctccgtctctgtgcagctccgtcattaccataggggacttggttttagactctgatgaggaagaaaatggccagggggaaggaaaggtgagtgggaaggagcagaaagctgggaaaggggatgggtagaacaagactgagaaatccacatgcttcagaattcagagggttcagggaatggtttcggatagtaggctctccctgctcccttctctacaggaatctctggaaaactatcagaagacaaagtttgacaccttgatacccactctctgtgaatacctacccccttctggccacggtgccatacctgtttcttcctgtgactgtagagacagttctagacctttgtgatagaactaaaatgctctctgtactctagtctcctgcctcctcagctctgcaagtagtttagtaggaatgaagtggaagtccaggcttggattgcctaactacactgctaaaaatatttgtaatccttaataattaaactttggatttgttaaaa

SEQ ID NO: 456491 - DNA, 2060 bp, Homo sapiens
ccggggcaagggaagctagtagcggagccggaagtgaggcaccctcgggctcgagacagcggcgacgtttaaagctgagcgacccagtgccactggagacggtcagcttctccactcaggctcctccagcccgagccagaagaccccctcccccagaattctgggggccgatggaagggagccgagtcagatcgcgaggtacccagagccgacagaccggagcgacagggagttgccagaagccccgcccctaggagtgatcggaaagcctcacccatccgggtgaggaacccggagggaccgcctccgggcggagcccgccgaccatggctacgcccctggtggcgggtcccgcagctctacgcttcgccgccgcggctagctggcaggttgtgcgcggacgctgcgtggaacattttccgcgagtactggagtttctgcgatctctgcgcgctgttgcccctggcttggttcgctaccggcaccacgaacgcctttgtatgggcctaaaggccaaggtggtggtggagctgatcctgcagggccggccttgggcccaagtcctgaaagccctgaatcaccactttccagaatctggacggaggcacaggaaactttttaccagcaggtgaagcagctgtcagaggctcctgtggatttggcctcgaagctgcaggaacttgaacaagagtatggggaaccctttctggctgccatggaaaagctgctttttgagtacttgtgtcagctggagaaagcactgcctacaccgcaggcacagcagcttcaggatgtgctgagttggatgcagcctggagtctctatcacctcttctcttgcctggagacaatatggtgtggacatggggtggctgcttccagagtgctctgttactgactcagtgaacctggctgagcccatggaacagaatcctcctcagcaacaaagactagcactccacaatcccctgccagaacctctagctggccgacacttcaatctggcccctctaggccgacgaagagttcagtcccaatgggcctccactaggggaggccataaggagcgccccacagtcatgctgtttccctttaggaatctcggctcaccaacccaggtcatatctaagcctgagagcaaggaagaacatgcgatatacacagcagacctagccatgggcacaagagcagcctccactgggaagtctaagagtccatgccagaccctggggggaagggctctgaaggagaacccagttgacttgcctgccacagagcaaaaggagtgagtggaacagagttgcttcttactaggagcacattctttgcctgccttcccttcatcctatcctctttgcttgctctcacctcaggaattgcttggattgctacatggaccccctgagactatcattattacctcctagggccaggaagccaggtaggtagtctgagtcaggattggatcaacagcctcctctcttggggactctcaagagcctgtgttcatctagaagtagtagtttgattctggtttccctcctacagtgtgtcctccgtctctgtgcagctccgtcattaccataggggacttggttttagactctgatgaggaagaaaatggccagggggaaggaaaggtgagtgggaaggagcagaaagctgggaaaggggatgggtagaacaagactgagaaatccacatgcttcagaattcagagggttcagggaatggtttcggatagtaggctctccctgctcccttctctacaggaatctctggaaaactatcagaagacaaagtttgacaccttgatacccactctctgtgaatacctacccccttctggccacggtgccatacctgtttcttcctgtgactgtagagacagttctagacctttgtgatagaactaaaatgctctctgtactctagtctcctgcctcctcagctctgcaagtagtttagtaggaatgaagtggaagtccaggcttggattgcctaactacactgctaaaaatatttgtaatccttaataattaaactttggatttgttaaaa

SEQ ID NO: 456492 - DNA, 1506 bp, Homo sapiens
ggctagtacgaggctggtttgaatcggccgaggcagaggctcctgtggatttggcctcgaagctgcaggaacttgaacaagagtatggggaaccctttctggctgccatggaaaagctgctttttgagtacttgtgtcagctggagaaagcactgcctacaccgcaggcacagcagcttcaggatgtgctgagttggatgcagcctggagtctctatcacctcttctcttgcctggagacaatatggtgtggacatggggtggctgcttccagagtgctctgttactgactcagtgaacctggctgagcccatggaacagaatcctcctcagcaacaaagactagcactccacaatcccctgccaaaagccaagcctggcacacatcttcctcagggaccatcttcaaggacgcacccagaacctctagctggccgacacttcaatctggcccctctaggccgacgaagagttcagtcccaatgggcctccactaggggaggccataaggagcgccccacagtcatgctgtttccctttaggaatctcggctcaccaacccaggtcatatctaagcctgagagcaaggaagaacatgcgatatacacagcagacctagccatgggcacaagagcagcctccactgggaagtctaagagtccatgccagaccctggggggaagggctctgaaggagaacccagttgacttgcctgccacagagcaaaaggagtgagtggaacagagttgcttcttactaggagcacattctttgcctgccttcccttcatcctatcctctttgcttgctctcacctcaggaattgcttggattgctacatggaccccctgagactatcattattacctcctagggccaggaagccaggtaggtagtctgagtcaggattggatcaacagcctcctctcttggggactctcaagagcctgtgttcatctagaagtagtagtttgattctggtttccctcctacagtgtgtcctccgtctctgtgcagctccgtcattaccataggggacttggttttagactctgatgaggaagaaaatggccagggggaaggaaaggtgagtgggaaggagcagaaagctgggaaaggggatgggtagaacaagactgagaaatccacatgcttcagaattcagagggttcagggaatggtttcggatagtaggctctccctgctcccttctctacaggaatctctggaaaactatcagaagacaaagtttgacaccttgatacccactctctgtgaatacctacccccttctggccacggtgccatacctgtttcttcctgtgactgtagagacagttctagacctttgtgatagaactaaaatgctctctgtactctagtctcctgcctcctcagctctgcaagtagtttagtaggaatgaagtggaagtccaggcttggattgcctaactacactgctaaaaatatttgtaatccttaataattaaactttggatttgttaaaa

SEQ ID NO: 456493 - DNA, 1639 bp, Homo sapiens
ccggggcaagggaagctagtagcggagccggaagtgaggcaccctcgggctcgagacagcggcgacgtttaaagctgagcgacccagtgccactggagacggtcagcttctccactcaggctcctccagcccgagccagaagaccccctcccccagaattctgggggccgatggaagggagccgagtcagatcgcgaggtacccagagccgacagaccggagcgacagggagttgccagaagccccgcccctaggagtgatcggaaagcctcacccatccgggtgaggaacccggagggaccgcctccgggcggagcccgccgaccatggctacgcccctggtggcgggtcccgcagctctacgcttcgccgccgcggctagctggcaggttgtgcgcggacgctgcgtggaacattttccgcgagtactggagtttctgcgatctctgcgcgctgttgcccctggcttggttcgctaccggcaccacgaacgcctttgtatgggcctaaaggccaaggtggtggtggagctgatcctgcagggccggccttgggcccaagtcctgaaagccctgaatcaccactttccagaatctggacctatagtgcgggatcccaaggctacaaagcaggatctgaggaagattttggaggcacaggaaactttttaccagcaggtgaagcagctgtcagaggctcctgtggatttggcctcgaagctgcaggaacttgaacaagagtatggggaaccctttctggctgccatggaaaagctgctttttgagtacttgtgtcagctggagaaagcactgcctacaccgcaggcacagcagcttcaggatgtgctgagttggatgcagcctggagtctctatcacctcttctcttgcctggagacaatatggtgtggacatggggtggctgcttccagagtgctctgttactgactcagtgaacctggctgagcccatggaacagaatcctcctcagcaacaaagactagcactccacaatcccctgccaaaagccaagcctggcacacatcttcctcagggaccatcttcaaggacgcacccagaacctctagctggccgacacttcaatctggcccctctaggccgacgaagagttcagtcccaatgggcctccactaggggaggccataaggagcgccccacagtcatgctgtttccctttaggaatctcggctcaccaacccaggtcatatctaagcctgagagcaaggaagaacatgcgatatacacagcagacctagccatgggcacaagagcagcctccactgggaagtctaagagtccatgccagaccctggggggaagggctctgaaggagaacccagttgacttgcctgccacagagcaaaaggagtgagtggaacagagttgcttcttactaggagcacattctttgcctgccttcccttcatcctatcctctttgcttgctctcacctcaggaattgcttggattgctacatggaccccctgagactatcattattacctcctagggccaggaagccatatgggtcagccagtagtgggtcagccagtagtgggtcagccagtagtgggtcagccagtagtgggtcagccagtagtgggtcagccagtagtgagt

SEQ ID NO: 456494 - DNA, 2060 bp, Homo sapiens
ccggggcaagggaagctagtagcggagccggaagtgaggcaccctcgggctcgagacagcggcgacgtttaaagctgagcgacccagtgccactggagacggtcagcttctccactcaggctcctccagcccgagccagaagaccccctcccccagaattctgggggccgatggaagggagccgagtcagatcgcgaggtacccagagccgacagaccggagcgacagggagttgccagaagccccgcccctaggagtgatcggaaagcctcacccatccgggtgaggaacccggagggaccgcctccgggcggagcccgccgaccatggctacgcccctggtggcgggtcccgcagctctacgcttcgccgccgcggctagctggcaggttgtgcgcggacgctgcgtggaacattttccgcgagtactggagtttctgcgatctctgcgcgctgttgcccctggcttggttcgctaccggcaccacgaacgcctttgtatgggcctaaaggccaaggtggtggtggagctgatcctgcagggccggccttgggcccaagtcctgaaagccctgaatcaccactttccagaatctggacctatagtgcgggatcccaaggctacaaagcaggatctgaggaagattttggaggcacaggaaactttttaccagcaggtgaagcagctgtcagaggctcctgtggatttggcctcgaagctgcaggaacttgaacaagagtatggggaaccctttctggctgccatggaaaagctgctttttgagtacttgtgtcagctggagaaagcactgcctacaccgcaggcacagcagcttcaggatgtgctgagttggatgcagcctggagtctctatcacctcttctcttgcctggagacaatatggtgtggacatggggtggctgcttccagagtgctctgttactgactcagtgaacctggctgagcccatggaacagaatcctcctcagcaacaaagactagcactccacaatcccctgccaaaagccaagcctggcacacatcttcctcagggaccatcttcaaggacgcacccagaacctctagctggccgacacttcaatctggcccctctaggccgacgaagagttcagtcccaatgggcctccactaggggaggccataaggagcgccccacagtcatgctgtttccctttaggaatctcggctcaccaacccaggtcatatctaagcctgagagcaaggaagaacatgcgatatacacagcagacctagccatgggcacaagagcagcctccactgggaagtctaagagtccatgccagaccctggggggaagggctctgaaggagaacccagttgacttgctcaggaattgcttggattgctacatggaccccctgagactatcattattacctcctagggccaggaagccaggtaggtagtctgagtcaggattggatcaacagcctcctctcttggggactctcaagagcctgtgttcatctagaagtagtagtttgattctggtttccctcctacagtgtgtcctccgtctctgtgcagctccgtcattaccataggggacttggttttagactctgatgaggaagaaaatggccagggggaaggaaaggtgagtgggaaggagcagaaagctgggaaaggggatgggtagaacaagactgagaaatccacatgcttcagaattcagagggttcagggaatggtttcggatagtaggctctccctgctcccttctctacaggaatctctggaaaactatcagaagacaaagtttgacaccttgatacccactctctgtgaatacctacccccttctggccacggtgccatacctgtttcttcctgtgactgtagagacagttctagacctttgtgatagaactaaaatgctctctgtactctagtctcctgcctcctcagctctgcaagtagtttagtaggaatgaagtggaagtccaggcttggattgcctaactacactgctaaaaatatttgtaatccttaataattaaactttggatttgttaaaa

SEQ ID NO: 456495 - DNA, 2198 bp, Homo sapiens
ccggggcaagggaagctagtagcggagccggaagtgaggcaccctcgggctcgagacagcggcgacgtttaaagctgagcgacccagtgccactggagacggtcagcttctccactcaggctcctccagcccgagccagaagaccccctcccccagaattctgggggccgatggaagggagccgagtcagatcgcgaggtacccagagccgacagaccggagcgacagggagttgccagaagccccgcccctaggagtgatcggaaagcctcacccatccgggtgaggaacccggagggaccgcctccgggcggagcccgccgaccatggctacgcccctggtggcgggtcccgcagctctacgcttcgccgccgcggctagctggcaggttgtgcgcggacgctgcgtggaacattttccgcgagtactggagtttctgcgatctctgcgcgctgttgcccctggcttggttcgctaccggcaccacgaacgcctttgtatgggcctaaaggccaaggtggtggtggagctgatcctgcagggccggccttgggcccaagtcctgaaagccctgaatcaccactttccagaatctggacctatagtgcgggatcccaaggctacaaagcaggatctgaggaagattttggaggcacaggaaactttttaccagcaggtgaagcagctgtcagaggctcctgtggatttggcctcgaagctgcaggaacttgaacaagagtatggggaaccctttctggctgccatggaaaagctgctttttgagtacttgtgtcagctggagaaagcactgcctacaccgcaggcacagcagcttcaggatgtgctgagttggatgcagcctggagtctctatcacctcttctcttgcctggagacaatatggtgtggacatggggtggctgcttccagagtgctctgttactgactcagtgaacctggctgagcccatggaacagaatcctcctcagcaacaaagactagcactccacaatcccctgccaaaagccaagcctggcacacatcttcctcagggaccatcttcaaggacgcacccagaacctctagctggccgacacttcaatctggcccctctaggccgacgaagagttcagtcccaatgggcctccactaggggaggccataaggagcgccccacagtcatgctgtttccctttaggaatctcggctcaccaacccaggtcatatctaagcctgagagcaaggaagaacatgcgatatacacagcagacctagccatgggcacaagagcagcctccactgggaagtctaagagtccatgccagaccctggggggaagggctctgaaggagaacccagttgacttgcctgccacagagcaaaaggagtgagtggaacagagttgcttcttactaggagcacattctttgcctgccttcccttcatcctatcctctttgcttgctctcacctcaggaattgcttggattgctacatggaccccctgagactatcattattacctcctagggccaggaagccaggtaggtagtctgagtcaggattggatcaacagcctcctctcttggggactctcaagagcctgtgttcatctagaagtagtagtttgattctggtttccctcctacagtgtgtcctccgtctctgtgcagctccgtcattaccataggggacttggttttagactctgatgaggaagaaaatggccagggggaaggaaaggtgagtgggaaggagcagaaagctgggaaaggggatgggtagaacaagactgagaaatccacatgcttcagaattcagagggttcagggaatggtttcggatagtaggctctccctgctcccttctctacaggaatctctggaaaactatcagaagacaaagtttgacaccttgatacccactctctgtgaatacctacccccttctggccacggtgccatacctgtttcttcctgtgactgtagagacagttctagacctttgtgatagaactaaaatgctctctgtactctagtctcctgcctcctcagctctgcaagtagtttagtaggaatgaagtggaagtccaggcttggattgcctaactacactgctaaaaatatttgtaatccttaataattaaactttggatttgttaaaaaaaaaaaacgaacacgacaaacaaaaaaaacttgt

SEQ ID NO: 456496 - DNA, 1839 bp, Homo sapiens
ccggggcaagggaagctagtagcggagccggaagtgaggcaccctcgggctcgagacagcggcgacgtttaaagctgagcgacccagtgccactggagacggtcagcttctccactcaggctcctccagcccgagccagaagaccccctcccccagaattctgggggccgatggaagggagccgagtcagatcgcgaggtacccagagccgacagaccggagcgacagggagttgccagaagccccgcccctaggagtgatcggaaagcctcacccatccgggtgaggaacccggagggaccgcctccgggcggagcccgccgaccatggctacgcccctggtggcgggtcccgcagctctacgcttcgccgccgcggctagctggcaggttgtgcgcggacgctgcgtggaacattttccgcgagtactggagtttctgcgatctctgcgcgctgttgcccctggcttggttcgctaccggcaccacgaacgcctttgtatgggcctaaaggccaaggtggtggtggagctgatcctgcagggccggccttgggcccaagtcctgaaagccctgaatcaccactttccagaatctggacctatagtgcgggatcccaaggctacaaagcaggatctgaggaagattttggaggcacaggaaactttttaccagcaggtgaagcagctgtcagaggctcctgtggatttggcctcgaagctgcaggaacttgaacaagagtatggggaaccctttctggctgccatggaaaagctgctttttgagtacttgtgtcagctggagaaagcactgcctacaccgcaggcacagcagcttcaggatgtgctgagttggatgcagcctggagtctctatcacctcttctcttgcctggagacaatatggtgtggacatggggtggctgcttccagagtgctctgttactgactcagtgaacctggctgagcccatggaacagaatcctcctcagcaacaaagactagcactccacaatcccctgccaaaagccaagcctggcacacatcttcctcagggaccatcttcaaggacgcacccagaacctctagctggccgacacttcaatctggcccctctaggccgacgaagagttcagtcccaatgggcctccactaggggaggccataaggagcgccccacagtcatgctgtttccctttaggaatctcggctcaccaacccaggtcatatctaagcctgagagcaaggaagaacatgcgatatacacagcagacctagccatgggcacaagagcagcctccactgggaagtctaagagtccatgccagaccctggggggaagggctctgaaggagaacccagttgacttgcctgccacagagcaaaaggatcaggaattgcttggattgctacatggaccccctgagactatcattattacctcctagggccaggaagccatgtgtcctccgtctctgtgcagctccgtcattaccataggggacttggttttagactctgatgaggaagaaaatggccagggggaaggaaaggaatctctggaaaactatcagaagacaaagtttgacaccttgatacccactctctgtgaatacctacccccttctggccacggtgccatacctgtttcttcctgtgactgtagagacagttctagacctttgtgatagaactaaaatgctctctgtactctagtctcctgcctcctcagctctgcaagtagtttagtaggaatgaagtggaagtccaggcttggattgcctaactacactgctaaaaatatttgtaatccttaataattaaactttggatttgttaaaa

SEQ ID NO: 456497 - DNA, 1832 bp, Homo sapiens
cagcttggggatgagactagttggaaaaggtcagcttgccccgaagtggggattctgaattcagtaccgtacaggtggtggtggagctgatcctgcagggccggccttgggcccaagtcctgaaagccctgaatcaccactttccagaatctggacctatagtgcgggatcccaaggctgtgagtaatccccggaacaagccctgaccccagttacacttggtgcagcaaagttgctcctcctgtctactggatgttggtgctaacttctctgtcttctgtatcctcaacagacaaagcaggatctgaggaagattttggaggcacaggaaactttttaccagcaggtgaagcagctgtcagaggctcctgtggatttggcctcgaagctgcaggaacttgaacaagagtatggggaaccctttctggctgccatggaaaagctgctttttgagtacttgtgtcagctggagaaagcactgcctacaccgcaggcacagcagcttcaggatgtgctgagttggatgcagcctggagtctctatcacctcttctcttgcctggagacaatatggtgtggacatggggtggctgcttccagagtgctctgttactgactcagtgaacctggctgagcccatggaacagaatcctcctcagcaacaaagactagcactccacaatcccctgccaaaagccaagcctggcacacatcttcctcagggaccatcttcaaggacgcacccagaacctctagctggccgacacttcaatctggcccctctaggccgacgaagagttcagtcccaatgggcctccactaggggaggccataaggagcgccccacagtcatgctgtttccctttaggaatctcggctcaccaacccaggtcatatctaagcctgagagcaaggaagaacatgcgatatacacagcagacctagccatgggcacaagagcagcctccactgggaagtctaagagtccatgccagaccctggggggaagggctctgaaggagaacccagttgacttgcctgccacagagcaaaaggagtgagtggaacagagttgcttcttactaggagcacattctttgcctgccttcccttcatcctatcctctttgcttgctctcacctcaggaattgcttggattgctacatggaccccctgagactatcattattacctcctagggccaggaagccaggtaggtagtctgagtcaggattggatcaacagcctcctctcttggggactctcaagagcctgtgttcatctagaagtagtagtttgattctggtttccctcctacagtgtgtcctccgtctctgtgcagctccgtcattaccataggggacttggttttagactctgatgaggaagaaaatggccagggggaaggaaaggtgagtgggaaggagcagaaagctgggaaaggggatgggtagaacaagactgagaaatccacatgcttcagaattcagagggttcagggaatggtttcggatagtaggctctccctgctcccttctctacaggaatctctggaaaactatcagaagacaaagtttgacaccttgatacccactctctgtgaatacctacccccttctggccacggtgccatacctgtttcttcctgtgactgtagagacagttctagacctttgtgatagaactaaaatgctctctgtactctagtctcctgcctcctcagctctgcaagtagtttagtaggaatgaagtggaagtccaggcttggattgcctaactacactgctaaaaatatttgtaatccttaataattaaactttggatttgttaaaa

SEQ ID NO: 456498 - DNA, 1678 bp, Homo sapiens
ccggggcaagggaagctagtagcggagccggaagtgaggcaccctcgggctcgagacagcggcgacgtttaaagctgagcgacccagtgccactggagacggtcagcttctccactcaggctcctccagcccgagccagaagaccccctcccccagaattctgggggccgatggaagggagccgagtcagatcgcgaggtacccagagccgacagaccggagcgacagggagttgccagaagccccgcccctaggagtgatcggaaagcctcacccatccgggtgaggaacccggagggaccgcctccgggcggagcccgccgaccatggctacgcccctggtggcgggtcccgcagctctacgcttcgccgccgcggctagctggcaggttgtgcgcggacgctgcgtggaacattttccgcgagtactggagtttctgcgatctctgcgcgctgttgcccctggcttggttcgctaccggcaccacgaacgcctttgtatgggcctaaaggccaaggtggtggtggagctgatcctgcagggccggccttgggcccaagtcctgaaagccctgaatcaccactttccagaatctggacctatagtgcgggatcccaaggctacaaagcaggatctgaggaagattttggaggcacaggaaactttttaccagcaggtgaagcagctgtcagaggctcctgtggatttggcctcgaagctgcaggaacttgaacaagagtatggggaaccctttctggctgccatggaaaagctgctttttgagtacttgtgtcagctggagaaagcactgcctacaccgcaggcacagcagcttcaggatgtgctgagttggatgcagcctggagtctctatcacctcttctcttgcctggagacaatatggtgtggacatggggtggctgcttccagagtgctctgttactgactcagtgaacctggctgagcccatggaacagaatcctcctcagcaacaaagactagcactccacaatcccctgccaaaagccaagcctggcacacatcttcctcagggaccatcttcaaggacgcacccagaacctctagctggccgacacttcaatctggcccctctaggccgacgaagagttcagtcccaatgggcctccactaggggaggccataaggagcgccccacagtcatgctgtttccctttaggaatctcggctcaccaacccaggtcatatctaagcctgagagcaaggaagaacatgcgatatacacagcagacctagccatgggcacaagagcagcctccactgggaagtctaagagtccatgccagaccctggggggaagggctctgaaggagaacccagttgacttgcctgccacagagcaaaaggagtgagtggaacagagttgcttcttactaggagcacattctttgcctgccttcccttcatcctatcctctttgcttgctctcacctcaggaattgcttggattgctacatggaccccctgagactatcattattacctcctagggccaggaagccaggtaggtagtctgagtcaggattggatcaacagcctcctctcttggggactctcaagagcctgtgttcctggtttgagtaagttaatgtcctgatatttcttgtgcaggggtgggtggagaacgggggtcctctag

SEQ ID NO: 456499 - DNA, 1716 bp, Homo sapiens
ccggggcaagggaagctagtagcggagccggaagtgaggcaccctcgggctcgagacagcggcgacgtttaaagctgagcgacccagtgccactggagacggtcagcttctccactcaggctcctccagcccgagccagaagaccccctcccccagaattctgggggccgatggaagggagccgagtcagatcgcgaggtacccagagccgacagaccggagcgacagggagttgccagaagccccgcccctaggagtgatcggaaagcctcacccatccgggtgaggaacccggagggaccgcctccgggcggagcccgccgaccatggctacgcccctggtggcgggtcccgcagctctacgcttcgccgccgcggctagctggcaggttgtgcgcggacgctgcgtggaacattttccgcgagtactggagtttctgcgatctctgcgcgctgttgcccctggcttggttcgctaccggcaccacgaacgcctttgtatgggcctaaaggccaaggtggtggtggagctgatcctgcagggccggccttgggcccaagtcctgaaagccctgaatcaccactttccagaatctggacctatagtgcgggatcccaaggctacaaagcaggatctgaggaagattttggaggcacaggaaactttttaccagcaggtgaagcagctgtcagaggctcctgtggatttggcctcgaagctgcaggaacttgaacaagagtatggggaaccctttctggctgccatggaaaagctgctttttgagtacttgtgtcagctggagaaagcactgcctacaccgcaggcacagcagcttcaggatgtgctgagttggatgcagcctggagtctctatcacctcttctcttgcctggagacaatatggtgtggacatggggtggctgcttccagagtgctctgttactgactcagtgaacctggctgagcccatggaacagaatcctcctcagcaacaaagactagcactccacaatcccctgccaaaagccaagcctggcacacatcttcctcagggaccatcttcaaggacgcacccagaacctctagctggccgacacttcaatctggcccctctaggccgacgaagagttcagtcccaatgggcctccactaggggaggccataaggagcgccccacagtcatgctgtttccctttaggaatctcggctcaccaacccaggtcatatctaagcctgagagcaaggaagaacatgcgatatacacagcagacctagccatgggcacaagagcagcctccactgggaagtctaagagtccatgccagaccctggggggaagggctctgaaggagaacccagttgacttgcctgccacagagcaaaaggagtgagtggaacagagttgcttcttactaggagcacattctttgcctgccttcccttcatcctatcctctttgcttgctctcacctcaggaattgcttggattgctacatggaccccctgagactatcattattacctcctagggccaggaagccaacagttctagacctttgtgatagaactaaaatgctctctgtactctagtctcctgcctcctcagctctgcaagtagtttagtaggaatgaagtggaagtccaggcttggattgcctaactacactgctaaaaatatttgtaatccttaataattaaactttggatttgttaaaa

SEQ ID NO: 456500 - DNA, 4524 bp, Homo sapiens
cctggtcgtcctccttgggttcgggtgaaagcgcctgggggttcagtgggccatgatccccgagctgctggagaactgaaggcggacagtctcctgcgaaaccaggcaatggcggagctggagtttgttcagatcatcatcatcgtggtggtgatgatggtgatggtggtggtgatcacgtgcctgctgagccactacaagctgtctgcacggtccttcatcagccggcacagccaggggcggaggagagaagatgccctgtcctcagaaggatgcctgtggccctcggagagcacagtgtcaggcaacggaatcccagagccgcaggtctacgccccgcctcggcccaccgaccgcctggccgtgccgcccttcgcccagcgggagcgcttccaccgcttccagcccacctatccgtacctgcagcacgagatcgacctgccgcccaccatctcgctgtcagacggggaggagcccccaccctaccagggcccctgcaccctccagcttcgggaccccgagcagcagctggaactgaaccgggagtcggtgcgcgcacccccaaacagaaccatcttcgacagtgacctgatggatagtgccaggctgggcggcccctgcccccccagcagtaactcgggcatcagcgccacgtgctacggcagcggcgggcgcatggaggggccgccgcccacctacagcgaggtcatcggccactacccggggtcctccttccagcaccagcagagcagtgggccgccctccttgctggaggggacccggctccaccacacacacatcgcgcccctagagagcgcagccatctggagcaaagagaaggataaacagaaaggacaccctctctagggtccccaggggggccgggctggggctgcgtaggtgaaaaggcagaacactccgcgcttcttagaagaggagtgagaggaaggcggggggcgcagcaacgcatcgtgtggccctcccctcccacctccctgtgtataaatatttacatgtgatgtctggtctgaatgcacaagctaagagagcttgcaaaaaaaaaaagaaaaaagaaaaaaaaaaaccacgtttctttgttgagctgtgtcttgaaggcaaaagaaaaaaaatttctacagtagtctttcttgtttctagttgagctgcgtgcgtgaatgcttattttcttttgtttatgataatttcacttaactttaaagacatatttgcacaaaacctttgtttaaagatctgcaatattatatatataaatatatataagataagagaaactgtatgtgcgagggcaggagtatttttgtattagaagaggcctattaaaaaaaaaagttgttttctgaactagaagaggaaaaaaatggcaatttttgagtgccaagtcagaaagtgtgtattaccttgtaaagaaaaaaattacaaagcaggggtttagagttatttatataaatgttgagattttgcactattttttaatataaatatgtcagtgcttgcttgatggaaacttctcttgtgtctgttgagactttaagggagaaatgtcggaatttcagagtcgcctgacggcagagggtgagcccccgtggagtctgcagagaggccttggccaggagcggcgggctttcccgaggggccactgtccctgcagagtggatgcttctgcctagtgacaggttatcaccacgttatatattccctaccgaaggagacaccttttcccccctgacccagaacagcctttaaatcacaagcaaaataggaaagttaaccacggaggcaccgagttccaggtagtggttttgcctttcccaaaaatgaaaataaactgttaccgaaggaattagtttttcctcttcttttttccaactgtgaaggtccccgtggggtggagcatggtgcccctcacaagccgcagcggctggtgcccgggctaccagggacatgccagagggctcgatgacttgtctctgcagggcgctttggtggttgttcagctggctaaaggttcaccggtgaaggcaggtgcggtaactgccgcactggaccctaggaagccccaggtattcgcaatctgacctcctcctgtctgtttcccttcacggatcaattctcacttaagaggccaataaacaacccaacatgaaaaggtgacaagcctgggtttctcccaggataggtgaaagggttaaaatgagtaaagcagttgagcaaacaccaacccgagcttcgggcgcagaattcttcaccttctcttcccctttccatctcctttccccgcggaaacaacgcttcccttctggtgtgtctgttgatctgtgttttcatttacatctctcttagactccgctcttgttctccaggttttcaccagatagatttggggttggcgggacctgctggtgacgtgcaggtgaaggacaggaaggggcatgtgagcgtaaatagaggtgaccagaggagagcatgaggggtggggctttgggacccaccggggccagtggctggagcttgaagtctttcctccccatgggggtgggagggcccccagctggaagagcagactcccagctgctaccccctcccttcccatgggagtggctttccattttgggcagaatgctgactagtagactaacataaaagatataaaaggcaataactattgtttgtgagcaacttttttataacttccaaaacaaaaacctgagcacagttttgaagttctagccactcgagctcatgcatgtgaaacgtgtgctttacgaaggtggcagctgacagacgtgggctctgcatgccgccagcctagtagaaagttctcgttcattggcaacagcagaacctgcctctccgtgaagtcgtcagcctaaaatttgtttctctcttgaagaggattctttgaaaaggtcctgcagagaaatcagtacaggttatcccgaaaggtacaaggacgcacttgtaaagatgattaaaacgtatctttcctttatgtgacgcgtctctagtgccttactgaagaagcagtgacactcccgtcgctcggtgaggacgttcccggacagtgcctcactcacctgggactggtatcccctcccagggtccaccaagggctcctgcttttcagacaccccatcatcctcgcgcgtcctcaccctgtctctaccagggaggtgcctagcttggtgaggttactcctgctcctccaacctttttttgccaaggtttgtacacgactcccatctaggctgaaaacctagaagtggaccttgtgtgtgtgcatggtgtcagcccaaagccaggctgagacagtcctcatatcctcttgagccaaactgtttgggtctcgttgcttcatggtatggtctggatttgtgggaatggctttgcgtgagaaaggggaggagagtggttgctgccctcagccggcttgaggacagagcctgtccctctcatgacaactcagtgttgaagcccagtgtcctcagcttcatgtccagtggatggcagaagttcatggggtagtggcctctcaaaggctgggcgcatcccaagacagccagcaggttgtctctggaaacgaccagagttaagctctcggcttctctgctgagggtgcaccctttcctctagatggtagttgtcacgttatctttgaaaactcttggactgctcctgaggaggccctcttttccagtaggaagttagatgggggttctcagaagtggctgattggaaggggacaagcttcgtttcaggggtctgccgttccatcctggttcagagaaggccgagcgtggctttctctagccttgtcactgtctccctgcctgtcaatcaccacctttcctccagaggaggaaaattatctcccctgcaaagcccggttctacacagatttcacaaattgtgctaagaaccgtccgtgttctcagaaagcccagtgtttttgcaaagaatgaaaagggaccccatatgtagcaaaaatcagggctgggggagagccgggttcattccctgtcctcattggtcgtccctatgaattgtacgtttcagagaaattttttttcctatgtgcaacacgaagcttccagaaccataaaatatcccgtcgataaggaaagaaaatgtcgttgttgttgtttttctggaaactgcttgaaatcttgctgtactatagagctcagaaggacacagcccgtcctcccctgcctgcctgattccatggctgttgtgctgattccaatgctttcacgttggttcctggcgtgggaactgctctcctttgcagccccatttcccaagctctgttcaagttaaacttatgtaagctttccgtggcatgcggggcgcgcacccacgtccccgctgcgtaagactctgtatttggatgccaatccacaggcctgaagaaactgcttgttgtgtatcagtaatcattagtggcaatgatgacattctgaaaagctgcaatacttatacaataaattttacaattctttggaa

SEQ ID NO: 456501 - DNA, 5154 bp, Homo sapiens
cctggtcgtcctccttgggttcgggtgaaagcgcctgggggttcagtgggccatgatccccgagctgctggagaactgaaggcggacagtctcctgcgaaaccaggcaatggcggagctggagtttgttcagatcatcatcatcgtggtggtgatgatggtgatggtggtggtgatcacgtgcctgctgagccactacaagctgtctgcacggtccttcatcagccggcacagccaggggcggaggagagaagatgccctgtcctcagaaggatgcctgtggccctcggagagcacagtgtcaggcaacggaatcccagagccgcaggtctacgccccgcctcggcccaccgaccgcctggccgtgccgcccttcgcccagcgggagcgcttccaccgcttccagcccacctatccgtacctgcagcacgagatcgacctgccgcccaccatctcgctgtcagacggggaggagcccccaccctaccagggcccctgcaccctccagcttcgggaccccgagcagcagctggaactgaaccgggagtcggtgcgcgcacccccaaacagaaccatcttcgacagtgacctgatggatagtgccaggctgggcggcccctgcccccccagcagtaactcgggcatcagcgccacgtgctacggcagcggcgggcgcatggaggggccgccgcccacctacagcgaggtcatcggccactacccggggtcctccttccagcaccagcagagcagtgggccgccctccttgctggaggggacccggctccaccacacacacatcgcgcccctagagagcgcagccatctggagcaaagagaaggataaacagaaaggacaccctctctagggtccccaggggggccgggctggggctgcgtaggtgaaaaggcagaacactccgcgcttcttagaagaggagtgagaggaaggcggggggcgcagcaacgcatcgtgtggccctcccctcccacctccctgtgtataaatatttacatgtgatgtctggtctgaatgcacaagctaagagagcttgcaaaaaaaaaaagaaaaaagaaaaaaaaaaaccacgtttctttgttgagctgtgtcttgaaggcaaaagaaaaaaaatttctacagtagtctttcttgtttctagttgagctgcgtgcgtgaatgcttattttcttttgtttatgataatttcacttaactttaaagacatatttgcacaaaacctttgtttaaagatctgcaatattatatatataaatatatataagataagagaaactgtatgtgcgagggcaggagtatttttgtattagaagaggcctattaaaaaaaaaagttgttttctgaactagaagaggaaaaaaatggcaatttttgagtgccaagtcagaaagtgtgtattaccttgtaaagaaaaaaattacaaagcaggggtttagagttatttatataaatgttgagattttgcactattttttaatataaatatgtcagtgcttgcttgatggaaacttctcttgtgtctgttgagactttaagggagaaatgtcggaatttcagagtcgcctgacggcagagggtgagcccccgtggagtctgcagagaggccttggccaggagcggcgggctttcccgaggggccactgtccctgcagagtggatgcttctgcctagtgacaggttatcaccacgttatatattccctaccgaaggagacaccttttcccccctgacccagaacagcctttaaatcacaagcaaaataggaaagttaaccacggaggcaccgagttccaggtagtggttttgcctttcccaaaaatgaaaataaactgttaccgaaggaattagtttttcctcttcttttttccaactgtgaaggtccccgtggggtggagcatggtgcccctcacaagccgcagcggctggtgcccgggctaccagggacatgccagagggctcgatgacttgtctctgcagggcgctttggtggttgttcagctggctaaaggttcaccggtgaaggcaggtgcggtaactgccgcactggaccctaggaagccccaggtattcgcaatctgacctcctcctgtctgtttcccttcacggatcaattctcacttaagaggccaataaacaacccaacatgaaaaggtgacaagcctgggtttctcccaggataggtgaaagggttaaaatgagtaaagcagttgagcaaacaccaacccgagcttcgggcgcagaattcttcaccttctcttcccctttccatctcctttccccgcggaaacaacgcttcccttctggtgtgtctgttgatctgtgttttcatttacatctctcttagactccgctcttgttctccaggttttcaccagatagatttggggttggcgggacctgctggtgacgtgcaggtgaaggacaggaaggggcatgtgagcgtaaatagaggtgaccagaggagagcatgaggggtggggctttgggacccaccggggccagtggctggagcttgaagtctttcctccccatgggggtgggagggcccccagctggaagagcagactcccagctgctaccccctcccttcccatgggagtggctttccattttgggcagaatgctgactagtagactaacataaaagatataaaaggcaataactattgtttgtgagcaacttttttataacttccaaaacaaaaacctgagcacagttttgaagttctagccactcgagctcatgcatgtgaaacgtgtgctttacgaaggtggcagctgacagacgtgggctctgcatgccgccagcctagtagaaagttctcgttcattggcaacagcagaacctgcctctccgtgaagtcgtcagcctaaaatttgtttctctcttgaagaggattctttgaaaaggtcctgcagagaaatcagtacaggttatcccgaaaggtacaaggacgcacttgtaaagatgattaaaacgtatctttcctttatgtgacgcgtctctagtgccttactgaagaagcagtgacactcccgtcgctcggtgaggacgttcccggacagtgcctcactcacctgggactggtatcccctcccagggtccaccaagggctcctgcttttcagacaccccatcatcctcgcgcgtcctcaccctgtctctaccagggaggtgcctagcttggtgaggttactcctgctcctccaacctttttttgccaaggtttgtacacgactcccatctaggctgaaaacctagaagtggaccttgtgtgtgtgcatggtgtcagcccaaagccaggctgagacagtcctcatatcctcttgagccaaactgtttgggtctcgttgcttcatggtatggtctggatttgtgggaatggctttgcgtgagaaaggggaggagagtggttgctgccctcagccggcttgaggacagagcctgtccctctcatgacaactcagtgttgaagcccagtgtcctcagcttcatgtccagtggatggcagaagttcatggggtagtggcctctcaaaggctgggcgcatcccaagacagccagcaggttgtctctggaaacgaccagagttaagctctcggcttctctgctgagggtgcaccctttcctctagatggtagttgtcacgttatctttgaaaactcttggactgctcctgaggaggccctcttttccagtaggaagttagatgggggttctcagaagtggctgattggaaggggacaagcttcgtttcaggggtctgccgttccatcctggttcagagaaggccgagcgtggctttctctagccttgtcactgtctccctgcctgtcaatcaccacctttcctccagaggaggaaaattatctcccctgcaaagcccggttctacacagatttcacaaattgtgctaagaaccgtccgtgttctcagaaagcccagtgtttttgcaaagaatgaaaagggaccccatatgtagcaaaaatcagggctgggggagagccgggttcattccctgtcctcattggtcgtccctatgaattgtacgtttcagagaaattttttttcctatgtgcaacacgaagcttccagaaccataaaatatcccgtcgataaggaaagaaaatgtcgttgttgttgtttttctggaaactgcttgaaatcttgctgtactatagagctcagaaggacacagcccgtcctcccctgcctgcctgattccatggctgttgtgctgattccaatgctttcacgttggttcctggcgtgggaactgctctcctttgcagccccatttcccaagctctgttcaagttaaacttatgtaagctttccgtggcatgcggggcgcgcacccacgtccccgctgcgtaagactctgtatttggatgccaatccacaggcctgaagaaactgcttgttgtgtatcagtaatcattagtggcaatgatgacattctgaaaagctgcaatacttatacaataaattttacaattctttggaaaaaacacaaaaaacaacaaaaacaaacaaaaaaaaacaaaaacacaaaacaacaaaaaaacaaacaacaaaacacaccaataaacaacaaaaccacaccaaaacaaaaaaaaacacacacacaacaaaaaaaaaaaagcagacgcgcggacgcgcgccaaaaggaaaaaaacacaactcaaaaaaagacgagcagacaaccagactgccgccgccgaccaataagtacagacgaaaaaagcaggaggcacccaaaaagaaggagctctttactaaaacaacacgagaaaagacgagaaagacgcgttttcaattcaaaacaaaagcgagtagagatcaggggcaagaataaacacctggtgttagggttatatatgtatctaagaggaagccagcccttccactttgcttgggtgcgcgataacaacaatagattcagaagaatataactcctagtacgtacgcagagcggttatcccccccggcggcgagccaacaaaaacgagaacccctagacgagacgataattgggtgtggacaaacaccactccacgtaagtgtgagagagagacgtagagataagaatctagcgtccaaaaatatttgcttctacctcaaatagtattcttcg

SEQ ID NO: 456502 - DNA, 4801 bp, Homo sapiens
aacccgatctccttggacttgaatgaggaggaggaggcggcggcggcggcggcggcggaggcgctcggctggggaaagctagcggcagaggctcagccccggcggcagcgcgcgccccgctgccagcccattttccggacgccacccgcgggcactgccgacgcccccggggctgccgaggggaggccgggggggcgcagcggagcgcggtcccgcgcactgagccccgcggcgccccgggaacttggcggcgacccgagcccggcgagccggggcgcgcctcccccgccgcgcgcctcctgcatgcggggccccagctccgggcgccggccggagccccccccggccgcccccgagccccccgcgccccgcgccgcgccgccgcgccgtccatgcaccgcttgatgggggtcaacagcaccgccgccgccgccgccgggcagcccaatgtctcctgcacgtgcaactgcaaacgctctttgttccagagcatggagatcacggagctggagtttgttcagatcatcatcatcgtggtggtgatgatggtgatggtggtggtgatcacgtgcctgctgagccactacaagctgtctgcacggtccttcatcagccggcacagccaggggcggaggagagaagatgccctgtcctcagaaggatgcctgtggccctcggagagcacagtgtcaggcaacggaatcccagagccgcaggtctacgccccgcctcggcccaccgaccgcctggccgtgccgcccttcgcccagcgggagcgcttccaccgcttccagcccacctatccgtacctgcagcacgagatcgacctgccgcccaccatctcgctgtcagacggggaggagcccccaccctaccagggcccctgcaccctccagcttcgggaccccaatgtctcctgcacgtgcaactgcaaacgctctttgttccagagcatggagatcacggagctggagtttgttcagtcatcggccactacccggggtcctccttccagcaccagcagagcagtgggccgccctccttgctggaggggacccggctccaccacacacacatcgcgcccctagagagcgcagccatctggagcaaagagaaggataaacagaaaggacaccctctctagggtccccaggggggccgggctggggctgcgtaggtgaaaaggcagaacactccgcgcttcttagaagaggagtgagaggaaggcggggggcgcagcaacgcatcgtgtggccctcccctcccacctccctgtgtataaatatttacatgtgatgtctggtctgaatgcacaagctaagagagcttgcaaaaaaaaaaagaaaaaagaaaaaaaaaaaccacgtttctttgttgagctgtgtcttgaaggcaaaagaaaaaaaatttctacagtagtctttcttgtttctagttgagctgcgtgcgtgaatgcttattttcttttgtttatgataatttcacttaactttaaagacatatttgcacaaaacctttgtttaaagatctgcaatattatatatataaatatatataagataagagaaactgtatgtgcgagggcaggagtatttttgtattagaagaggcctattaaaaaaaaaagttgttttctgaactagaagaggaaaaaaatggcaatttttgagtgccaagtcagaaagtgtgtattaccttgtaaagaaaaaaattacaaagcaggggtttagagttatttatataaatgttgagattttgcactattttttaatataaatatgtcagtgcttgcttgatggaaacttctcttgtgtctgttgagactttaagggagaaatgtcggaatttcagagtcgcctgacggcagagggtgagcccccgtggagtctgcagagaggccttggccaggagcggcgggctttcccgaggggccactgtccctgcagagtggatgcttctgcctagtgacaggttatcaccacgttatatattccctaccgaaggagacaccttttcccccctgacccagaacagcctttaaatcacaagcaaaataggaaagttaaccacggaggcaccgagttccaggtagtggttttgcctttcccaaaaatgaaaataaactgttaccgaaggaattagtttttcctcttcttttttccaactgtgaaggtccccgtggggtggagcatggtgcccctcacaagccgcagcggctggtgcccgggctaccagggacatgccagagggctcgatgacttgtctctgcagggcgctttggtggttgttcagctggctaaaggttcaccggtgaaggcaggtgcggtaactgccgcactggaccctaggaagccccaggtattcgcaatctgacctcctcctgtctgtttcccttcacggatcaattctcacttaagaggccaataaacaacccaacatgaaaaggtgacaagcctgggtttctcccaggataggtgaaagggttaaaatgagtaaagcagttgagcaaacaccaacccgagcttcgggcgcagaattcttcaccttctcttcccctttccatctcctttccccgcggaaacaacgcttcccttctggtgtgtctgttgatctgtgttttcatttacatctctcttagactccgctcttgttctccaggttttcaccagatagatttggggttggcgggacctgctggtgacgtgcaggtgaaggacaggaaggggcatgtgagcgtaaatagaggtgaccagaggagagcatgaggggtggggctttgggacccaccggggccagtggctggagcttgaagtctttcctccccatgggggtgggagggcccccagctggaagagcagactcccagctgctaccccctcccttcccatgggagtggctttccattttgggcagaatgctgactagtagactaacataaaagatataaaaggcaataactattgtttgtgagcaacttttttataacttccaaaacaaaaacctgagcacagttttgaagttctagccactcgagctcatgcatgtgaaacgtgtgctttacgaaggtggcagctgacagacgtgggctctgcatgccgccagcctagtagaaagttctcgttcattggcaacagcagaacctgcctctccgtgaagtcgtcagcctaaaatttgtttctctcttgaagaggattctttgaaaaggtcctgcagagaaatcagtacaggttatcccgaaaggtacaaggacgcacttgtaaagatgattaaaacgtatctttcctttatgtgacgcgtctctagtgccttactgaagaagcagtgacactcccgtcgctcggtgaggacgttcccggacagtgcctcactcacctgggactggtatcccctcccagggtccaccaagggctcctgcttttcagacaccccatcatcctcgcgcgtcctcaccctgtctctaccagggaggtgcctagcttggtgaggttactcctgctcctccaacctttttttgccaaggtttgtacacgactcccatctaggctgaaaacctagaagtggaccttgtgtgtgtgcatggtgtcagcccaaagccaggctgagacagtcctcatatcctcttgagccaaactgtttgggtctcgttgcttcatggtatggtctggatttgtgggaatggctttgcgtgagaaaggggaggagagtggttgctgccctcagccggcttgaggacagagcctgtccctctcatgacaactcagtgttgaagcccagtgtcctcagcttcatgtccagtggatggcagaagttcatggggtagtggcctctcaaaggctgggcgcatcccaagacagccagcaggttgtctctggaaacgaccagagttaagctctcggcttctctgctgagggtgcaccctttcctctagatggtagttgtcacgttatctttgaaaactcttggactgctcctgaggaggccctcttttccagtaggaagttagatgggggttctcagaagtggctgattggaaggggacaagcttcgtttcaggggtctgccgttccatcctggttcagagaaggccgagcgtggctttctctagccttgtcactgtctccctgcctgtcaatcaccacctttcctccagaggaggaaaattatctcccctgcaaagcccggttctacacagatttcacaaattgtgctaagaaccgtccgtgttctcagaaagcccagtgtttttgcaaagaatgaaaagggaccccatatgtagcaaaaatcagggctgggggagagccgggttcattccctgtcctcattggtcgtccctatgaattgtacgtttcagagaaattttttttcctatgtgcaacacgaagcttccagaaccataaaatatcccgtcgataaggaaagaaaatgtcgttgttgttgtttttctggaaactgcttgaaatcttgctgtactatagagctcagaaggacacagcccgtcctcccctgcctgcctgattccatggctgttgtgctgattccaatgctttcacgttggttcctggcgtgggaactgctctcctttgcagccccatttcccaagctctgttcaagttaaacttatgtaagctttccgtggcatgcggggcgcgcacccacgtccccgctgcgtaagactctgtatttggatgccaatccacaggcctgaagaaactgcttgttgtgtatcagtaatcattagtggcaatgatgacattctgaaaagctgcaatacttatacaataaattttacaattctttggaa

SEQ ID NO: 456503 - DNA, 3216 bp, Homo sapiens
cctggtcgtcctccttgggttcgggtgaaagcgcctgggggttcagtgggccatgatccccgagctgctggagaactgaaggcggacagtctcctgcgaaaccaggcaatggcggagctggagtttgttcagatcatcatcatcgtggtggtgatgatggtgatggtggtggtgatcacgtgcctgctgagccactacaagctgtctgcacggtccttcatcagccggcacagccaggggcggaggagagaagatgccctgtcctcagaaggatgcctgtggccctcggagagcacagtgtcaggcaacggaatcccagagccgcaggtctacgccccgcctcggcccaccgaccgcctggccgtgccgcccttcgcccagcgggagcgcttccaccgcttccagcccacctatccgtacctgcagcacgagatcgacctgccgcccaccatctcgctgtcagacggggaggagcccccaccctaccagggcccctgcaccctccagcttcgggaccccgagcagcagctggaactgaaccgggagtcggtgcgcgcacccccaaacagaaccatcttcgacagtgacctgatggatagtgccaggctgggcggcccctgcccccccagcagtaactcgggcatcagcgccacgtgctacggcagcggcgggcgcatggaggggccgccgcccacctacagcgaggtcatcggccactacccggggtcctccttccagcaccagcagagcagtgggccgccctccttgctggaggggacccggctccaccacacacacatcgcgcccctagagagcgcagccatctggagcaaagagaaggataaacagaaaggacaccctctctagggtccccaggggggccgggctggggctgcgtaggtgaaaaggcagaacactccgcgcttcttagaagaggagtgagaggaaggcggggggcgcagcaacgcatcgtgtggccctcccctcccacctccctgtgtataaatatttacatgtgatgtctggtctgaatgcacaagctaagagagcttgcaaaaaaaaaaagaaaaaagaaaaaaaaaaaccacgtttctttgttgagctgtgtcttgaaggcaaaagaaaaaaaatttctacagtagtctttcttgtttctagttgagctgcgtgcgtgaatgcttattttcttttgtttatgataatttcacttaactttaaagacatatttgcacaaaacctttgtttaaagatctgcaatattatatatataaatatatataagataagagaaactgtatgtgcgagggcaggagtatttttgtattagaagaggcctattaaaaaaaaaagttgttttctgaactagaagaggaaaaaaatggcaatttttgagtgccaagtcagaaagtgtgtattaccttgtaaagaaaaaaattacaaagcaggggtttagagttatttatataaatgttgagattttgcactattttttaatataaatatgtcagtgcttgcttgatggaaacttctcttgtgtctgttgagactttaagggagaaatgtcggaatttcagagtcgcctgacggcagagggtgagcccccgtggagtctgcagagaggccttggccaggagcggcgggctttcccgaggggccactgtccctgcagagtggatgcttctgcctagtgacaggttatcaccacgttatatattccctaccgaaggagacaccttttcccccctgacccagaacagcctttaaatcacaagcaaaataggaaagttaaccacggaggcaccgagttccaggtagtggttttgcctttcccaaaaatgaaaataaactgttaccgaaggaattagtttttcctcttcttttttccaactgtgaaggtccccgtggggtggagcatggtgcccctcacaagccgcagcggctggtgcccgggctaccagggacatgccagagggctcgatgacttgtctctgcagggcgctttggtggttgttcagctggctaaaggttcaccggtgaaggcaggtgcggtaactgccgcactggaccctaggaagccccaggtattcgcaatctgacctcctcctgtctgtttcccttcacggatcaattctcacttaagaggccaataaacaacccaacatgaaaaggtgacaagcctgggtttctcccaggataggtgaaagggttaaaatgagtaaagcagttgagcaaacaccaacccgagcttcgggcgcagaattcttcaccttctcttcccctttccatctcctttccccgcggaaacaacgcttcccttctggtgtgtctgttgatctgtgttttcatttacatctctcttagactccgctcttgttctccaggttttcaccagatagatttggggttggcgggacctgctggtgacgtgcaggtgaaggacaggaaggggcatgtgagcgtaaatagaggtgaccagaggagagcatgaggggtggggctttgggacccaccggggccagtggctggagcttgaagtctttcctccccatgggggtgggagggcccccagctggaagagcagactcccagctgctaccccctcccttcccatgggagtggctttccattttgggcagaatgctgactagtagactaacataaaagatataaaaggcaataactattgtttgtgagcaacttttttataacttccaaaacaaaaacctgagcacagttttgaagttctagccactcgagctcatgcatgtgaaacgtgtgctttacgaaggtggcagctgacagacgtgggctctgcatgccgccagcctagtagaaagttctcgttcattggcaacagcagaacctgcctctccgtgaagtcgtcagcctaaaatttgtttctctcttgaagaggattctttgaaaaggtcctgcagagaaatcagtacaggttatcccgaaaggtacaaggacgcacttgtaaagatgattaaaacgtatctttcctttatgtgacgcgtctctagtgccttactgaagaagcagtgacactcccgtcgctcggtgaggacgttcccggacagtgcctcactcacctgggactggtatcccctcccagggtccaccaagggctcctgcctctccccctaggcctgatttttgttacatattgtggtcccttttcatttctttgcttttctcttgtcttttttgtct

SEQ ID NO: 456504 - DNA, 4913 bp, Homo sapiens
aacccgatctccttggacttgaatgaggaggaggaggcggcggcggcggcggcggcggaggcgctcggctggggaaagctagcggcagaggctcagccccggcggcagcgcgcgccccgctgccagcccattttccggacgccacccgcgggcactgccgacgcccccggggctgccgaggggaggccgggggggcgcagcggagcgcggtcccgcgcactgagccccgcggcgccccgggaacttggcggcgacccgagcccggcgagccggggcgcgcctcccccgccgcgcgcctcctgcatgcggggccccagctccgggcgccggccggagccccccccggccgcccccgagccccccgcgccccgcgccgcgccgccgcgccgtccatgcaccgcttgatgggggtcaacagcaccgccgccgccgccgccgggcagcccaatgtctcctgcacgtgcaactgcaaacgctctttgttccagagcatggagatcacggagctggagtttgttcagatcatcatcatcgtggtggtgatgatggtgatggtggtggtgatcacgtgcctgctgagccactacaagctgtctgcacggtccttcatcagccggcacagccaggggcggaggagagaagatgccctgtcctcagaaggatgcctgtggccctcggagagcacagtgtcaggcaacggaatcccagagccgcaggtctacgccccgcctcggcccaccgaccgcctggccgtgccgcccttcgcccagcgggagcgcttccaccgcttccagcccacctatccgtacctgcagcacgagatcgacctgccgcccaccatctcgctgtcagacggggaggagcccccaccctaccagggcccctgcaccctccagcttcgggaccccgagcagcagctggaactgaaccgggagtcggtgcgcgcacccccaaacagaaccatcttcgacagtgacctgatggatagtgccaggctgggcggcccctgcccccccagcagtaactcgggcatcagcgccacgtgctacggcagcggcgggcgcatggaggggccgccgcccacctacagcgaggtcatcggccactacccggggtcctccttccagcaccagcagagcagtgggccgccctccttgctggaggggacccggctccaccacacacacatcgcgcccctagagagcgcagccatctggagcaaagagaaggataaacagaaaggacaccctctctagggtccccaggggggccgggctggggctgcgtaggtgaaaaggcagaacactccgcgcttcttagaagaggagtgagaggaaggcggggggcgcagcaacgcatcgtgtggccctcccctcccacctccctgtgtataaatatttacatgtgatgtctggtctgaatgcacaagctaagagagcttgcaaaaaaaaaaagaaaaaagaaaaaaaaaaaccacgtttctttgttgagctgtgtcttgaaggcaaaagaaaaaaaatttctacagtagtctttcttgtttctagttgagctgcgtgcgtgaatgcttattttcttttgtttatgataatttcacttaactttaaagacatatttgcacaaaacctttgtttaaagatctgcaatattatatatataaatatatataagataagagaaactgtatgtgcgagggcaggagtatttttgtattagaagaggcctattaaaaaaaaaagttgttttctgaactagaagaggaaaaaaatggcaatttttgagtgccaagtcagaaagtgtgtattaccttgtaaagaaaaaaattacaaagcaggggtttagagttatttatataaatgttgagattttgcactattttttaatataaatatgtcagtgcttgcttgatggaaacttctcttgtgtctgttgagactttaagggagaaatgtcggaatttcagagtcgcctgacggcagagggtgagcccccgtggagtctgcagagaggccttggccaggagcggcgggctttcccgaggggccactgtccctgcagagtggatgcttctgcctagtgacaggttatcaccacgttatatattccctaccgaaggagacaccttttcccccctgacccagaacagcctttaaatcacaagcaaaataggaaagttaaccacggaggcaccgagttccaggtagtggttttgcctttcccaaaaatgaaaataaactgttaccgaaggaattagtttttcctcttcttttttccaactgtgaaggtccccgtggggtggagcatggtgcccctcacaagccgcagcggctggtgcccgggctaccagggacatgccagagggctcgatgacttgtctctgcagggcgctttggtggttgttcagctggctaaaggttcaccggtgaaggcaggtgcggtaactgccgcactggaccctaggaagccccaggtattcgcaatctgacctcctcctgtctgtttcccttcacggatcaattctcacttaagaggccaataaacaacccaacatgaaaaggtgacaagcctgggtttctcccaggataggtgaaagggttaaaatgagtaaagcagttgagcaaacaccaacccgagcttcgggcgcagaattcttcaccttctcttcccctttccatctcctttccccgcggaaacaacgcttcccttctggtgtgtctgttgatctgtgttttcatttacatctctcttagactccgctcttgttctccaggttttcaccagatagatttggggttggcgggacctgctggtgacgtgcaggtgaaggacaggaaggggcatgtgagcgtaaatagaggtgaccagaggagagcatgaggggtggggctttgggacccaccggggccagtggctggagcttgaagtctttcctccccatgggggtgggagggcccccagctggaagagcagactcccagctgctaccccctcccttcccatgggagtggctttccattttgggcagaatgctgactagtagactaacataaaagatataaaaggcaataactattgtttgtgagcaacttttttataacttccaaaacaaaaacctgagcacagttttgaagttctagccactcgagctcatgcatgtgaaacgtgtgctttacgaaggtggcagctgacagacgtgggctctgcatgccgccagcctagtagaaagttctcgttcattggcaacagcagaacctgcctctccgtgaagtcgtcagcctaaaatttgtttctctcttgaagaggattctttgaaaaggtcctgcagagaaatcagtacaggttatcccgaaaggtacaaggacgcacttgtaaagatgattaaaacgtatctttcctttatgtgacgcgtctctagtgccttactgaagaagcagtgacactcccgtcgctcggtgaggacgttcccggacagtgcctcactcacctgggactggtatcccctcccagggtccaccaagggctcctgcttttcagacaccccatcatcctcgcgcgtcctcaccctgtctctaccagggaggtgcctagcttggtgaggttactcctgctcctccaacctttttttgccaaggtttgtacacgactcccatctaggctgaaaacctagaagtggaccttgtgtgtgtgcatggtgtcagcccaaagccaggctgagacagtcctcatatcctcttgagccaaactgtttgggtctcgttgcttcatggtatggtctggatttgtgggaatggctttgcgtgagaaaggggaggagagtggttgctgccctcagccggcttgaggacagagcctgtccctctcatgacaactcagtgttgaagcccagtgtcctcagcttcatgtccagtggatggcagaagttcatggggtagtggcctctcaaaggctgggcgcatcccaagacagccagcaggttgtctctggaaacgaccagagttaagctctcggcttctctgctgagggtgcaccctttcctctagatggtagttgtcacgttatctttgaaaactcttggactgctcctgaggaggccctcttttccagtaggaagttagatgggggttctcagaagtggctgattggaaggggacaagcttcgtttcaggggtctgccgttccatcctggttcagagaaggccgagcgtggctttctctagccttgtcactgtctccctgcctgtcaatcaccacctttcctccagaggaggaaaattatctcccctgcaaagcccggttctacacagatttcacaaattgtgctaagaaccgtccgtgttctcagaaagcccagtgtttttgcaaagaatgaaaagggaccccatatgtagcaaaaatcagggctgggggagagccgggttcattccctgtcctcattggtcgtccctatgaattgtacgtttcagagaaattttttttcctatgtgcaacacgaagcttccagaaccataaaatatcccgtcgataaggaaagaaaatgtcgttgttgttgtttttctggaaactgcttgaaatcttgctgtactatagagctcagaaggacacagcccgtcctcccctgcctgcctgattccatggctgttgtgctgattccaatgctttcacgttggttcctggcgtgggaactgctctcctttgcagccccatttcccaagctctgttcaagttaaacttatgtaagctttccgtggcatgcggggcgcgcacccacgtccccgctgcgtaagactctgtatttggatgccaatccacaggcctgaagaaactgcttgttgtgtatcagtaatcattagtggcaatgatgacattctgaaaagctgcaatacttatacaataaattttacaattctttggaa

SEQ ID NO: 456505 - DNA, 4190 bp, Homo sapiens
cctggtcgtcctccttgggttcgggtgaaagcgcctgggggttcagtgggccatgatccccgagctgctggagaactgaaggcggacagtctcctgcgaaaccaggcaatggcggagctggagtttgttcagatcatcatcatcgtggtggtgatgatggtgatggtggtggtgatcacgtgcctgctgagccactacaagctgtctgcacggtccttcatcagccggcacagccaggggcggaggagagaagatgccctgtcctcagaaggatgcctgtggccctcggagagcacagtgtcaggcaacggaatcccagagccgcaggtctacgccccgcctcggcccaccgaccgcctggccgtgccgcccttcgcccagcgggagcgcttccaccgcttccagcccacctatccgtacctgcagcacgagatcgacctgccgcccaccatctcgctgtcagacggggaggagcccccaccctaccagggcccctgcaccctccagcttcgggaccccgagcagcagctggaactgaaccgggagtcggtgcgcgcacccccaaacagaaccatcttcgacagtgacctgatggatagtgccaggctgggcggcccctgcccccccagcagtaactcgggcatcagcgccacgtgctacggcagcggcgggcgcatggaggggccgccgcccacctacagcgaggtcatcggccactacccggggtcctccttccagcaccagcagagcagtgggccgccctccttgctggaggggacccggctccaccacacacacatcgcgcccctagagagcgcagccatctggagcaaagagaaggataaacagaaaggacaccctctctagggtccccaggggggccgggctggggctgcgtaggtgaaaaggcagaacactccgcgcttcttagaagaggagtgagaggaaggcggggggcgcagcaacgcatcgtgtggccctcccctcccacctccctgtgtataaatatttacatgtgatgtctggtctgaatgcacaagctaagagagcttgcaaaaaaaaaaagaaaaaagaaaaaaaaaaaccacgtttctttgttgagctgtgtcttgaaggcaaaagaaaaaaaatttctacagtagtctttcttgtttctagttgagctgcgtgcgtgaatgcttattttcttttgtttatgataatttcacttaactttaaagacatatttgcacaaaacctttgtttaaagatctgcaatattatatatataaatatatataagataagagaaactgtatgtgcgagggcaggagtatttttgtattagaagaggcctattaaaaaaaaaagttgttttctgaactagaagaggaaaaaaatggcaatttttgagtgccaagtcagaaagtgtgtattaccttgtaaagaaaaaaattacaaagcaggggtttagagttatttatataaatgttgagattttgcactattttttaatataaatatgtcagtgcttgcttgatggaaacttctcttgtgtctgttgagactttaagggagaaatgtcggaatttcagagtcgcctgacggcagagggtgagcccccgtggagtctgcagagaggccttggccaggagcggcgggctttcccgaggggccactgtccctgcagagtggatgcttctgcctagtgacaggttatcaccacgttatatattccctaccgaaggagacaccttttcccccctgacccagaacagcctttaaatcacaagcaaaataggaaagttaaccacggaggcaccgagttccaggtagtggttttgcctttcccaaaaatgaaaataaactgttaccgaaggaattagtttttcctcttcttttttccaactgtgaaggtccccgtggggtggagcatggtgcccctcacaagccgcagcggctggtgcccgggctaccagggacatgccagagggctcgatgacttgtctctgcagggcgctttggtggttgttcagctggctaaaggttcaccggtgaaggcaggtgcggtaactgccgcactggaccctaggaagccccaggtattcgcaatctgacctcctcctgtctgtttcccttcacggatcaattctcacttaagaggccaataaacaacccaacatgaaaaggtgacaagcctgggtttctcccaggataggtgaaagggttaaaatgagtaaagcagttgagcaaacaccaacccgagcttcgggcgcagaattcttcaccttctcttcccctttccatctcctttccccgcggaaacaacgcttcccttctggtgtgtctgttgatctgtgttttcatttacatctctcttagactccgctcttgttctccaggttttcaccagatagatttggggttggcgggacctgctggtgacgtgcaggtgaaggacaggaaggggcatgtgagcgtaaatagaggtgaccagaggagagcatgaggggtggggctttgggacccaccggggccagtggctggagcttgaagtctttcctccccatgggggtgggagggcccccagctggaagagcagactcccagctgctaccccctcccttcccatgggagtggctttccattttgggcagaatgctgactagtagactaacataaaagatataaaaggcaataactattgtttgtgagcaacttttttataacttccaaaacaaaaacctgagcacagttttgaagttctagccactcgagctcatgcatgtgaaacgtgtgctttacgaaggtggcagctgacagacgtgggctctgcatgccgccagcctagtagaaagttctcgttcattggcaacagcagaacctgcctctccgtgaagtcgtcagcctaaaatttgtttctctcttgaagaggattctttgaaaaggtcctgcagagaaatcagtacaggttatcccgaaaggtacaaggacgcacttgtaaagatgattaaaacgtatctttcctttatgtgacgcgtctctagtgccttactgaagaagcagtgacactcccgtcgctcggtgaggacgttcccggacagtgcctcactcacctgggactggtatcccctcccagggtccaccaagggctcctgcttttcagacaccccatcatcctcgcgcgtcctcaccctgtctctaccagggaggtgcctagcttggtgaggttactcctgctcctccaacctttttttgccaaggtttgtacacgactcccatctaggctgaaaacctagaagtggaccttgtgtgtgtgcatggtgtcagcccaaagccaggctgagacagtcctcatatcctcttgagccaaactgtttgggtctcgttgcttcatggtatggtctggatttgtgggaatggctttgcgtgagaaaggggaggagagtggttgctgccctcagccggcttgaggacagagcctgtccctctcatgacaactcagtgttgaagcccagtgtcctcagcttcatgtccagtggatggcagaagttcatggggtagtggcctctcaaaggctgggcgcatcccaagacagccagcaggttgtctctggaaacgaccagagttaagctctcggcttctctgctgagggtgcaccctttcctctagatggtagttgtcacgttatctttgaaaactcttggactgctcctgaggaggccctcttttccagtaggaagttagatgggggttctcagaagtggctgattggaaggggacaagcttcgtttcaggggtctgccgttccatcctggttcagagaaggccgagcgtggctttctctagccttgtcactgtctccctgcctgtcaatcaccacctttcctccagaggaggaaaattatctcccctgcctgcctgattccatggctgttgtgctgattccaatgctttcacgttggttcctggcgtgggaactgctctcctttgcagccccatttcccaagctctgttcaagttaaacttatgtaagctttccgtggcatgcggggcgcgcacccacgtccccgctgcgtaagactctgtatttggatgccaatccacaggcctgaagaaactgcttgttgtgtatcagtaatcattagtggcaatgatgacattctgaaaagctgcaatacttatacaataaattttacaattctttggaa

SEQ ID NO: 456506 - DNA, 1860 bp, Homo sapiens
cctggtcgtcctccttgggttcgggtgaaagcgcctgggggttcagtgggccatgatccccgagctgctggagaactgaaggcggacagtctcctgcgaaaccaggcaatggcggagctggagtttgttcagatcatcatcatcgtggtggtgatgatggtgatggtggtggtgatcacgtgcctgctgagccactacaagctgtctgcacggtccttcatcagccggcacagccaggggcggaggagagaagatgccctgtcctcagaaggatgcctgtggccctcggagagcacagtgtcaggcaacggaatcccagagccgcaggtctacgccccgcctcggcccaccgaccgcctggccgtgccgcccttcgcccagcgggagcgcttccaccgcttccagcccacctatccgtacctgcagcacgagatcgacctgccgcccaccatctcgctgtcagacggggaggagcccccaccctaccagggcccctgcaccctccagcttcgggaccccgagcagcagctggaactgaaccgggagtcggtgcgcgcacccccaaacagaaccatcttcgacagtgacctgatggatagtgccaggctgggcggcccctgcccccccagcagtaactcgggcatcagcgccacgtgctacggcagcggcgggcgcatggaggggccgccgcccacctacagcgaggtcatcggccactacccggggtcctccttccagcaccagcagagcagtgggccgccctccttgctggaggggacccggctccaccacacacacatcgcgcccctagagagcgcagccatctggagcaaagagaaggataaacagaaaggacaccctctctagggtccccaggggggccgggctggggctgcgtaggtgaaaaggcagaacactccgcgcttcttagaagaggagtgagaggaaggcggggggcgcagcaacgcatcgtgtggccctcccctcccacctccctgtgtataaatatttacatgtgatgtctggtctgaatgcacaagctaagagagcttgcaaaaaaaaaaagaaaaaagaaaaaaaaaaaccacgtttctttgttgagctgtgtcttgaaggcaaaagaaaaaaaatttctacagtagtctttcttgtttctagttgagctgcgtgcgtgaatgcttattttcttttgtttatgataatttcacttaactttaaagacatatttgcacaaaacctttgtttaaagatctgcaatattatatatataaatatatataagataagagaaactgtatgtgcgagggcaggagtatttttgtattagaagaggcctattaaaaaaaaaagttgttttctgaactagaagaggaaaaaaatggcaatttttgagtgccaagtcagaaagtgtgtattaccttgtaaagaaaaaaattacaaagcaggggtttagagttatttatataaatgttgagattttgcactattttttaatataaatatgtcagtgcttgcttgatggaaacttctcttgtgtctgttgagactttaagggagaaatgtcggaatttcagagtcgcctgacggcagagggtgagcccccgtggagtctgcagagaggccttggccaggagcggcgggctttcccgaggggccactgtccctgcagagtggatgcttctgcctagtgacaggttatcaccacgttatatattccctaccgaaggagacaccttttcccccctgacccagaacagcctttaaatcacaagcaaaataggaaagttaaccacggaggcaccgagttccaggtagtggttttgcctttcccaaaaatgaaaataaactgttaccgaagga

SEQ ID NO: 456507 - DNA, 1654 bp, Homo sapiens
  misc_feature (1471)..(1472): n is a, c, g, or t
aactttgcagttatccaacacccataaatatattccgggaaattaagccagtcttttcagttcacaattgagtgtacctgggagtctccttgccctttctcagaagacattaaaaagaaaagctgtaaatcagtcataagaaaaagaacatatataatctggagtagaattttgcttccacttggctaattttcatcagtgctatgctcctgtggtcccccggatccaaatatttcctaacctttaccttttcattttgttgagagtagtagtaatccacatgtatttttagctaacaaaacacgtccatgaattagattatttcttgaagcttttcatcaaatactttgtggccttttttttttttaattttagccaatgttaaatcaaagctttaggcttataattgtattctacatagctaaacaaagttcaccagaaaaaaagggaaagattataaaacattataaaaggaaaacattataaagtaattaaattttaaagccagtatgtgaaagaagagatggcccaaagtcttcattaccctcttagagaagaaactccattaatgtgtgctcagtctggttccactccctagtaaccttaagcatagttacattcactttttgtcttttacccccattttcagttctgttgtgatcatcttttacaacataattcaccctcaactatttttggaggagtgtgggaaggaaataaacagtaacgtaaagtatatatgaaatcatgtttaaccttgaagacaatgaccccttgatttttactttcggttaacaggtaccacaacatcagagtatacaagaatactggaagtgtgtgaagaaagaaagcattaaaggagtaaaagaagtctggaaacaagctggaaaaggtcttttttaataaaagatataatagtatggcaattatattgttccaaatgtcaaaatttgtgattttttagaagtacttgctatttatcttcttaagtcttcattgatattctgtgtgaaataagcatgtcttgtacttgctttctgattcataattttatgaaagaacttagtagaaagaaaagtaagtataaaaatagatattggattctgtcagaaggcctagatttgaaataatgttttgtacttcggtaagatggaaaacttagtgattcactgatttcttagacactctaatatgatatgctttctggaaggataaaacaaatacatatgggaaaaagtacttgagaccaaggccagcatcaattccagacatcttcatgttcctaataggctaaatgaagttaaaaacttatttcagatttttctcatctgtaccttatatctcataaatttattgcatattttatgtcagtagcttagctgtttattgtctttaaaataacatgtaaacttcaatgttctatctggaagcagaataaaatatttacatagataccaaaaaaaaaaaagannaaaaaaaaatttttgggcgcgtgggccgcgaaaaatttttagaccattggtgtggggcgggggcccatgtgttagtgaactggttcatggggtctaaggaaatgtgtccatgggtctggtttcccataaagccgggggaccgggttgaacatcatggtggggttggtttagggcaggacata

SEQ ID NO: 456508 - DNA, 1104 bp, Homo sapiens
gacacaaagaaactttgtcaaaattggctgatatttgtacattttaatatatgtattttttcctgaagagctgtaaataataattgggaggggaacagggagcaggtagaggtatagaagagccaggaatagcagaatactggtaattattgaagattaataatgtttacatggtgacttgttgtagaattctgttcattttacttaagtttgaaattttctgtaataaaaatttgtaagaggttccaggggaataagcacagggagaaatgtttggatattgaacttggcattatatcatttgattgtcaactttaaaaataaaaggtaaaataaatataaagctttttaacttttttcccaaaaataattaagtaggggaaaggggggtattgaaaactggctgagagatttagagaactagaaataaaccacttgcctaaaacaaacgtaatagaaatagctaaattcaaaataattaatacggaattaattgcagcagttttcaaactgttaaatagcccagaaaaaaatgggtagaggtttgtctcctaattgatttgaatccatagtttgggattttgtctacatctgattcttttaaaatgctttcttttttaaatttgctttccatatgaggattgatacaattgattctgaaaggcagctgcagaagatcataagtaaacaagatgacttgatgacagtgaaaactaatgaaactggatatcaggaagcaatagtgaaagaacctgaaattaacacaactcttcagatgcgtttctttggaaaaagaggacaaagaaaacttcattataaagaatttcgaagatttatggaaaatttacaaacagagattcaagaaatggaattccttcagttttctaaaggtttgagtttcatgagaaaagaagactttgcagagtggctactttttttcactaacactgaaaataaagatatttattggaaaaatgtgagagagaagttgtcagcaggagaggttggtatacccttttattatgcatgtgataaagatgaaataataagttagacatgtttacataaagtaacttctgaattaaccaagactgtgctaccctc

SEQ ID NO: 456509 - DNA, 700 bp, Homo sapiens
  misc_feature (110)..(110): n is a, c, g, or t
  misc_feature (159)..(159): n is a, c, g, or t
  misc_feature (174)..(174): n is a, c, g, or t
agcgaacagcccagcaacaacaaaagtcgaacaagactttggttgggccttgtggagctttgaaatcaagttctttctttacagcatcatccttaagtgtcaacagatgncggatttctgaggacagcttttgatccacaacggacagcttgttgatcnaatttcggtaggtancaagcctttctatgacaggatgtccatgtgctgggactctcctagctttcaggatcaaataaaaactgatgttcgagcaataattcaagtagaggttgtacttggtcctcaagtattggcttccttttccgggtggaatgatcccttgttccaccaactctaacaatggctccagctcatccttaacctctgtcaacttgactttcaggtcttctatcagctccaagagttctggtgattcctttcgcaacattttcagcttctctttcactgaaactttagccaaatccttcacgacccgtgtctcagcctcatctacctgaggcactgctcgtgccgaattcggcacgagggctaaatgaagttaaaaacttatttcagatttttctcatctgtaccttatatctcataaatttattgcatattttatgtcagtagcttagctgtttattgtctttaaaataacatgtaaacttcaatgttctatctggaagcagaataaaatatttacatagataccaaaaaa

SEQ ID NO: 456510 - DNA, 356 bp, Homo sapiens
gatggaccaaggttcagatcctgattgttccagttagtagactttgggcaaactacataacccctgaagcgttacttacctaagacttagagaggctaaggtcatacacgttataaagggcagaaccggaatttcagcattaaaagtccatctaactccaaaactctgtgctcttactcagtgctatgtccactaataaaacttagcagaagtggaccacttaacagagtatgttagtctcttcaagctgccacctcaaaacaccacaggctgaggcgggagaattggatgaacctgggagacaaaggttgcagtgagccaaggtcacacctgggcaacagtgagactctgtctca

SEQ ID NO: 456511 - DNA, 1824 bp, Homo sapiens
cgcgagagttcccaagcggtaggcggcggcgccgggagagaagcgccgtctagctgcgcttccgcaaagatggcggcggctgcgggtagctgcgcgcgggtggcggcctggggcggaaaactgcgacgggggctcgctgtcagccgacaggctgtgcggagtcccggccccttggcagcggcagtggccggcgcggccctggcaggagcaggagcggcctggcaccacagccgcgtcagtgttgcggcgcgggatggcagttttacagtctccgcacagaaaaatgttgaacatggaataatatatattgggaaaccgtctcttcgtaagcagcgcttcatgcagttttcttcactcgaacatgaaggagaatattatatgacaccacgagacttcctcttctcagtgatgtttgagcaaatggaacgtaaaacttcagtcaagaagctgacaaaaaaggacatcgaggatacactgtcagggatccaaacagctggctgtggatcaacttttttcagagaccttggcgataaagggctaatttcatataccgagtatcttttcttgcttacaatcctcactaaaccccattctggatttcatgttgcttttaaaatgctggatacagatggtaatgagatgattgaaaaaagggaattttttaagctgcagaagatcataagtaaacaagatgacttgatgacagtgaaaactaatgaaactggatatcaggaagcaatagtgaaagaacctgaaattaacacaactcttcagatgcgtttctttggaaaaagaggacaaagaaaacttcattataaagaatttcgaagatttatggaaaatttacaaacagagattcaagaaatggaattccttcagttttctaaaggtttgagtttcatgagaaaagaagactttgcagagtggctactttttttcactaacactgaaaataaagatatttattggaaaaatgtgagagagaagttgtcagcaggagagcggagtttaagagagctgtgaaagtagcaacaggacaagaactctcaaacaatattttggacactgtctttaagatctttgatttggatggtgatgaatgtcttagtcatgaagagtttcttggggtgttaaaaaacagaatgcatcgaggtttatgggtaccacaacatcagagtatacaagaatactggaagtgtgtgaagaaagaaagcattaaaggagtaaaagaagtctggaaacaagctggaaaaggtcttttttaataaaagatataatagtatggcaattatattgttccaaatgtcaaaatttgtgattttttagaagtacttgctatttatcttcttaagtcttcattgatattctgtgtgaaataagcatgtcttgtacttgctttctgattcataattttatgaaagaacttagtagaaagaaaagtaagtataaaaatagatattggattctgtcagaaggcctagatttgaaataatgttttgtacttcggtaagatggaaaacttagtgattcactgatttcttagacactctaatatgatatgctttctggaaggataaaacaaatacatatgggaaaaagtacttgagaccaaggccagcatcaattccagacatcttcatgttcctaataggctaaatgaagttaaaaacttatttcagatttttctcatctgtaccttatatctcataaatttattgcatattttatgtcagtagcttagctgtttattgtctttaaaataacatgtaaacttcaatgttctatctggaagcagaataaaatatttacatagataccaaaaaa

SEQ ID NO: 456512 - DNA, 2008 bp, Homo sapiens
cgcgagagttcccaagcggtaggcggcggcgccgggagagaagcgccgtctagctgcgcttccgcaaagatggcggcggctgcgggtagctgcgcgcgggtggcggcctggggcggaaaactgcgacgggggctcgctgtcagccgacaggctgtgcggagtcccggccccttggcagcggcagtggccggcgcggccctggcaggagcaggagcggcctggcaccacagccgcgtcagtgttgcggcgcgggatggcagttttacagtctccgcacagatttacattatgcctttctagcgaaaaactcaaggaacattcagatacaacaaaaaagagaggaaagaaggccttaaaaatgttgaacatggaataatatatattgggaaaccgtctcttcgtaagcagcgcttcatgcagttttcttcactcgaacatgaaggagaatattatatgacaccacgagacttcctcttctcagtgatgtttgagcaaatggaacgtaaaacttcagtcaagaagctgacaaaaaaggacatcgaggatacactgtcagggatccaaacagctggctgtggatcaacttttttcagagaccttggcgataaagggctaatttcatataccgagtatcttttcttgcttacaatcctcactaaaccccattctggatttcatgttgcttttaaaatgctggatacagatggtaatgagatgattgaaaaaagggaattttttaagctgcagaagatcataagtaaacaagatgacttgatgacagtgaaaactaatgaaactggatatcaggaagcaatagtgaaagaacctgaaattaacacaactcttcagatgcgtttctttggaaaaagaggacaaagaaaacttcattataaagaatttcgaagatttatggaaaatttacaaacagagattcaagaaatggaattccttcagttttctaaaggtttgagtttcatgagaaaagaagactttgcagagtggctactttttttcactaacactgaaaataaagatatttattggaaaaatgtgagagagaagttgtcagcaggagagagcattagtttggatgaattcaagtcattttgccattttacaacccacttggaagactttgctattgccatgcagatgttcagtttagctcatcgtcctgtcagactagcggagtttaagagagctgtgaaagtagcaacaggacaagaactctcaaacaatattttggacactgtctttaagatctttgatttggatggtgatgaatgtcttagtcatgaagagtttcttggggtgttaaaaaacagaatgcatcgaggtttatgggtaccacaacatcagagtatacaagaatactggaagtgtgtgaagaaagaaagcattaaaggagtaaaagaagtctggaaacaagctggaaaaggtcttttttaataaaagatataatagtatggcaattatattgttccaaatgtcaaaatttgtgattttttagaagtacttgctatttatcttcttaagtcttcattgatattctgtgtgaaataagcatgtcttgtacttgctttctgattcataattttatgaaagaacttagtagaaagaaaagtaagtataaaaatagatattggattctgtcagaaggcctagatttgaaataatgttttgtacttcggtaagatggaaaacttagtgattcactgatttcttagacactctaatatgatatgctttctggaaggataaaacaaatacatatgggaaaaagtacttgagaccaaggccagcatcaattccagacatcttcatgttcctaataggctaaatgaagttaaaaacttatttcagatttttctcatctgtaccttatatctcataaatttattgcatattttatgtcagtagcttagctgtttattgtctttaaaataacatgtaaacttcaatgttctatctggaagcagaataaaatatttacatagataccaaaaaa

SEQ ID NO: 456513 - DNA, 1961 bp, Homo sapiens
cgcgagagttcccaagcggtaggcggcggcgccgggagagaagcgccgtctagctgcgcttccgcaaagatggcggcggctgcgggtagctgcgcgcgggtggcggcctggggcggaaaactgcgacgggggctcgctgtcagccgacaggctgtgcggagtcccggccccttggcagcggcagtggccggcgcggccctggcaggagcaggagcggcctggcaccacagccgcgtcagtgttgcggcgcgggatggcagttttacagtctccgcacagaaaaatgttgaacatggaataatatatattgggaaaccgtctcttcgtaagcagcgcttcatgcagttttcttcactcgaacatgaaggagaatattatatgacaccacgagacttcctcttctcagtgatgtttgagcaaatggaacgtaaaacttcagtcaagaagctgacaaaaaaggacatcgaggatacactgtcagggatccaaacagctggctgtggatcaacttttttcagagaccttggcgataaagggctaatttcatataccgagtatcttttcttgcttacaatcctcactaaaccccattctggatttcatgttgcttttaaaatgctggatacagatggtaatgagatgattgaaaaaagggaattttttaaggattgatacaattgattctgaaaggcagctgcagaagatcataagtaaacaagatgacttgatgacagtgaaaactaatgaaactggatatcaggaagcaatagtgaaagaacctgaaattaacacaactcttcagatgcgtttctttggaaaaagaggacaaagaaaacttcattataaagaatttcgaagatttatggaaaatttacaaacagagattcaagaaatggaattccttcagttttctaaaggtttgagtttcatgagaaaagaagactttgcagagtggctactttttttcactaacactgaaaataaagatatttattggaaaaatgtgagagagaagttgtcagcaggagagagcattagtttggatgaattcaagtcattttgccattttacaacccacttggaagactttgctattgccatgcagatgttcagtttagctcatcgtcctgtcagactagcggagtttaagagagctgtgaaagtagcaacaggacaagaactctcaaacaatattttggacactgtctttaagatctttgatttggatggtgatgaatgtcttagtcatgaagagtttcttggggtgttaaaaaacagaatgcatcgaggtttatgggtaccacaacatcagagtatacaagaatactggaagtgtgtgaagaaagaaagcattaaaggagtaaaagaagtctggaaacaagctggaaaaggtcttttttaataaaagatataatagtatggcaattatattgttccaaatgtcaaaatttgtgattttttagaagtacttgctatttatcttcttaagtcttcattgatattctgtgtgaaataagcatgtcttgtacttgctttctgattcataattttatgaaagaacttagtagaaagaaaagtaagtataaaaatagatattggattctgtcagaaggcctagatttgaaataatgttttgtacttcggtaagatggaaaacttagtgattcactgatttcttagacactctaatatgatatgctttctggaaggataaaacaaatacatatgggaaaaagtacttgagaccaaggccagcatcaattccagacatcttcatgttcctaataggctaaatgaagttaaaaacttatttcagatttttctcatctgtaccttatatctcataaatttattgcatattttatgtcagtagcttagctgtttattgtctttaaaataacatgtaaacttcaatgttctatctggaagcagaataaaatatttacatagataccaaaaaa

SEQ ID NO: 456514 - DNA, 1934 bp, Homo sapiens
gacacaaagaaactttgtcaaaattggctgatatttgtacattttaatatatgtattttttcctgaagagctgtaaataataattgggaggggaacagggagcaggtagaggtatagaagagccaggaatagcagaatactggtaattattgaagattaataatgtttacatggtgacttgttgtagaattctgttcattttacttaagtttgaaattttctgtaataaaaatttgtaagaggttccaggggaataagcacagggagaaatgtttggatattgaacttggcattatatcatttgattgtcaactttaaaaataaaaggtaaaataaatataaagctttttaacttttttcccaaaaataattaagtaggggaaaggggggtattgaaaactggctgagagatttagagaactagaaataaaccacttgcctaaaacaaacgtaatagaaatagctaaattcaaaataattaatacggaattaattgcagcagttttcaaactgttaaatagcccagaaaaaaatgggtagaggtttgtctcctaattgatttgaatccatagtttgggattttgtctacatctgattcttttaaaatgctttcttttttaaatttgctttccatatgaggattgatacaattgattctgaaaggcagctgcagaagatcataagtaaacaagatgacttgatgacagtgaaaactaatgaaactggatatcaggaagcaatagtgaaagaacctgaaattaacacaactcttcagatgcgtttctttggaaaaagaggacaaagaaaacttcattataaagaatttcgaagatttatggaaaatttacaaacagagattcaagaaatggaattccttcagttttctaaaggtttgagtttcatgagaaaagaagactttgcagagtggctactttttttcactaacactgaaaataaagatatttattggaaaaatgtgagagagaagttgtcagcaggagagagcattagtttggatgaattcaagtcattttgccattttacaacccacttggaagactttgctattgccatgcagatgttcagtttagctcatcgtcctgtcagactagcggagtttaagagagctgtgaaagtagcaacaggacaagaactctcaaacaatattttggacactgtctttaagatctttgatttggatggtgatgaatgtcttagtcatgaagagtttcttggggtgttaaaaaacagaatgcatcgaggtttatgggtaccacaacatcagagtatacaagaatactggaagtgtgtgaagaaagaaagcattaaaggagtaaaagaagtctggaaacaagctggaaaaggtcttttttaataaaagatataatagtatggcaattatattgttccaaatgtcaaaatttgtgattttttagaagtacttgctatttatcttcttaagtcttcattgatattctgtgtgaaataagcatgtcttgtacttgctttctgattcataattttatgaaagaacttagtagaaagaaaagtaagtataaaaatagatattggattctgtcagaaggcctagatttgaaataatgttttgtacttcggtaagatggaaaacttagtgattcactgatttcttagacactctaatatgatatgctttctggaaggataaaacaaatacatatgggaaaaagtacttgagaccaaggccagcatcaattccagacatcttcatgttcctaataggctaaatgaagttaaaaacttatttcagatttttctcatctgtaccttatatctcataaatttattgcatattttatgtcagtagcttagctgtttattgtctttaaaataacatgtaaacttcaatgttctatctggaagcagaataaaatatttacatagataccaaaaaa

SEQ ID NO: 456515 - DNA, 1344 bp, Homo sapiens
cgcgagagttcccaagcggtaggcggcggcgccgggagagaagcgccgtctagctgcgcttccgcaaagatggcggcggctgcgggtagctgcgcgcgggtggcggcctggggcggaaaactgcgacgggggctcgctgtcagccgacaggctgtgcggagtcccggccccttggcagcggcagtggccggcgcggccctggcaggagcaggagcggcctggcaccacagccgcgtcagtgttgcggcgcgggatggcagttttacagtctccgcacagaaaaatgttgaacatggaataatatatattgggaaaccgtctcttcgtaagcagcgcttcatgcagttttcttcactcgaacatgaaggagaatattatatgacaccacgagacttcctcttctcagtgatgtttgagcaaatggaacgtaaaacttcagtcaagaagctgacaaaaaaggacatcgaggatacactgtcagggatccaaacagctggctgtggatcaacttttttcagagaccttggcgataaagggctaatttcatataccgagtatcttttcttgcttacaatcctcactaaaccccattctggatttcatgttgcttttaaaatgctggatacagatggtaatgagatgattgaaaaaagggaattttttaagctgcagaagatcataagtaaacaagatgacttgatgacagtgaaaactaatgaaactggatatcaggaagcaatagtgaaagaacctgaaattaacacaactcttcagatgcgtttctttggaaaaagaggacaaagaaaacttcattataaagaatttcgaagatttatggaaaatttacaaacagagattcaagaaatggaattccttcagttttctaaaggtttgagtttcatgagaaaagaagactttgcagagtggctactttttttcactaacactgaaaataaagatatttattggaaaaatgtgagagagaagttgtcagcaggagagagcattagtttggatgaattcaagtcattttgccattttacaacccacttggaagactttgctattgccatgcagatgttcagtttagctcatcgtcctgtcagactagcggagtttaagagagctgtgaaagtagcaacaggacaagaactctcaaacaatattttggacactgtctttaagatctttgatttggatggtgatgaatgtcttagtcatgaagagtttcttggggtgttaaaaaacagaatgcatcgaggtttatggtcccccacattccaaggttccgaaaactggaaggggtggagaaaggaacctttaaggcgtgaaggtggaaacctc

SEQ ID NO: 456516 - DNA, 1140 bp, Homo sapiens
aaactgaaggaattccatttcttgaatctctgttttctaaaggtttgagtttcatgagaaaagtagccactctgcaaagtcttcttttctcatgaaactcaaacctttagaaaactgaaggatttgcagagtggctactttttttcactaacactgaaaataaagatatttattggaaaaatgtgagagagaagttgtcagcaggagagagcattagtttggatgaattcaagtcattttgccattttacaacccacttggaagactttgctattgccatgcagatgttcagtttagctcatcgtcctgtcagactagcggagtttaagagagctgtgaaagtagcaacaggacaagaactctcaaacaatattttggacactgtctttaagatctttgatttggatggtgatgaatgtcttagtcatgaagagtttcttggggtgttaaaaaacagaatgcatcgaggtttatgggtaccacaacatcagagtatacaagaatactggaagtgtgtgaagaaagaaagcattaaaggagtaaaagaagtctggaaacaagctggaaaaggtcttttttaataaaagatataatagtatggcaattatattgttccaaatgtcaaaatttgtgattttttagaagtacttgctatttatcttcttaagtcttcattgatattctgtgtgaaataagcatgtcttgtacttgctttctgattcataattttatgaaagaacttagtagaaagaaaagtaagtataaaaatagatattggattctgtcagaaggcctagatttgaaataatgttttgtacttcggtaagatggaaaacttagtgattcactgatttcttagacactctaatatgatatgctttctggaaggataaaacaaatacatatgggaaaaagtacttgagaccaaggccagcatcaattccagacatcttcatgttcctaataggctaaatgaagttaaaaacttatttcagatttttctcatctgtaccttatatctcataaatttattgcatattttatgtcagtagcttagctgtttattgtctttaaaataacatgtaaacttcaatgttctatctggaagcagaataaaatatttacatagataccaaaaaa

SEQ ID NO: 456517 - DNA, 1442 bp, Homo sapiens
gatggaccaaggttcagatcctgattgttccagttagtagactttgggcaaactacataacccctgaagcgttacttacctaagacttagagaggctaaggtcatacacgttataaagggcagaaccggaatttcagcattaaaagtccatctaactccaaaactctgtgctcttactcagtgctatgtccactaataaaacttagcagaagtggaccacttaacagagtatgttagtctcttcaagctgccacctcaaaacaccacaggctgggcagcttaaacaataaatttatttctcttgcccagcctgcacacagcaccttctcactgtgccctttgtgtggccatttctgtgtgcacacagagagaaagggacagagaaagctctgttgtctcttcctcttagaatgatactagtctctacggtagaaaagaaagttcatagttaacatttataagattatttaatgtacttacaaaattgtaataaaaactcttactttattagagcattagtttggatgaattcaagtcattttgccattttacaacccacttggaagactttgctattgccatgcagatgttcagtttagctcatcgtcctgtcagactagcggagtttaagagagctgtgaaagtagcaacaggacaagaactctcaaacaatattttggacactgtctttaagatctttgatttggatggtgatgaatgtcttagtcatgaagagtttcttggggtgttaaaaaacagaatgcatcgaggtttatgggtaccacaacatcagagtatacaagaatactggaagtgtgtgaagaaagaaagcattaaaggagtaaaagaagtctggaaacaagctggaaaaggtcttttttaataaaagatataatagtatggcaattatattgttccaaatgtcaaaatttgtgattttttagaagtacttgctatttatcttcttaagtcttcattgatattctgtgtgaaataagcatgtcttgtacttgctttctgattcataattttatgaaagaacttagtagaaagaaaagtaagtataaaaatagatattggattctgtcagaaggcctagatttgaaataatgttttgtacttcggtaagatggaaaacttagtgattcactgatttcttagacactctaatatgatatgctttctggaaggataaaacaaatacatatgggaaaaagtacttgagaccaaggccagcatcaattccagacatcttcatgttcctaataggctaaatgaagttaaaaacttatttcagatttttctcatctgtaccttatatctcataaatttattgcatattttatgtcagtagcttagctgtttattgtctttaaaataacatgtaaacttcaatgttctatctggaagcagaataaaatatttacatagataccaaaaaa

SEQ ID NO: 456518 - DNA, 1322 bp, Homo sapiens
ctcatgcctgtaatcccagcactttgggagtccaaggtgggcggatcacaaagtcaggagttcaagaccagcctggccaacatggtgaaaccccatctctactaaaaatacaaaaactagctgggcgtggtggcaggcgcctgtaatcccagctattcaggaggccgaggcaagagaatcgcttgaacccgggagacggaggttgtagtgagtcaagatcgtgccattgcactccagcctgggcgacgagcaagattcatctcaaatatatgtttagagcattgattaaattacaatagctcatttgtcttgcagtgactctcatgacattcgtcggcttatggtttgaatattttcttcatgggtatttttgtttttgttttacttcccaaataataaaaatttggatttgcttttacttctcaaataatgaaaatttagattaatttcacttagactatttcacatagttgataagttgttttatgtttgttttttagcggagtttaagagagctgtgaaagtagcaacaggacaagaactctcaaacaatattttggacactgtctttaagatctttgatttggatggtgatgaatgtcttagtcatgaagagtttcttggggtgttaaaaaacagaatgcatcgaggtttatgggtaccacaacatcagagtatacaagaatactggaagtgtgtgaagaaagaaagcattaaaggagtaaaagaagtctggaaacaagctggaaaaggtcttttttaataaaagatataatagtatggcaattatattgttccaaatgtcaaaatttgtgattttttagaagtacttgctatttatcttcttaagtcttcattgatattctgtgtgaaataagcatgtcttgtacttgctttctgattcataattttatgaaagaacttagtagaaagaaaagtaagtataaaaatagatattggattctgtcagaaggcctagatttgaaataatgttttgtacttcggtaagatggaaaacttagtgattcactgatttcttagacactctaatatgatatgctttctggaaggataaaacaaatacatatgggaaaaagtacttgagaccaaggccagcatcaattccagacatcttcatgttcctaataggctaaatgaagttaaaaacttatttcagatttttctcatctgtaccttatatctcataaatttattgcatattttatgtcagtagcttagctgtttattgtctttaaaataacatgtaaacttcaatgttctatctggaagcagaataaaatatttacatagataccaaaaaa

SEQ ID NO: 456519 - DNA, 1462 bp, Homo sapiens
aactttgcagttatccaacacccataaatatattccgggaaattaagccagtcttttcagttcacaattgagtgtacctgggagtctccttgccctttctcagaagacattaaaaagaaaagctgtaaatcagtcataagaaaaagaacatatataatctggagtagaattttgcttccacttggctaattttcatcagtgctatgctcctgtggtcccccggatccaaatatttcctaacctttaccttttcattttgttgagagtagtagtaatccacatgtatttttagctaacaaaacacgtccatgaattagattatttcttgaagcttttcatcaaatactttgtggccttttttttttttaattttagccaatgttaaatcaaagctttaggcttataattgtattctacatagctaaacaaagttcaccagaaaaaaagggaaagattataaaacattataaaaggaaaacattataaagtaattaaattttaaagccagtatgtgaaagaagagatggcccaaagtcttcattaccctcttagagaagaaactccattaatgtgtgctcagtctggttccactccctagtaaccttaagcatagttacattcactttttgtcttttacccccattttcagttctgttgtgatcatcttttacaacataattcaccctcaactatttttggaggagtgtgggaaggaaataaacagtaacgtaaagtatatatgaaatcatgtttaaccttgaagacaatgaccccttgatttttactttcggttaacaggtaccacaacatcagagtatacaagaatactggaagtgtgtgaagaaagaaagcattaaaggagtaaaagaagtctggaaacaagctggaaaaggtcttttttaataaaagatataatagtatggcaattatattgttccaaatgtcaaaatttgtgattttttagaagtacttgctatttatcttcttaagtcttcattgatattctgtgtgaaataagcatgtcttgtacttgctttctgattcataattttatgaaagaacttagtagaaagaaaagtaagtataaaaatagatattggattctgtcagaaggcctagatttgaaataatgttttgtacttcggtaagatggaaaacttagtgattcactgatttcttagacactctaatatgatatgctttctggaaggataaaacaaatacatatgggaaaaagtacttgagaccaaggccagcatcaattccagacatcttcatgttcctaataggctaaatgaagttaaaaacttatttcagatttttctcatctgtaccttatatctcataaatttattgcatattttatgtcagtagcttagctgtttattgtctttaaaataacatgtaaacttcaatgttctatctggaagcagaataaaatatttacatagataccaaaaaa

SEQ ID NO: 456520 - DNA, 431 bp, Homo sapiens
gcagaaccggaatttcagcattaaaagtccatctaactccaaaactctgtgctcttactcagtgctatgtccactaataaaacttagcagaagtggaccacttaacagagtatgttagtctcttcaagctgccacctcaaaacaccacaggctgggcagcttaaacaataaatttatttctcacagttctggaggccaggagtccaagatcaaggcaccagcagggccagtttctggtgaggcctcttgcccagcctgcacacagcaccttctcactgtgccctttgtgtggccatttctgtgtgcacacagagagaaagggacagagaaagctctgttgtctcttcctcttagaatgatactagtctctacggtagaaaagaaagttcatagttaacatttataagattatttaatgtacttacaaaatt

SEQ ID NO: 456521 - DNA, 333 bp, Homo sapiens
aattgcaatttatttttcttttagaaaaatgttgaacatggaataatatatattgggaaaccgtctcttcgtaagcagcgcttcatgcagttttcttcactcgaacatgaaggagaatattatatgacaccacgagacttcctcttctcagtgatgtttgagcaaatggaacgtgagttgggtcttttttttttttaattaaaaaaatcagacttcagggctgaaaaacctgtttttcaggattgataacagcttttcttcattttaattatcatctttgtaccatgcatttgcttatttagacttttcttgtgacactacttatacttttat

SEQ ID NO: 456522 - DNA, 373 bp, Homo sapiens
tataaaaatagatattggattctgtcagaaggcctagatttgaaataatgttttgtacttcggtaagatggaaaacttagtgattcactgatttcttagacactctaatatgatatgctttctggaaggataaaacaaatacatatgggaaaaagtacttgagaccaaggccagcatcaattccagacatcttcatgttcctaataggctaaatgaagttaaaaacttatttcagatttttctcatctgtaccttatatctcataaatttattgcatattttatgtcagtagcttagctgtttattgtctttaaaataacatgtaaacttcaatgttctatctggaagcagaataaaatatttacatagatac

SEQ ID NO: 456523 - DNA, 1933 bp, Homo sapiens
cgcgagagttcccaagcggtaggcggcggcgccgggagagaagcgccgtctagctgcgcttccgcaaagatggcggcggctgcgggtagctgcgcgcgggtggcggcctggggcggaaaactgcgacgggggctcgctgtcagccgacaggctgtgcggagtcccggccccttggcagcggcagtggccggcgcggccctggcaggagcaggagcggcctggcaccacagccgcgtcagtgttgcggcgcgggatggcagttttacagtctccgcacagaaaaatgttgaacatggaataatatatattgggaaaccgtctcttcgtaagcagcgcttcatgcagttttcttcactcgaacatgaaggagaatattatatgacaccacgagacttcctcttctcagtgatgtttgagcaaatggaacgtaaaacttcagtcaagaagctgacaaaaaaggacatcgaggatacactgtcagggatccaaacagctggctgtggatcaacttttttcagagaccttggcgataaagggctaatttcatataccgagtatcttttcttgcttacaatcctcactaaaccccattctggatttcatgttgcttttaaaatgctggatacagatggtaatgagatgattgaaaaaagggaattttttaagctgcagaagatcataagtaaacaagatgacttgatgacagtgaaaactaatgaaactggatatcaggaagcaatagtgaaagaacctgaaattaacacaactcttcagatgcgtttctttggaaaaagaggacaaagaaaacttcattataaagaatttcgaagatttatggaaaatttacaaacagagattcaagaaatggaattccttcagttttctaaaggtttgagtttcatgagaaaagaagactttgcagagtggctactttttttcactaacactgaaaataaagatatttattggaaaaatgtgagagagaagttgtcagcaggagagagcattagtttggatgaattcaagtcattttgccattttacaacccacttggaagactttgctattgccatgcagatgttcagtttagctcatcgtcctgtcagactagcggagtttaagagagctgtgaaagtagcaacaggacaagaactctcaaacaatattttggacactgtctttaagatctttgatttggatggtgatgaatgtcttagtcatgaagagtttcttggggtgttaaaaaacagaatgcatcgaggtttatgggtaccacaacatcagagtatacaagaatactggaagtgtgtgaagaaagaaagcattaaaggagtaaaagaagtctggaaacaagctggaaaaggtcttttttaataaaagatataatagtatggcaattatattgttccaaatgtcaaaatttgtgattttttagaagtacttgctatttatcttcttaagtcttcattgatattctgtgtgaaataagcatgtcttgtacttgctttctgattcataattttatgaaagaacttagtagaaagaaaagtaagtataaaaatagatattggattctgtcagaaggcctagatttgaaataatgttttgtacttcggtaagatggaaaacttagtgattcactgatttcttagacactctaatatgatatgctttctggaaggataaaacaaatacatatgggaaaaagtacttgagaccaaggccagcatcaattccagacatcttcatgttcctaataggctaaatgaagttaaaaacttatttcagatttttctcatctgtaccttatatctcataaatttattgcatattttatgtcagtagcttagctgtttattgtctttaaaataacatgtaaacttcaatgttctatctggaagcagaataaaatatttacatagataccaaaaaa

SEQ ID NO: 456524 - DNA, 2125 bp, Homo sapiens
  misc_feature (1942)..(1943): n is a, c, g, or t
cgcgagagttcccaagcggtaggcggcggcgccgggagagaagcgccgtctagctgcgcttccgcaaagatggcggcggctgcgggtagctgcgcgcgggtggcggcctggggcggaaaactgcgacgggggctcgctgtcagccgacaggctgtgcggagtcccggccccttggcagcggcagtggccggcgcggccctggcaggagcaggagcggcctggcaccacagccgcgtcagtgttgcggcgcgggatggcagttttacagtctccgcacagaaaaatgttgaacatggaataatatatattgggaaaccgtctcttcgtaagcagcgcttcatgcagttttcttcactcgaacatgaaggagaatattatatgacaccacgagacttcctcttctcagtgatgtttgagcaaatggaacgtaaaacttcagtcaagaagctgacaaaaaaggacatcgaggatacactgtcagggatccaaacagctggctgtggatcaacttttttcagagaccttggcgataaagggctaatttcatataccgagtatcttttcttgcttacaatcctcactaaaccccattctggatttcatgttgcttttaaaatgctggatacagatggtaatgagatgattgaaaaaagggaattttttaagctgcagaagatcataagtaaacaagatgacttgatgacagtgaaaactaatgaaactggatatcaggaagcaatagtgaaagaacctgaaattaacacaactcttcagatgcgtttctttggaaaaagaggacaaagaaaacttcattataaagaatttcgaagatttatggaaaatttacaaacagagattcaagaaatggaattccttcagttttctaaaggtttgagtttcatgagaaaagaagactttgcagagtggctactttttttcactaacactgaaaataaagatatttattggaaaaatgtgagagagaagttgtcagcaggagagagcattagtttggatgaattcaagtcattttgccattttacaacccacttggaagactttgctattgccatgcagatgttcagtttagctcatcgtcctgtcagactagcggagtttaagagagctgtgaaagtagcaacaggacaagaactctcaaacaatattttggacactgtctttaagatctttgatttggatggtgatgaatgtcttagtcatgaagagtttcttggggtgttaaaaaacagaatgcatcgaggtttatgggtaccacaacatcagagtatacaagaatactggaagtgtgtgaagaaagaaagcattaaaggagtaaaagaagtctggaaacaagctggaaaaggtcttttttaataaaagatataatagtatggcaattatattgttccaaatgtcaaaatttgtgattttttagaagtacttgctatttatcttcttaagtcttcattgatattctgtgtgaaataagcatgtcttgtacttgctttctgattcataattttatgaaagaacttagtagaaagaaaagtaagtataaaaatagatattggattctgtcagaaggcctagatttgaaataatgttttgtacttcggtaagatggaaaacttagtgattcactgatttcttagacactctaatatgatatgctttctggaaggataaaacaaatacatatgggaaaaagtacttgagaccaaggccagcatcaattccagacatcttcatgttcctaataggctaaatgaagttaaaaacttatttcagatttttctcatctgtaccttatatctcataaatttattgcatattttatgtcagtagcttagctgtttattgtctttaaaataacatgtaaacttcaatgttctatctggaagcagaataaaatatttacatagataccaaaaaaaaaaaagannaaaaaaaaatttttgggcgcgtgggccgcgaaaaatttttagaccattggtgtggggcgggggcccatgtgttagtgaactggttcatggggtctaaggaaatgtgtccatgggtctggtttcccataaagccgggggaccgggttgaacatcatggtggggttggtttagggcaggacata

SEQ ID NO: 456525 - DNA, 1847 bp, Homo sapiens
agcgggggagaaccccgcggacgctgaacaccacggcccacaaaactggccgcactaatttagtggtgatgagtgtgggcgtgtcttaattcgaggctcctaattcagaatctcactgcgcctcgcctcttgctacctctctgcaaggcaatgtacttctacagaagagtgcgcccttacagatggaacaatgaaaaatgttgaacatggaataatatatattgggaaaccgtctcttcgtaagcagcgcttcatgcagttttcttcactcgaacatgaaggagaatattatatgacaccacgagacttcctcttctcagtgatgtttgagcaaatggaacgtaaaacttcagtcaagaagctgacaaaaaaggacatcgaggatacactgtcagggatccaaacagctggctgtggatcaacttttttcagagaccttggcgataaagggctaatttcatataccgagtatcttttcttgcttacaatcctcactaaaccccattctggatttcatgttgcttttaaaatgctggatacagatggtaatgagatgattgaaaaaagggaattttttaagctgcagaagatcataagtaaacaagatgacttgatgacagtgaaaactaatgaaactggatatcaggaagcaatagtgaaagaacctgaaattaacacaactcttcagatgcgtttctttggaaaaagaggacaaagaaaacttcattataaagaatttcgaagatttatggaaaatttacaaacagagattcaagaaatggaattccttcagttttctaaaggtttgagtttcatgagaaaagaagactttgcagagtggctactttttttcactaacactgaaaataaagatatttattggaaaaatgtgagagagaagttgtcagcaggagagagcattagtttggatgaattcaagtcattttgccattttacaacccacttggaagactttgctattgccatgcagatgttcagtttagctcatcgtcctgtcagactagcggagtttaagagagctgtgaaagtagcaacaggacaagaactctcaaacaatattttggacactgtctttaagatctttgatttggatggtgatgaatgtcttagtcatgaagagtttcttggggtgttaaaaaacagaatgcatcgaggtttatgggtaccacaacatcagagtatacaagaatactggaagtgtgtgaagaaagaaagcattaaaggagtaaaagaagtctggaaacaagctggaaaaggtcttttttaataaaagatataatagtatggcaattatattgttccaaatgtcaaaatttgtgattttttagaagtacttgctatttatcttcttaagtcttcattgatattctgtgtgaaataagcatgtcttgtacttgctttctgattcataattttatgaaagaacttagtagaaagaaaagtaagtataaaaatagatattggattctgtcagaaggcctagatttgaaataatgttttgtacttcggtaagatggaaaacttagtgattcactgatttcttagacactctaatatgatatgctttctggaaggataaaacaaatacatatgggaaaaagtacttgagaccaaggccagcatcaattccagacatcttcatgttcctaataggctaaatgaagttaaaaacttatttcagatttttctcatctgtaccttatatctcataaatttattgcatattttatgtcagtagcttagctgtttattgtctttaaaataacatgtaaacttcaatgttctatctggaagcagaataaaatatttacatagataccaaaaaa

SEQ ID NO: 456526 - DNA, 1338 bp, Homo sapiens
cgcgagagttcccaagcggtaggcggcggcgccgggagagaagcgccgtctagctgcgcttccgcaaagatggcggcggctgcgggtagctgcgcgcgggtggcggcctggggcggaaaactgcgacgggggctcgctgtcagccgacaggctgtgcggagtcccggccccttggcagcggcagtggccggcgcggccctggcaggagcaggagcggcctggcaccacagccgcgtcagtgttgcggcgcgggatggcagttttacagtctccgcacagaaaaatgttgaacatggaataatatatattgggaaaccgtctcttcgtaagcagcgcttcatgcagttttcttcactcgaacatgaaggagaatattatatgacaccacgagacttcctcttctcagtgatgtttgagcaaatggaacgtaaaacttcagtcaagaagctgacaaaaaaggacatcgaggatacactgtcagggatccaaacagctggctgtggatcaacttttttcagagaccttggcgataaagggctaatttcatataccgagtatcttttcttgcttacaatcctcactaaaccccattctggatttcatgttgcttttaaaatgctggatacagatggtaatgagatgattgaaaaaagggaattttttaagctgcagaagatcataagtaaacaagatgacttgatgacagtgaaaactaatgaaactggatatcaggaagcaatagtgaaagaacctgaaattaacacaactcttcagatgcgtttctttggaaaaagaggacaaagaaaacttcattataaagaatttcgaagatttatggaaaatttacaaacagagattcaagaaatggaattccttcagttttctaaaggtttgagtttcatgagaaaagaagactttgcagagtggctactttttttcactaacactgaaaataaagatatttattggaaaaatgtgagagagaagttgtcagcaggagagagcattagtttggatgaattcaagtcattttgccattttacaacccacttggaagactttgctattgccattgcgaaggttcaattaacttatatggccggtaggcaacggggggttaaagagaggtggaaggggcacacgggcagagaccttaacaataatttgggcaacggcttaaaaaccttgtttggattggaggaaagtgctaaacaatgagagagttttgtgggggtaaaaaccaaagcgctccgggtttgtggggcccaacacttcagggtttccgaatactttgagtgggtgaaaagaaccttttaggggtggaagttggcacctttg

SEQ ID NO: 456527 - DNA, 990 bp, Homo sapiens
atctcatctcccagacgccacgtctctcggtttcttcttagatcactcctctgccaaagatcccaacaagacaacatggctcccaagaagcctgagcctaagaaggaggcagccaagccagctccagctccagctccagcccctgcaccagcccctgccccagctcctgaggctcccaaggaacctgcctttgaccccaagagtgtaaagatagacttcactgccgaccagattgaagagttcaaagaggccttttcattgtttgaccggaccccgactggagagatgaagatcacctacggccagtgcggggatgtactgcgggccctgggcagaaaccctaccaatgccgaggtgctgcgtgtgctgggcaagcccaagcctgaagagatgaatgtcaagatgctggactttgagacgttcttgcccatcctgcagcacatttcccgcaacaaggagcagggcacctatgaggacttcgtggagggcctgcgtgtctttgacaaggagagcaatggcacggtcatgggtgctgagcttcggcacgtccttgccaccctgggagagaagatgactgaggctgaagtggagcagctgttagctgggcaagaggatgccaatggctgcatcaattatgaagcctttgtcaagcacatcatgtcagggtgaagcagagtcttccaggtgcctggcccttggctttagccataccagggtgagttaaagagaggccccggctgggtgagctgagatggagtcctcgacttatcaccacaccactgccccaaggaccttacaggccctccctgttaataaacagctctaacacggccaggctgggctctgggattctgagaccgcaagaccaacccttcctcctcctcagcctactcaacctgaagacaaggaagatgaaggccttgaagattatccacttccacttactagtaaatatattttcttttccttatgattttcttaatttttttc

SEQ ID NO: 456528 - DNA, 1061 bp, Homo sapiens
caactgctcaagtcagctcatctctctggctgctccggcatatttgagaaggtctgtttccctggtccttctgggtttccaccaattggcaagaagggatcagcctgtcctagagactcctctgccaaagatcccaacaagacaacatggctcccaagaagcctgagcctaagaaggaggcagccaagccagctccagctccagctccagcccctgcaccagcccctgccccagctcctgaggctcccaaggaacctgcctttgaccccaagagtgtaaagatagacttcactgccgaccagattgaagagttcaaagaggccttttcattgtttgaccggaccccgactggagagatgaagatcacctacggccagtgcggggatgtactgcgggccctgggcagaaaccctaccaatgccgaggtgctgcgtgtgctgggcaagcccaagcctgaagagatgaatgtcaagatgctggactttgagacgttcttgcccatcctgcagcacatttcccgcaacaaggagcagggcacctatgaggacttcgtggagggcctgcgtgtctttgacaaggagagcaatggcacggtcatgggtgctgagcttcggcacgtccttgccaccctgggagagaagatgactgaggctgaagtggagcagctgttagctgggcaagaggatgccaatggctgcatcaattatgaagcctttgtcaagcacatcatgtcagggtgaagcagagtcttccaggtgcctggcccttggctttagccataccagggtgagttaaagagaggccccggctgggtgagctgagatggagtcctcgacttatcaccacaccactgccccaaggaccttacaggccctccctgttaataaacagctctaacacggccaggctgggctctgggattctgagaccgcaagaccaacccttcctcctcctcagcctactcaacctgaagacaaggaagatgaaggccttgaagattatccacttccacttactagtaaatatattttcttttccttatgattttcttaatttttttc

SEQ ID NO: 456529 - DNA, 962 bp, Homo sapiens
atctcatctcccagacgccacgtctctcggtttcttcttagatcactcctctgccaaagatcccaacaagacaacatggctcccaagaagcctgagcctaagaaggaggcagccaagccagctccagctccagctccagcccctgcaccagcccctgccccagctcctgaggctcccaaggaacctgcctttgaccccaagagtgtaaagagttcaaagaggccttttcattgtttgaccggaccccgactggagagatgaagatcacctacggccagtgcggggatgtactgcgggccctgggcagaaaccctaccaatgccgaggtgctgcgtgtgctgggcaagcccaagcctgaagagatgaatgtcaagatgctggactttgagacgttcttgcccatcctgcagcacatttcccgcaacaaggagcagggcacctatgaggacttcgtggagggcctgcgtgtctttgacaaggagagcaatggcacggtcatgggtgctgagcttcggcacgtccttgccaccctgggagagaagatgactgaggctgaagtggagcagctgttagctgggcaagaggatgccaatggctgcatcaattatgaagcctttgtcaagcacatcatgtcagggtgaagcagagtcttccaggtgcctggcccttggctttagccataccagggtgagttaaagagaggccccggctgggtgagctgagatggagtcctcgacttatcaccacaccactgccccaaggaccttacaggccctccctgttaataaacagctctaacacggccaggctgggctctgggattctgagaccgcaagaccaacccttcctcctcctcagcctactcaacctgaagacaaggaagatgaaggccttgaagattatccacttccacttactagtaaatatattttcttttccttatgattttcttaatttttttc

SEQ ID NO: 456530 - DNA, 1441 bp, Homo sapiens
atctcatctcccagacgccacgtctctcggtttcttcttagatcactcctctgccaaagatcccaacaagacaacatggctcccaagaagcctgagcctaagaaggaggcagccaagccagctccagctccagctccagcccctgcaccagcccctgccccagctcctgaggctcccaaggaacctgcctttgaccccaagagtgtaaagatagacttcactgccgaccagattgaagagttcaaagaggccttttcattgtttgaccggaccccgactggagagatgaagatcacctacggccagtgcggggatgtactgcgggccctgggcagaaaccctaccaatgccgaggtgctgcgtgtgctgggcaagcccaagcctgaagagatgaatgtcaagatgctggactttgagacgttcttgcccatcctgcagcacatttcccgcaacaaggagcagggcacctatgaggacttcgtggagggcctgcgtgtctttgacaaggagagcaatggcacggtcatgggtgctgagcttcggcacgtccttgccaccctgggagagaagatgactgaggctgaagtggagcagctgttagctgggcaagaggatgccaatggctgcatcaattatgaagcctttgtcaagcacatcatgtcagggtgaagcagagtcttccaggtgagtgcagcctctccctcctggtcccttccggggtcacatagggccttaagaataacaccatgtgccctagaaggcatctgtcccagccctgaccccttaagaggaaacctcttgggatcaggaagtgaggacagccctgctcactcaccatctcctgtctcctgcctgcccttgcctgttcaccctgtcttgaccctatcagtcacatcctcttgcctctcccaggatctctcaaggcaatgcccttccctcaggcctggggcctcctgtacaggctcctgggagtgagaaagccgatcccaagtggaagagaaggtccctggcctgtgctcttgaccccgttcttcctcacttctttccctaggttttccctgggatccccctgggtgtggtaaggggctgggtctaggagggtgaaatgccctttcctcctagcactttctttcaggtgcctggcccttggctttagccataccagggtgagttaaagagaggccccggctgggtgagctgagatggagtcctcgacttatcaccacaccactgccccaaggaccttacaggccctccctgttaataaacagctctaacacggccaggctgggctctgggattctgagaccgcaagaccaacccttcctcctcctcagcctactcaacctgaagacaaggaagatgaaggccttgaagattatccacttccacttactagtaaatatattttcttttccttatgattttcttaatttttttc

SEQ ID NO: 456531 - DNA, 734 bp, Homo sapiens
atctcatctcccagacgccacgtctctcggtttcttcttagatcactcctctgccaaagatcccaacaagacaacatggctcccaagaagcctgagcctaagaaggaggcagccaagccagctccagctccagctccagcccctgcaccagcccctgccccagctcctgaggctcccaaggaacctgcctttgaccccaagagtgtaaagatagacttcactgccgaccagattgaagagttcaaagaggccttttcattgtttgaccggaccccgactggagagatgaagatcacctacggccagtgcggggatgtactgcgggccctgggcagaaaccctaccaatgccgaggtgctgcgtgtgctgggcaagcccaagcctgaagagatgaatgtcaagatgctggactttgagacgttcttgcccatcctgcagcacatttcccgcaacaaggagcagggcacctatgaggacttcgtggagggcctgcgtgtctttgacaaggagagcaatggcacggtcatgggtgctgagcttcggcacgtccttgccaccctgggagagaagatgactgaggctgaagtggagcagctgttagctgggcaagaggatgccaatggctgcatcaattatgaagtttcccaaattgctttccctgctgccttcctgcccccactgacccaatacgggaccctgtactctcaaggtcacgccacttctcttctgtttct

SEQ ID NO: 456532 - DNA, 951 bp, Homo sapiens
atctcatctcccagacgccacgtctctcggtttcttcttagatcactcctctgccaaagatcccaacaagacaacatggctcccaagaagcctgagcctaagaaggaggcagccaagccagctccagctccagctccagcccctgcaccagcccctgccccagctcctgaggctcccaaggaacctgcctttgaccccaagagtgtaaagatagacttcactgccgaccagattgaagagttcaaagaggccttttcattgtttgaccggaccccgactggagagatgaagatcacctacggccagtgcggggatgtactgcgggccctgggcagaaaccctaccaatgccgaggtgctgcgtgtgctgggcaagcccaagcctgaagagatgaatgtcaagatgctggactttgagacgttcttgcccatcctgcagcacatttcccgcaacaaggagcagggcacctatgaggacttcgtggagggcctgcgtgtctttgacaaggagagcaatggcacgggagagaagatgactgaggctgaagtggagcagctgttagctgggcaagaggatgccaatggctgcatcaattatgaagcctttgtcaagcacatcatgtcagggtgaagcagagtcttccaggtgcctggcccttggctttagccataccagggtgagttaaagagaggccccggctgggtgagctgagatggagtcctcgacttatcaccacaccactgccccaaggaccttacaggccctccctgttaataaacagctctaacacggccaggctgggctctgggattctgagaccgcaagaccaacccttcctcctcctcagcctactcaacctgaagacaaggaagatgaaggccttgaagattatccacttccacttactagtaaatatattttcttttccttatgattttcttaatttttttc

SEQ ID NO: 456533 - DNA, 568 bp, Homo sapiens
  misc_feature (366)..(366): n is a, c, g, or t
atctcatctcccagacgccacgtctctcggtttcttcttagatcactcctctgccaaagatcccaacaagacaacatggctcccaagaagcctgagcctaagaaggaggcagccaagccagctccagctccagctccagcccctgcaccagcccctgccccagctcctgaggctcccaaggaacctgcctttgaccccaagagtgtaaagatagacttcaggcagcctatgggacgcagggcccatctgtccctcggtcgccgtgtggcagagtgggtccgtcgtccccaacactcgtgctcgctcagacactttggcaggatgtctggggcctcaccagcaggaagcgcgtgcaagccgggcagnggctccacctagacccacagcccctcgggagcaccccacctctgtgtgtgatgtagctttctctccctcagcctgcaagggtccgatttgccatcgaaaaagacaacctctacttttttcttttgtattttgataaacactgaagctggagctgttaaatttatcttggggaaactcagaactggtctatttggtgtcgtgg

SEQ ID NO: 456534 - DNA, 364 bp, Homo sapiens
gtcagtgcggctgcatggcagacctctcccagggtcaggcttgcagccccttggcttcctccttgtccagatcttctctgccatctgcactctctcttctcctgctttagcccctcaggaccagcctcacctacccagcttaccctagtcccattttgagaatttatctagacgtccccgtacttaagtgacccttgaggaatgtagcctgggcttgtttccctcacgaggttgggagctcctgtggggcatgagccacattctgttgcctcagtgtctgaggaaggctgagtgggaatctggaaatctgataactgatggttcccactccccagcccaggagctctcaggaggggcatctgtc

SEQ ID NO: 456535 - DNA, 1335 bp, Homo sapiens
tgtgatctcttagcagaatagatttattatttgattgcttgcagaataaagcctatccttgaaagctctgcatcatgggcagtgagctcagtggtatctggaggacagggcactggccactccagtcaccatcttctgccaggaagcctgcacctcaggggtgaattctttgccgaaatggattgccaaaacggtcaccagcacatttcccaggagcttgaagttctcaggatccacatgcagcttgtcacagtgcagttcactcagctgggcaaaggtgcccttgagatcatccaggtgctttatggcatctcccaaggaagtcagcaccttcttgccatgtgccttgactttggggttgcccatgatggcagaggcagaggacaggtactcctctgccaaagatcccaacaagacaacatggctcccaagaagcctgagcctaagaaggaggcagccaagccagctccagctccagctccagcccctgcaccagcccctgccccagctcctgaggctcccaaggaacctgcctttgaccccaagagtgtaaagatagacttcactgccgaccagattgaagagttcaaagaggccttttcattgtttgaccggaccccgactggagagatgaagatcacctacggccagtgcggggatgtactgcgggccctgggcagaaaccctaccaatgccgaggtgctgcgtgtgctgggcaagcccaagcctgaagagatgaatgtcaagatgctggactttgagacgttcttgcccatcctgcagcacatttcccgcaacaaggagcagggcacctatgaggacttcgtggagggcctgcgtgtctttgacaaggagagcaatggcacggtcatgggtgctgagcttcggcacgtccttgccaccctgggagagaagatgactgaggctgaagtggagcagctgttagctgggcaagaggatgccaatggctgcatcaattatgaagcctttgtcaagcacatcatgtcagggtgaagcagagtcttccaggtgcctggcccttggctttagccataccagggtgagttaaagagaggccccggctgggtgagctgagatggagtcctcgacttatcaccacaccactgccccaaggaccttacaggccctccctgttaataaacagctctaacacggccaggctgggctctgggattctgagaccgcaagaccaacccttcctcctcctcagcctactcaacctgaagacaaggaagatgaaggccttgaagattatccacttccacttactagtaaatatattttcttttccttatgattttcttaatttttttc

SEQ ID NO: 456536 - DNA, 997 bp, Homo sapiens
caactgctcaagtcagctcatctctctggctgctccggcatatttgagaagactcctctgccaaagatcccaacaagacaacatggctcccaagaagcctgagcctaagaaggaggcagccaagccagctccagctccagctccagcccctgcaccagcccctgccccagctcctgaggctcccaaggaacctgcctttgaccccaagagtgtaaagatagacttcactgccgaccagattgaagagttcaaagaggccttttcattgtttgaccggaccccgactggagagatgaagatcacctacggccagtgcggggatgtactgcgggccctgggcagaaaccctaccaatgccgaggtgctgcgtgtgctgggcaagcccaagcctgaagagatgaatgtcaagatgctggactttgagacgttcttgcccatcctgcagcacatttcccgcaacaaggagcagggcacctatgaggacttcgtggagggcctgcgtgtctttgacaaggagagcaatggcacggtcatgggtgctgagcttcggcacgtccttgccaccctgggagagaagatgactgaggctgaagtggagcagctgttagctgggcaagaggatgccaatggctgcatcaattatgaagcctttgtcaagcacatcatgtcagggtgaagcagagtcttccaggtgcctggcccttggctttagccataccagggtgagttaaagagaggccccggctgggtgagctgagatggagtcctcgacttatcaccacaccactgccccaaggaccttacaggccctccctgttaataaacagctctaacacggccaggctgggctctgggattctgagaccgcaagaccaacccttcctcctcctcagcctactcaacctgaagacaaggaagatgaaggccttgaagattatccacttccacttactagtaaatatattttcttttccttatgattttcttaatttttttc

SEQ ID NO: 456537 - DNA, 819 bp, Homo sapiens
atctcatctcccagacgccacgtctctcggtttcttcttagatcactcctctgccaaagatcccaacaagacaacatggctcccaagaagcctgagcctaagaaggaggcagccaagccagctccagctccagctccagcccctgcaccagcccctgccccagctcctgaggctcccaaggaacctgcctttgaccccaagagtgtaaagatagacttcactgccgaccagattgaagagttcaaagaggccttttcattgtttgaccggaccccgactggagagatgaagatcacctacggccagtgcggggatgtactgcgggccctgggcagaaaccctaccaatgccgaggtgctgcgtgtgctgggcaagcccaagcctgaagagatgaatgtcaagatgctggactttgagacgttcttgcccatcctgcagcacatttcccgcaacaaggagcagggcacctatgaggacttcgtggagggcctgcgtgtctttgacaaggagagcaatggcacggtcatgggtgctgagcttcggcacgtccttgccaccctgggagagaagatgactgaggctgaagtggagcagctgttagctgggcaagaggatgccaatggctgcatcaattatgaagcctttgtcaagcacatcatgtcagggtgaagcagagtcttccaggaccgcaagaccaacccttcctcctcctcagcctactcaacctgaagacaaggaagatgaaggccttgaagattatccacttccacttactagtaaatatattttcttttccttatgattttcttaatttttttc

SEQ ID NO: 456538 - DNA, 917 bp, Homo sapiens
atctcatctcccagacgccacgtctctcggtttcttcttagatcactcctctgccaaagatcccaacaagacaacatggctcccaagaagcctgagcctaagaaggaggcagccaagccagctccagctccagctccagcccctgcaccagcccctgccccagctcctgaggctcccaaggaacctgcctttgaccccaagagtgtaaagatagacttcactgccgaccagattgaagagttcaaagaggccttttcattgtttgaccggaccccgactggagagatgaagatcacctacggccagtgcggggatgtactgcgggccctgggcagaaaccctaccaatgccgaggtgctgcgtgtgctgggcaagcccaagcctgaagagatgaatgtcaagatgctggactttgagacgttcttgcccatcctgcagcacatttcccgcaacaaggagcagggcacctatgaggacttcgtggagggcctgcgtgtctttgacaaggagagcaatggcacgggttagctgggcaagaggatgccaatggctgcatcaattatgaagcctttgtcaagcacatcatgtcagggtgaagcagagtcttccaggtgcctggcccttggctttagccataccagggtgagttaaagagaggccccggctgggtgagctgagatggagtcctcgacttatcaccacaccactgccccaaggaccttacaggccctccctgttaataaacagctctaacacggccaggctgggctctgggattctgagaccgcaagaccaacccttcctcctcctcagcctactcaacctgaagacaaggaagatgaaggccttgaagattatccacttccacttactagtaaatatattttcttttccttatgattttcttaatttttttc

SEQ ID NO: 456539 - DNA, 1015 bp, Homo sapiens
tgtgatctcttagcagaatagatttattatttgattgcttgcagaataaagcctatccttgaaagctctgcatcatgggcagtgagctcagtggtatctggaggacagggcactggccactccagtcaccatcttctgccaggaagcctgcacctcaggggtgaattctttgccgaaatggattgccaaaacggtcaccagcacatttcccaggagcttgaagttctcaggatccacatgcagcttgtcacagtgcagttcactcagctgggcaaaggtgcccttgagatcatccaggtgctttatggcatctcccaaggaagtcagcaccttcttgccatgtgccttgactttggggttgcccatgatggcagaggcagaggacaggtactcctctgccaaagatcccaacaagacaacatggctcccaagaagcctgagcctaagaaggaggcagccaagccagctccagctccagctccagcccctgcaccagcccgacttcgtggagggcctgcgtgtctttgacaaggagagcaatggcacggtcatgggtgctgagcttcggcacgtccttgccaccctgggagagaagatgactgaggctgaagtggagcagctgttagctgggcaagaggatgccaatggctgcatcaattatgaagcctttgtcaagcacatcatgtcagggtgaagcagagtcttccaggtgcctggcccttggctttagccataccagggtgagttaaagagaggccccggctgggtgagctgagatggagtcctcgacttatcaccacaccactgccccaaggaccttacaggccctccctgttaataaacagctctaacacggccaggctgggctctgggattctgagaccgcaagaccaacccttcctcctcctcagcctactcaacctgaagacaaggaagatgaaggccttgaagattatccacttccacttactagtaaatatattttcttttccttatgattttcttaatttttttc

SEQ ID NO: 456540 - DNA, 1049 bp, Homo sapiens
ctcggctctgcccctcgacagtctgcagtctacggcgaggcacaggccagcccagctccacgaggactgaacaaggtgctgtctcactgccaccatgccggaagtcgagagaaaacccaagatcactgcctcccgcaaactcttgctgaagagcctgatgctggccaaggccaaggaatgctgggagcaggagcacgaggagcgcgaggctgagaaggtgcgctacctggcagagcgcatccccacgctgcagacccgtggcctgtccctcagtgccctgcaggacctgtgccgggagctgcacgccaaggtggaggtggtggatgaggagcgatacgacattgaggccaaatgcctccacaacaccagggagattaaggacctgaagctgaaggtgatggacctccgtgggaagttcaagcgcccgcccctgcgtcgagtccgtgtctcggctgacgccatgctccgggccctgctgggctccaagcacaaggtgtccatggatctgcgggccaacctcaagtctgtgaagaaggaagacacagagaaggagcggcctgtggaggtgggtgactggaggaagaacgtggaggccatgtctggcatggaaggccggaagaagatgtttgatgccgccaagtctccgacctcacaatagaggccagcttgctgtgctgcgctctgagctcctgcttcatgcttcttctccaacccagctcactcacctctctgcctgtgtctggagcatcccttcccacctctcccccacttcttccctccagcctgcatgccctcctctggaactgggattaaacagatacccaagaggcaggaaaaacgcgagtgtctgaagacctcaccctggcagggtgggcttctatccacccatgaggcacctggggcttctcagccaccccgtggtgtaacaagtggaggaggaggagggggtgagaacacctttcctccagccctgtgccacactccttctatgtgtgtacagtgtccacaggcatcacaccttcttcattaaaaacccagtttcctggtca

SEQ ID NO: 456541 - DNA, 553 bp, Homo sapiens
cgagaagctgaggttttgtaggagcccttatgaatgaagatccagtccggggtgcgctagggctgagaagccctggggactgcatgtgctgtaggtaagtcagggattcatgcgctgcacacaggtccccgggaactgatggctttgcctctttgtccctacaggccagcttgctgtgctgcgctctgagctcctgcttcatgcttcttctccaacccagctcactcacctctctgcctgtgtctggagcatcccttcccacctctcccccacttcttccctccagcctgcatgccctcctctggaactgggattaaacagatacccaagaggcaggaaaaacgcgagtgtctgaagacctcaccctggcagggtgggcttctatccacccatgaggcacctggggcttctcagccaccccgtggtgtaacaagtggaggaggaggagggggtgagaacacctttcctccagccctgtgccacactccttctatgtgtgtacagtgtccacaggcatcacaccttcttcattaaaaacccagtttcctggtca

SEQ ID NO: 456542 - DNA, 611 bp, Homo sapiens
ctcggctctgcccctcgacagtctgcagtctacggcgaggcacaggccagcccagctccacgaggactgaacaaggtgctgtctcactgccaccatgccggaagtcgagagaaaacccaagatcactgcctcccgcaaactcttgctgaagagcctgatgctggccaaggccaaggaatgctgggagcaggagcacgaggagcgcgaggctgagaaggtgcgctacctggcagagcgcatccccacgctgcagacccgtggcctgtccctcagtgccctgcaggacctgtgccgggagctgcacgccaaggtggaggtggtggatgaggagcgatacgacattgaggccaaatgcctccacaacaccagggagattaaggacctgaagctgaaggtgatggacctccgtgggaagttcaagcgcccgcccctgcgtcgagtccgtgtctcggctgacgccatgctccgggccctgctgggctccaagcacaaggtgtccatggatctgcgggccaacctcaagtctgtgaagaaggaagacacagagaagatgtgtgtacagtgtccacaggcatcacaccttcttcattaaaaacccagtttcctggtca

SEQ ID NO: 456543 - DNA, 1075 bp, Homo sapiens
ctcggctctgcccctcgacagtctgcagtctacggcgaggcacaggccagcccagctccacgaggactgaacaaggtgctgtctcactgccaccatgccggaagtcgagagaaaacccaagatcactgcctcccgcaaactcttgctgaagagcctgatgctggccaaggccaaggaatgctgggagcaggagcacgaggagcgcgaggctgagaaggtgcgctacctggcagagcgcatccccacgctgcagacccgtggcctgtccctcagtgccctgcaggacctgtgccgggagctgcacgccaaggtggaggtggtggatgaggagcgatacgacattgaggccaaatgcctccacaacaccagggagattaaggacctgaagctgaaggtgatggacctccgtgggaagttcaagcgcccgcccctgcgtcgagtccgtgtctcggctgacgccatgctccgggccctgctgggctccaagcacaaggtgtccatggatctgcgggccaacctcaagtctgtgaagaaggaagacacagagaaggagcggcctgtggaggtgggtgactggaggaagaacgtggaggccatgtctggcatggaaggccggaagaagatgtttgatgccgccaagtctccgacctcacaatagaggccagcttgctgtgctgcgctctgagctcctgcttcatgcttcttctccaacccagctcactcacctctctgcctgtgtctggagcatcccttcccacctctcccccacttcttccctccagcctgcatgccctcctctggaactgggattaaacagatacccaagaggcaggaaaaacgcgagtgtctgaagacctcaccctggcagggtgggcttctatccacccatgaggcacctggggcttctcagccaccccgtggtgtaacaagtggaggaggaggagggggtgagaacacctttcctccagccctgtgccacactccttctatgtgtgtacagtgtccacaggcatcacaccttcttcattaaaaacccagtttcctggtcaaaaaaagacaaataaagcatacaaaa

SEQ ID NO: 456544 - DNA, 460 bp, Homo sapiens
  misc_feature (42)..(42): n is a, c, g, or t
gggggggggggagggggcccatacggcgttgcgtagcgacgncgagctcgctgtctccgacctcacagagagccagcttgctgtgctgcgctctgagctcctgcttcatgcttcttctccaacccagctcactcacctctctgcctgtgtctggagcatcccttcccacctctcccccacttcttccctccagcctgcatgccctcctctggaactgggattaaacagatacccaagaggcaggaaaaacgcgagtgtctgaagacctcaccctggcagggtgggcttctatccacccatgaggcacctggggcttctcagccaccccgtggtgtaacaagtggaggaggaggagggggtgagaacacctttcctccagccctgtgccacactccttctatgtgtgtacagtgtccacaggcatcacaccttcttcattaaaaacccagtttcctggtca

SEQ ID NO: 456545 - DNA, 823 bp, Homo sapiens
ctcggctctgcccctcgacagtctgcagtctacggcgaggcacaggccagcccagctccacgaggactgaacaaggtgctgtctcactgccaccatgccggaagtcgagagaaaacccaagatcactgcctcccgcaaactcttgctgaagagcctgatgctggccaaggccaaggaatgctgggagcaggagcacgaggagcgcgaggctgagaaggtgcgctacctggcagagcgcatccccacgctgcagacccgtggcctgtccctcagtgccctgcaggacctgtgccgggagctgcacgccaaggtggaggtggtggatgaggagcgatacgacattgaggccaaatgcctccacaacaccagggagattaaggacctgaagctgaaggtgatggacctccgtgggaagttcaagcgcccgcccctgcgtcgagtccgtgtctcggctgacgccatgctccgggccctgctgggtccaacccagctcactcacctctctgcctgtgtctggagcatcccttcccacctctcccccacttcttccctccagcctgcatgccctcctctggaactgggattaaacagatacccaagaggcaggaaaaacgcgagtgtctgaagacctcaccctggcagggtgggcttctatccacccatgaggcacctggggcttctcagccaccccgtggtgtaacaagtggaggaggaggagggggtgagaacacctttcctccagccctgtgccacactccttctatgtgtgtacagtgtccacaggcatcacaccttcttcattaaaaacccagtttcctggtca

SEQ ID NO: 456546 - DNA, 767 bp, Homo sapiens
ctcggctctgcccctcgacagtctgcagtctacggcgaggcacaggccagcccagctccacgaggactgaacaaggtgctgtctcactgccaccatgccggaagtcgagagaaaacccaagatcactgcctcccgcaaactcttgctgaagagcctgatgctggccaaggccaaggaatgctgggagcaggagcacgaggagcgcgaggctgagaaggtgcgctacctggcagagcgcatccccacgctgcagacccgtggcctgtccctcagtgccctgcaggacctgtgccgggagctgcacgccaaggtggaggtggtggatgaggagcgatacgacattgaggccaaatgcctccacaacaccagggagattaaggacctgaagctgaaggtgatggacctccgtgggaagttcaagcgcccgcccctgcgtcgagtccgtgtctcggctgacgccatgctccgggccctgctgggctccaagcacaaggtgtccatggatctgcgggccaacctcaagtctgtgaagaaggaagacacagagaaggaaaaacgcgagtgtctgaagacctcaccctggcagggtgggcttctatccacccatgaggcacctggggcttctcagccaccccgtggtgtaacaagtggaggaggaggagggggtgagaacacctttcctccagccctgtgccacactccttctatgtgtgtacagtgtccacaggcatcacaccttcttcattaaaaacccagtttcctggtca

SEQ ID NO: 456547 - DNA, 1129 bp, Homo sapiens
ctcggctctgcccctcgacagtctgcagtctacggcgaggcacaggccagcccagctccacgaggactgaacaaggtgctgtctcactgccaccatgccggaagtcgagagaaaacccaagatcactgcctcccgcaaactcttgctgaagagcctgatgctggccaaggccaaggaatgctgggagcaggagcacgaggagcgcgaggctgagaaggtgcgctacctggcagagcgcatccccacgctgcagacccgtggcctgtccctcagtgccctgcaggacctgtgccgggagctgcacgccaaggtggaggtggtggatgaggagcgatacgacattgaggccaaatgcctccacaacaccagggagattaaggacctgaagctgaaggtgatggacctccgtgggaagttcaagcgcccgcccctgcgtcgagtccgtgtctcggctgacgccatgctccgggccctgctgggctccaagcacaaggtgtccatggatctgcgggccaacctcaagtctgtgaagaaggaagacacagagaaggagcggcctgtggaggtgggtgactggaggaagaacgtggaggccatgtctggcatggaaggccggaagaagatgtttgatgccgccaagtctccgacctcacaatagaggtacctagagaccagctcccttctctggggtccatcagagtctagaggataatgagggagtccacaatgggcaggcgggttgtacttagtgtggtgcacggatgcacggactaaggcaccgatgagactgatttgagtcggctctcctgggctcagtcctggctccagcaccatgatacttgggcatgtcatttctgtttggcggccctttttgttcccattatctatgaaattgggggctgtatcaaatcagtggttctccaagtgtggtcctgggaccagcagcgtctacatcacctgggatgcaaatgatcagcccccaccccagatccactaaattggaaactctggggtgaggccagccttctaggtgattctgatgcacatgagagtttgagaaccactaggttagagggtccctgggatcccttcatctctgactttctgagaatctatgcacttttaaata

SEQ ID NO: 456548 - DNA, 548 bp, Homo sapiens
ctcggctctgcccctcgacagtctgcagtctacggcgaggcacaggccagcccagctccacgaggactgaacaaggtgctgtctcactgccaccatgccggaagtcgagagaaaacccaagatcactgcctcccgcaaactcttgctgaagagcctgatgctggccaaggccaaggaatgctgggagcaggagcacgaggagcgcgaggctgagaaggtgcgctacctggcagagcgcatccccacgctgcagacccgtggcctgtccctcagtgccctgcagtgcatgccctcctctggaactgggattaaacagatacccaagaggcaggaaaaacgcgagtgtctgaagacctcaccctggcagggtgggcttctatccacccatgaggcacctggggcttctcagccaccccgtggtgtaacaagtggaggaggaggagggggtgagaacacctttcctccagccctgtgccacactccttctatgtgtgtacagtgtccacaggcatcacaccttcttcattaaaaacccagtttcctggtca

SEQ ID NO: 456549 - DNA, 1003 bp, Homo sapiens
ctcggctctgcccctcgacagtctgcagtctacggcgaggcacaggccagcccagctccacgaggactgaacaaggtgctgtctcactgccaccatgccggaagtcgagagaaaacccaagatcactgcctcccgcaaactcttgctgaagagcctgatgctggccaaggccaaggaatgctgggagcaggagcacgaggagcgcgaggctgagaaggtgcgctacctggcagagcgcatccccacgctgcagacccgtggcctgtccctcagtgccctgcaggacctgtgccgggagctgcacgccaaggtggaggtggtggatgaggagcgatacgacattgaggccaaatgcctccacaacaccagggagattaaggacctgaagctgaaggtgatggacctccgtgggaagttcaagcgcccgcccctgcgtcgagtccgtgtctcggctgacgccatgctccgggccctgctgggctccaagcacaaggtgtccatggatctgcgggccaacctcaagtctgtgaagaaggaagacacagagaaggagcggcctgtggaggtgggtgactggaggaagaacgtggaggccatgtctggcatggaaggccggaagaagatgtttgatgccgccaagtctccgacctcacaatagaggccagcttgctgtgctgcgctctgagctcctgcttcatgcttcttctccaacccagctcactcacctctctgcctgtgtctggagcatcccttcccacctctcccccacttcttccctccagcctgcatgccctcctctggaactgggattaaacagatacccaagaggcaggaaaaacgcgagtgtctgaagacctcaccctggcagggtgggcttctatccacccatgaggcacctggggcttctcaacctttcctccagccctgtgccacactccttctatgtgtgtacagtgtccacaggcatcacaccttcttcattaaaaacccagtttcctggtca

SEQ ID NO: 456550 - DNA, 906 bp, Homo sapiens
ctcggctctgcccctcgacagtctgcagtctacggcgaggcacaggccagcccagctccacgaggactgaacaaggtgctgtctcactgccaccatgccggaagtcgagagaaaacccaagatcactgcctcccgcaaactcttgctgaagagcctgatgctggccaaggccaaggaatgctgggagcaggagcacgaggagcgcgaggctgagaaggtgcgctacctggcagagcgcatccccacgctgcagacccgtggcctgtccctcagtgccctgcaggacctgtgccgggagctgcacgccaaggtggaggtggtggatgaggagcgatacgacattgaggccaaatgcctccacaacaccagggagattaaggacctgaagctgaaggtgatggacctccgtgggaagttcaagcgcccgcccctgcgtcgagtccgtgtctcggctgacgccatgctccgggccctgctgggctccaagcacaaggtgtccatggatctgcgggccaacctcaagtctgtgaagaaggaagacacagagaaggagcggcctgtggaggtgggtgactggaggaagaacgtggaggccatgtctggcatggaaggccggaagaagatgtttgatgccgccaagttgcatgccctcctctggaactgggattaaacagatacccaagaggcaggaaaaacgcgagtgtctgaagacctcaccctggcagggtgggcttctatccacccatgaggcacctggggcttctcagccaccccgtggtgtaacaagtggaggaggaggagggggtgagaacacctttcctccagccctgtgccacactccttctatgtgtgtacagtgtccacaggcatcacaccttcttcattaaaaacccagtttcctggtca

SEQ ID NO: 456551 - DNA, 7474 bp, Homo sapiens
gctctgggcaggagagagagggagagacaagagacacacacagagagacggcgaggaagggaaagacccagagggacgcctagaacgagacttggagccagacagaggaagaggggacgtgtgtttgcagactggctgggcccgtgacccagcttcctgagtcctccgtgcaggtggcagctgtaccaggctggcaggtcactgagagtgggcagctgggccccagaactgtgcctggcccagtgggcagcaggagctcctgacttgggaccatggtgattcttcagcagggggaccatgtgtggatggacctgagattggggcaggagttcgacgtgcccatcggggcggtggtgaagctctgcgactctgggcaggtccaggtggtggatgatgaagacaatgaacactggatctctccgcagaacgcaacgcacatcaagcctatgcaccccacgtcggtccacggcgtggaggacatgatccgcctgggggacctcaacgaggcgggcatcttgcgcaacctgcttatccgctaccgggaccacctcatctacacgtatacgggctccatcctggtggctgtgaacccctaccagctgctctccatctactcgccagagcacatccgccagtataccaacaagaagattggggagatgcccccccacatctttgccattgctgacaactgctacttcaacatgaaacgcaacagccgagaccagtgctgcatcatcagtggggaatctggggccgggaagacggagagcacaaagctgatcctgcagttcctggcagccatcagtgggcagcactcgtggattgagcagcaggtcttggaggccacccccattctggaagcatttgggaatgccaagaccatccgcaatgacaactcaagccgtttcggaaagtacatcgacatccacttcaacaagcggggcgccatcgagggcgcgaagattgagcagtacctgctggaaaagtcacgtgtctgtcgccaggccctggatgaaaggaactaccacgtgttctactgcatgctggagggtatgagtgaggatcagaagaagaagctgggcttgggccaggcctctgactacaactacttggccatgggtaactgcataacctgtgagggccgggtggacagccaggagtacgccaacatccgctccgccatgaaggtgctcatgttcactgacaccgagaactgggagatctcgaagctcctggctgccatcctgcacctgggcaacctgcagtatgaggcacgcacatttgaaaacctggatgcctgtgaggttctcttctccccatcgctggccacagctgcatccctgcttgaggtgaaccccccagacctgatgagctgcctgactagccgcaccctcatcacccgcggggagacggtgtccaccccactgagcagggaacaggcactggacgtgcgcgacgccttcgtaaaggggatctacgggcggctgttcgtgtggattgtggacaagatcaacgcagcaatttacaagcctccctcccaggatgtgaagaactctcgcaggtccatcggcctcctggacatctttgggtttgagaactttgctgtgaacagctttgagcagctctgcatcaacttcgccaatgagcacctgcagcagttctttgtgcggcacgtgttcaagctggagcaggaggaatatgacctggagagcattgactggctgcacatcgagttcactgacaaccaggatgccctggacatgattgccaacaagcccatgaacatcatctccctcatcgatgaggagagcaagttccccaagggcacagacaccaccatgttacacaagctgaactcccagcacaagctcaacgccaactacatcccccccaagaacaaccatgagacccagtttggcatcaaccattttgcaggcatcgtctactatgagacccaaggcttcctggagaagaaccgagacaccctgcatggggacattatccagctggtccactcctccaggaacaagttcatcaagcagatcttccaggccgatgtcgccatgggcgccgagaccaggaagcgctcgcccacacttagcagccagttcaagcggtcactggagctgctgatgcgcacgctgggtgcctgccagcccttctttgtgcgatgcatcaagcccaatgagttcaagaagcccatgctgttcgaccggcacctgtgcgtgcgccagctgcggtactcaggaatgatggagaccatccgaatccgccgagctggctaccccatccgctacagcttcgtagagtttgtggagcggtaccgtgtgctgctgccaggtgtgaagccggcctacaagcagggcgacctccgcgggacttgccagcgcatggctgaggctgtgctgggcacccacgatgactggcagataggcaaaaccaagatctttctgaaggaccaccatgacatgctgctggaagtggagcgggacaaagccatcaccgacagagtcatcctccttcagaaagtcatccggggattcaaagacaggtctaactttctgaagctgaagaacgctgccacactgatccagaggcactggcggggtcacaactgtaggaagaactacgggctgatgcgtctgggcttcctgcggctgcaggccctgcaccgctcccggaagctgcaccagcagtaccgcctggcccgccagcgcatcatccagttccaggcccgctgccgcgcctatctggtgcgcaaggccttccgccaccgcctctgggctgtgctcaccgtgcaggcctatgcccggggcatgatcgcccgcaggctgcaccaacgcctcagggctgagtatctgtggcgcctcgaggctgagaaaatgcggctggcggaggaagagaagcttcggaaggagatgagcgccaagaaggccaaggaggaggccgagcgcaagcatcaggagcgcctggcccagctggctcgtgaggacgctgagcgggagctgaaggagaaggaggccgctcggcggaagaaggagctcctggagcagatggaaagggcccgccatgagcctgtcaatcactcagacatggtggacaagatgtttggcttcctggggacttcaggtggcctgccaggccaggagggccaggcacctagtggctttgaggacctggagcgagggcggagggagatggtggaggaggacctggatgcagccctgcccctgcctgacgaggatgaggaggacctctctgagtataaatttgccaagttcgcggccacctacttccaggggacaaccacgcactcctacacccggcggccactcaaacagccactgctctaccatgacgacgagggtgaccagctggcagccctggcggtctggatcaccatcctccgcttcatgggggacctccctgagcccaagtaccacacagccatgagtgatggcagtgagaagatccctgtgatgaccaagatttatgagaccctgggcaagaagacgtacaagagggagctgcaggccctgcagggcgagggcgaggcccagctccccgagggccagaagaagagcagtgtgaggcacaagctggtgcatttgactctgaaaaagaagtccaagctcacagaggaggtgaccaagaggctgcatgacggggagtccacagtgcagggcaacagcatgctggaggaccggcccacctccaacctggagaagctgcacttcatcatcggcaatggcatcctgcggccagcactccgggacgagatctactgccagatcagcaagcagctgacccacaacccctccaagagcagctatgcccggggctggattctcgtgtctctctgcgtgggctgtttcgccccctccgagaagtttgtcaagtacctgcggaacttcatccacgggggcccgcccggctacgccccgtactgtgaggagcgcctgagaaggacctttgtcaatgggacacggacacagccgcccagctggctggagctgcaggccaccaagtccaagaagccaatcatgttgcccgtgacattcatggatgggaccaccaagaccctgctgacggactcggcaaccacggccaaggagctctgcaacgcgctggccgacaagatctctctcaaggaccggttcgggttctccctctacattgccctgtttgacaaggtgtcctccctgggcagcggcagtgaccacgtcatggacgccatctcccagtgcgagcagtacgccaaggagcagggcgcccaggagcgcaacgccccctggaggctcttcttccgcaaagaggtcttcacgccctggcacagcccctccgaggacaacgtggccaccaacctcatctaccagcaggtggtgcgaggagtcaagtttggggagtacaggtgtgagaaggaggacgacctggctgagctggcctcccagcagtactttgtagactatggctctgagatgatcctggagcgcctcctgaacctcgtgcccacctacatccccgaccgcgagatcacgcccctgaagacgctggagaagtgggcccagctggccatcgccgcccacaagaaggggatttatgcccagaggagaactgatgcccagaaggtcaaagaggatgtggtcagttatgcccgcttcaagtggcccttgctcttctccaggttttatgaagcctacaaattctcaggccccagtctccccaagaacgacgtcatcgtggccgtcaactggacgggtgtgtactttgtggatgagcaggagcaggtacttctggagctgtccttcccagagatcatggccgtgtccagcagcagggagtgccgtgtctggctctcactgggctgctctgatcttggctgtgctgcgcctcactcaggctgggcaggactgaccccggcggggccctgttctccgtgttggtcctgcaggggagcgaaaacgacggcccccagcttcacgctggccaccatcaagggggacgaatacaccttcacctccagtaatgctgaggacattcgtgacctggtggtcaccttcctagaggggctccggaagagatctaagtatgttgtggccctgcaggataaccccaaccccgcaggcgaggagtcaggcttcctcagctttgccaagggagacctcatcatcctggaccatgacacgggcgagcaggtcatgaactcgggctgggccaacggcatcaatgagaggaccaagcagcgtggggacttccccaccgacagtgtgtacgtcatgcccactgtcaccatgccaccgcgggagattgtggccctggtcaccatgactcccgatcagaggcaggacgttgtccggctcttgcagctgcgaacggcggagcccgaggtgcgtgccaagccctacacgctggaggagttttcctatgactacttcaggcccccacccaagcacacgctgagccgtgtcatggtgtccaaggcccgaggcaaggaccggctgtggagccacacgcgggaaccgctcaagcaggcgctgctcaagaagctcctgggcagtgaggagctctcgcaggaggcctgcctggccttcattgctgtgctcaagtacatgggcgactacccgtccaagaggacacgctccgtcaacgagctcaccgaccagatctttgagggtcccctgaaagccgagcccctgaaggacgaggcatatgtgcagatcctgaagcagctgaccgacaaccacatcaggtacagcgaggagcggggttgggagctgctctggctgtgcacgggccttttcccacccagcaacatcctcctgccccacgtgcagcgcttcctgcagtcccgaaagcactgcccactcgccatcgactgcctgcaacggctccagaaagccctgagaaacgggtcccggaagtaccctccgcacctggtggaggtggaggccatccagcacaagaccacccagattttccacaaggtctacttccctgatgacactgacgaggccttcgaagtggagtccagcaccaaggccaaggacttctgccagaacatcgccaccaggctgctcctcaagtcctcagagggattcagcctctttgtcaaaattgcagacaaggtcctcagcgttcctgagaatgacttcttctttgactttgttcgacacttgacagactggataaagaaagctcggcccatcaaggacggaattgtgccctcactcacctaccaggtgttcttcatgaagaagctgtggaccaccacggtgccagggaaggatcccatggccgattccatcttccactattaccaggagttgcccaagtatctccgaggctaccacaagtgcacgcgggaggaggtgctgcagctgggggcgctgatctacagggtcaagttcgaggaggacaagtcctacttccccagcatccccaagctgctgcgggagctggtgccccaggaccttatccggcaggtctcacctgatgactggaagcggtccatcgtcgcctacttcaacaagcacgcagggaagtccaaggaggaggccaagctggccttcctgaagctcatcttcaagtggcccacctttggctcagccttcttcgaggtgaagcaaactacggagccaaacttccctgagatcctcctaattgccatcaacaagtatggggtcagcctcatcgatcccaaaacgaaggatatcctcaccactcatcccttcaccaagatctccaactggagcagcggcaacacctacttccacatcaccattgggaacttggtgcgcgggagcaaactgctctgcgagacgtcactgggctacaagatggatgacctcctgacttcctacattagccagatgctcacagccatgagcaaacagcggggctccaggagcggcaagtgaacagtcacggggaggtgctggttccatgcctgctctcgaggcagcagtgggttcaggcccatcagctacccctgcagctggggaagacttatgccatcccggcagcgaggctgggctggccagccaccactgactataccaactgggcctctgatgttcttccagtgaggcatctctctgggatgcagaacttccctccatccacccctctggcacctgggttggtctaatcctagtttgctgtggccttcccggttgtgagagcctgtgatccttagatgtgtctcctgtttcagaccagccccaccatgcaacttcctttgactttctgtgtaccactgggatagaggaatcaagaggacaatctagctctccatactttgaacaaccaaatgtgcattgaatactctgaaaccgaagggactggatctgcaggtgggatgagggagacagaccacttttctatattgcagtgtgaatgctgggcccctgctcaagtctaccctgatcacctcagggcataaagcatgtttcattctctgaaaaacaaaaat

SEQ ID NO: 456552 - DNA, 4030 bp, Homo sapiens
gctctgggcaggagagagagggagagacaagagacacacacagagagacggcgaggaagggaaagacccagagggacgcctagaacgagacttggagccagacagaggaagaggggacgtgtgtttgcagactggctgggcccgtgacccagcttcctgagtcctccgtgcaggtggcagctgtaccaggctggcaggtcactgagagtgggcagctgggccccagaactgtgcctggcccagtgggcagcaggagctcctgacttgggaccatggtgattcttcagcagggggaccatgtgtggatggacctgagattggggcaggagttcgacgtgcccatcggggcggtggtgaagctctgcgactctgggcaggtccaggtggtggatgatgaagacaatgaacactggatctctccgcagaacgcaacgcacatcaagcctatgcaccccacgtcggtccacggcgtggaggacatgatccgcctgggggacctcaacgaggcgggcatcttgcgcaacctgcttatccgctaccgggaccacctcatctacacgtatacgggctccatcctggtggctgtgaacccctaccagctgctctccatctactcgccagagcacatccgccagtataccaacaagaagattggggagatgcccccccacatctttgccattgctgacaactgctacttcaacatgaaacgcaacagccgagaccagtgctgcatcatcagtggggaatctggggccgggaagacggagagcacaaagctgatcctgcagttcctggcagccatcagtgggcagcactcgtggattgagcagcaggtcttggaggccacccccattctggaagcatttgggaatgccaagaccatccgcaatgacaactcaagccgtttcggaaagtacatcgacatccacttcaacaagcggggcgccatcgagggcgcgaagattgagcagtacctgctggaaaagtcacgtgtctgtcgccaggccctggatgaaaggaactaccacgtgttctactgcatgctggagggtatgagtgaggatcagaagaagaagctgggcttgggccaggcctctgactacaactacttggccatgggtaactgcataacctgtgagggccgggtggacagccaggagtacgccaacatccgctccgccatgaaggtgctcatgttcactgacaccgagaactgggagatctcgaagctcctggctgccatcctgcacctgggcaacctgcagtatgaggcacgcacatttgaaaacctggatgcctgtgaggttctcttctccccatcgctggccacagctgcatccctgcttgaggtgaaccccccagacctgatgagctgcctgactagccgcaccctcatcacccgcggggagacggtgtccaccccactgagcagggaacaggcactggacgtgcgcgacgccttcgtaaaggggatctacgggcggctgttcgtgtggattgtggacaagatcaacgcagcaatttacaagcctccctcccaggatgtgaagaactctcgcaggtccatcggcctcctggacatctttgggtttgagaactttgctgtgaacagctttgagcagctctgcatcaacttcgccaatgagcacctgcagcagttctttgtgcggcacgtgttcaagctggagcaggaggaatatgacctggagagcattgactggctgcacatcgagttcactgacaaccaggatgccctggacatgattgccaacaagcccatgaacatcatctccctcatcgatgaggagagcaagttccccaagggcacagacaccaccatgttacacaagctgaactcccagcacaagctcaacgccaactacatcccccccaagaacaaccatgagacccagtttggcatcaaccattttgcaggcatcgtctactatgagacccaaggcttcctggagaagaaccgagacaccctgcatggggacattatccagctggtccactcctccaggaacaagttcatcaagcagatcttccaggccgatgtcgccatgggcgccgagaccaggaagcgctcgcccacacttagcagccagttcaagcggtcactggagctgctgatgcgcacgctgggtgcctgccagcccttctttgtgcgatgcatcaagcccaatgagttcaagaagcccatgctgttcgaccggcacctgtgcgtgcgccagctgcggtactcaggaatgatggagaccatccgaatccgccgagctggctaccccatccgctacagcttcgtagagtttgtggagcggtaccgtgtgctgctgccaggtgtgaagccggcctacaagcagggcgacctccgcgggacttgccagcgcatggctgaggctgtgctgggcacccacgatgactggcagataggcaaaaccaagatctttctgaaggaccaccatgacatgctgctggaagtggagcgggacaaagccatcaccgacagagtcatcctccttcagaaagtcatccggggattcaaagacaggtctaactttctgaagctgaagaacgctgccacactgatccagaggcactggcggggtcacaactgtaggaagaactacgggctgatgcgtctgggcttcctgcggctgcaggccctgcaccgctcccggaagctgcaccagcagtaccgcctggcccgccagcgcatcatccagttccaggcccgctgccgcgcctatctggtgcgcaaggccttccgccaccgcctctgggctgtgctcaccgtgcaggcctatgcccggggcatgatcgcccgcaggctgcaccaacgcctcagggctgagtatctgtggcgcctcgaggctgagaaaatgcggctggcggaggaagagaagcttcggaaggagatgagcgccaagaaggccaaggaggaggccgagcgcaagcatcaggagcgcctggcccagctggctcgtgaggacgctgagcgggagctgaaggagaaggaggccgctcggcggaagaaggagctcctggagcagatggaaagggcccgccatgagcctgtcaatcactcagacatggtggacaagatgtttggcttcctggggacttcaggtggcctgccaggccaggagggccaggcacctagtggctttgaggacctggagcgagggcggagggagatggtggaggaggacctggatgcagccctgcccctgcctgacgaggatgaggaggacctctctgagtataaatttgccaagttcgcggccacctacttccaggggacaaccacgcactcctacacccggcggccactcaaacagccactgctctaccatgacgacgagggtgaccagctggcagccctggcggtctggatcaccatcctccgcttcatgggggacctccctgagcccaagtaccacacagccatgagtgatggcagtgagaagatccctgtgatgaccaagatttatgagaccctgggcaagaagacgtacaagagggagctgcaggccctgcagggcgagggcgaggcccagctccccgagggccagaagaagagcagtgtgaggcacaagctggtgcatttgactctgaaaaagaagtccaagctcacagaggaggtgaccaagaggctgcatgacggggagtccacagtgcagggcaacagcatgctggaggaccggcccacctccaacctggagaagctgcacttcatcatcggcaatggcatcctgcggccagcactccggtgccggaaagtcttttggtggctgagtggtgcctctgtcaacctagcaagagattaagccaagcaggcctgggtttggcttcgctgctagctagttggtggagttaggaccttggtggagttatttcatctttctaagcctctgattccttgtctgtaaagggggaatcctaaaacaggcatcccttggagatattgcaggttcagttgaaggccacagaaataaatatcacaataaagagagctgcagaaata

SEQ ID NO: 456553 - DNA, 530 bp, Homo sapiens
gctctgggcaggagagagagggagagacaagagacacacacagagagacggcgaggaagggaaagacccagagggacgcctagaacgagacttggagccagacagaggaagaggggacgtgtgtttgcagactggctgggcccgtgacccagcttcctgagtcctccgtgcaggtggcagctgtaccaggctggcaggtcactgagagtgggcagctgggccccagaactgtgcctggcccagtgggcagcaggagctcctgacttgggaccatggtgattcttcagcagggggaccatgtgtggatggacctgagattggggcaggagttcgacgtgcccatcggggcggtggtgaagctctgcgactctgggcaggtccaggtggtggatgatgaagacaatgagcgctggatctctagggcctctccgtgtggccagcacagcaaccctgctaggagcacaaacggaaagcctgagatctggcccagctgccttgccccctggtctgcaaggaaggcacgcggggct

SEQ ID NO: 456554 - DNA, 4639 bp, Homo sapiens
gctctgggcaggagagagagggagagacaagagacacacacagagagacggcgaggaagggaaagacccagagggacgcctagaacgagacttggagccagacagaggaagaggggacgtgtgtttgcagactggctgggcccgtgacccagcttcctgagtcctccgtgcaggtggcagctgtaccaggctggcaggtcactgagagtgggcagctgggccccagaactgtgcctggcccagtgggcagcaggagctcctgacttgggaccatggtgattcttcagcagggggaccatgtgtggatggacctgagattggggcaggagttcgacgtgcccatcggggcggtggtgaagctctgcgactctgggcaggtccaggtggtggatgatgaagacaatgaacactggatctctccgcagaacgcaacgcacatcaagcctatgcaccccacgtcggtccacggcgtggaggacatgatccgcctgggggacctcaacgaggcgggcatcttgcgcaacctgcttatccgctaccgggaccacctcatctacacgtatacgggctccatcctggtggctgtgaacccctaccagctgctctccatctactcgccagagcacatccgccagtataccaacaagaagattggggagatgcccccccacatctttgccattgctgacaactgctacttcaacatgaaacgcaacagccgagaccagtgctgcatcatcagtggggaatctggggccgggaagacggagagcacaaagctgatcctgcagttcctggcagccatcagtgggcagcactcgtggattgagcagcaggtcttggaggccacccccattctggaagcatttgggaatgccaagaccatccgcaatgacaactcaagccgtttcggaaagtacatcgacatccacttcaacaagcggggcgccatcgagggcgcgaagattgagcagtacctgctggaaaagtcacgtgtctgtcgccaggccctggatgaaaggaactaccacgtgttctactgcatgctggagggtatgagtgaggatcagaagaagaagctgggcttgggccaggcctctgactacaactacttggccatgggtaactgcataacctgtgagggccgggtggacagccaggagtacgccaacatccgctccgccatgaaggtgctcatgttcactgacaccgagaactgggagatctcgaagctcctggctgccatcctgcacctgggcaacctgcagtatgaggcacgcacatttgaaaacctggatgcctgtgaggttctcttctccccatcgctggccacagctgcatccctgcttgaggtgaaccccccagacctgatgagctgcctgactagccgcaccctcatcacccgcggggagacggtgtccaccccactgagcagggaacaggcactggacgtgcgcgacgccttcgtaaaggggatctacgggcggctgttcgtgtggattgtggacaagatcaacgcagcaatttacaagcctccctcccaggatgtgaagaactctcgcaggtccatcggcctcctggacatctttgggtttgagaactttgctgtgaacagctttgagcagctctgcatcaacttcgccaatgagcacctgcagcagttctttgtgcggcacgtgttcaagctggagcaggaggaatatgacctggagagcattgactggctgcacatcgagttcactgacaaccaggatgccctggacatgattgccaacaagcccatgaacatcatctccctcatcgatgaggagagcaagttccccaagggcacagacaccaccatgttacacaagctgaactcccagcacaagctcaacgccaactacatcccccccaagaacaaccatgagacccagtttggcatcaaccattttgcaggcatcgtctactatgagacccaaggcttcctggagaagaaccgagacaccctgcatggggacattatccagctggtccactcctccaggaacaagttcatcaagcagatcttccaggccgatgtcgccatgggcgccgagaccaggaagcgctcgcccacacttagcagccagttcaagcggtcactggagctgctgatgcgcacgctgggtgcctgccagcccttctttgtgcgatgcatcaagcccaatgagttcaagaagcccatgctgttcgaccggcacctgtgcgtgcgccagctgcggtactcaggaatgatggagaccatccgaatccgccgagctggctaccccatccgctacagcttcgtagagtttgtggagcggtaccgtgtgctgctgccaggtgtgaagccggcctacaagcagggcgacctccgcgggacttgccagcgcatggctgaggctgtgctgggcacccacgatgactggcagataggcaaaaccaagatctttctgaaggaccaccatgacatgctgctggaagtggagcgggacaaagccatcaccgacagagtcatcctccttcagaaagtcatccggggattcaaagacaggtctaactttctgaagctgaagaacgctgccacactgatccagaggcactggcggggtcacaactgtaggaagaactacgggctgatgcgtctgggcttcctgcggctgcaggccctgcaccgctcccggaagctgcaccagcagtaccgcctggcccgccagcgcatcatccagttccaggcccgctgccgcgcctatctggtgcgcaaggccttccgccaccgcctctgggctgtgctcaccgtgcaggcctatgcccggggcatgatcgcccgcaggctgcaccaacgcctcagggctgagtatctgtggcgcctcgaggctgagaaaatgcggctggcggaggaagagaagcttcggaaggagatgagcgccaagaaggccaaggaggaggccgagcgcaagcatcaggagcgcctggcccagctggctcgtgaggacgctgagcgggagctgaaggagaaggaggccgctcggcggaagaaggagctcctggagcagatggaaagggcccgccatgagcctgtcaatcactcagacatggtggacaagatgtttggcttcctggggacttcaggtggcctgccaggccaggagggccaggcacctagtggctttgaggacctggagcgagggcggagggagatggtggaggaggacctggatgcagccctgcccctgcctgacgaggatgaggaggacctctctgagtataaatttgccaagttcgcggccacctacttccaggggacaaccacgcactcctacacccggcggccactcaaacagccactgctctaccatgacgacgagggtgaccagctggcagccctggcggtctggatcaccatcctccgcttcatgggggacctccctgagcccaagtaccacacagccatgagtgatggcagtgagaagatccctgtgatgaccaagatttatgagaccctgggcaagaagacgtacaagagggagctgcaggccctgcagggcgagggcgaggcccagctccccgagggccagaagaagagcagtgtgaggcacaagctggtgcatttgactctgaaaaagaagtccaagctcacagaggaggtgaccaagaggctgcatgacggggagtccacagtgcagggcaacagcatgctggaggaccggcccacctccaacctggagaagctgcacttcatcatcggcaatggcatcctgcggccagcactccgggacgagatctactgccagatcagcaagcagctgacccacaacccctccaagagcagctatgcccggggctggattctcgtgtctctctgcgtgggctgtttcgccccctccgagaagtttgtcaagtacctgcggaacttcatccacgggggcccgcccggctacgccccgtactgtgaggagcgcctgagaaggacctttgtcaatgggacacggacacagccgcccagctggctggagctgcaggccaccaagtccaagaagccaatcatgttgcccgtgacattcatggatgggaccaccaagaccctgctgacggactcggcaaccacggccaaggagctctgcaacgcgctggccgacaagatctctctcaaggaccggttcgggttctccctctacattgccctgtttgacaaggtgtcctccctgggcagcggcagtgaccacgtcatggacgccatctcccagtgcgagcagtacgccaaggagcagggcgcccaggagcgcaacgccccctggaggctcttcttccgcaaagaggtcttcacgccctggcacagcccctccgaggacaacgtggccaccaacctcatctaccagcaggtggtgcgaggagtcaagtttggggagtacaggtgtgagaaggtgagtgggagggaatcttccgccaggctggcttggctcacagcctcctgctttccacgtttgggctgagtgctcctctgtgagccatcattagctcaggctggggtgagcctgactgcaaccaggcactcttcaggctcctggatggacaccgcctacttcagggggctcgtgaggagaggcgagatggcgggagcaagggcttctgaggatgt

SEQ ID NO: 456555 - DNA, 4873 bp, Homo sapiens
gctctgggcaggagagagagggagagacaagagacacacacagagagacggcgaggaagggaaagacccagagggacgcctagaacgagacttggagccagacagaggaagaggggacgtgtgtttgcagactggctgggcccgtgacccagcttcctgagtcctccgtgcaggtggcagctgtaccaggctggcaggtcactgagagtgggcagctgggccccagaactgtgcctggcccagtgggcagcaggagctcctgacttgggaccatggtgattcttcagcagggggaccatgtgtggatggacctgagattggggcaggagttcgacgtgcccatcggggcggtggtgaagctctgcgactctgggcaggtccaggtggtggatgatgaagacaatgaacactggatctctccgcagaacgcaacgcacatcaagcctatgcaccccacgtcggtccacggcgtggaggacatgatccgcctgggggacctcaacgaggcgggcatcttgcgcaacctgcttatccgctaccgggaccacctcatctacacgtatacgggctccatcctggtggctgtgaacccctaccagctgctctccatctactcgccagagcacatccgccagtataccaacaagaagattggggagatgcccccccacatctttgccattgctgacaactgctacttcaacatgaaacgcaacagccgagaccagtgctgcatcatcagtggggaatctggggccgggaagacggagagcacaaagctgatcctgcagttcctggcagccatcagtgggcagcactcgtggattgagcagcaggtcttggaggccacccccattctggaagcatttgggaatgccaagaccatccgcaatgacaactcaagccgtttcggaaagtacatcgacatccacttcaacaagcggggcgccatcgagggcgcgaagattgagcagtacctgctggaaaagtcacgtgtctgtcgccaggccctggatgaaaggaactaccacgtgttctactgcatgctggagggtatgagtgaggatcagaagaagaagctgggcttgggccaggcctctgactacaactacttggccatgggtaactgcataacctgtgagggccgggtggacagccaggagtacgccaacatccgctccgccatgaaggtgctcatgttcactgacaccgagaactgggagatctcgaagctcctggctgccatcctgcacctgggcaacctgcagtatgaggcacgcacatttgaaaacctggatgcctgtgaggttctcttctccccatcgctggccacagctgcatccctgcttgaggtgaaccccccagacctgatgagctgcctgactagccgcaccctcatcacccgcggggagacggtgtccaccccactgagcagggaacaggcactggacgtgcgcgacgccttcgtaaaggggatctacgggcggctgttcgtgtggattgtggacaagatcaacgcagcaatttacaagcctccctcccaggatgtgaagaactctcgcaggtccatcggcctcctggacatctttgggtttgagaactttgctgtgaacagctttgagcagctctgcatcaacttcgccaatgagcacctgcagcagttctttgtgcggcacgtgttcaagctggagcaggaggaatatgacctggagagcattgactggctgcacatcgagttcactgacaaccaggatgccctggacatgattgccaacaagcccatgaacatcatctccctcatcgatgaggagagcaagttccccaagggcacagacaccaccatgttacacaagctgaactcccagcacaagctcaacgccaactacatcccccccaagaacaaccatgagacccagtttggcatcaaccattttgcaggcatcgtctactatgagacccaaggcttcctggagaagaaccgagacaccctgcatggggacattatccagctggtccactcctccaggaacaagttcatcaagcagatcttccaggccgatgtcgccatgggcgccgagaccaggaagcgctcgcccacacttagcagccagttcaagcggtcactggagctgctgatgcgcacgctgggtgcctgccagcccttctttgtgcgatgcatcaagcccaatgagttcaagaagcccatgctgttcgaccggcacctgtgcgtgcgccagctgcggtactcaggaatgatggagaccatccgaatccgccgagctggctaccccatccgctacagcttcgtagagtttgtggagcggtaccgtgtgctgctgccaggtgtgaagccggcctacaagcagggcgacctccgcgggacttgccagcgcatggctgaggctgtgctgggcacccacgatgactggcagataggcaaaaccaagatctttctgaaggaccaccatgacatgctgctggaagtggagcgggacaaagccatcaccgacagagtcatcctccttcagaaagtcatccggggattcaaagacaggtctaactttctgaagctgaagaacgctgccacactgatccagaggcactggcggggtcacaactgtaggaagaactacgggctgatgcgtctgggcttcctgcggctgcaggccctgcaccgctcccggaagctgcaccagcagtaccgcctggcccgccagcgcatcatccagttccaggcccgctgccgcgcctatctggtgcgcaaggccttccgccaccgcctctgggctgtgctcaccgtgcaggcctatgcccggggcatgatcgcccgcaggctgcaccaacgcctcagggctgagtatctgtggcgcctcgaggctgagaaaatgcggctggcggaggaagagaagcttcggaaggagatgagcgccaagaaggccaaggaggaggccgagcgcaagcatcaggagcgcctggcccagctggctcgtgaggacgctgagcgggagctgaaggagaaggaggccgctcggcggaagaaggagctcctggagcagatggaaagggcccgccatgagcctgtcaatcactcagacatggtggacaagatgtttggcttcctggggacttcaggtggcctgccaggccaggagggccaggcacctagtggctttgaggacctggagcgagggcggagggagatggtggaggaggacctggatgcagccctgcccctgcctgacgaggatgaggaggacctctctgagtataaatttgccaagttcgcggccacctacttccaggggacaaccacgcactcctacacccggcggccactcaaacagccactgctctaccatgacgacgagggtgaccagctggcagccctggcggtctggatcaccatcctccgcttcatgggggacctccctgagcccaagtaccacacagccatgagtgatggcagtgagaagatccctgtgatgaccaagatttatgagaccctgggcaagaagacgtacaagagggagctgcaggccctgcagggcgagggcgaggcccagctccccgagggccagaagaagagcagtgtgaggcacaagctggtgcatttgactctgaaaaagaagtccaagctcacagaggaggtgaccaagaggctgcatgacggggagtccacagtgcagggcaacagcatgctggaggaccggcccacctccaacctggagaagctgcacttcatcatcggcaatggcatcctgcggccagcactccgggacgagatctactgccagatcagcaagcagctgacccacaacccctccaagagcagctatgcccggggctggattctcgtgtctctctgcgtgggctgtttcgccccctccgagaagtttgtcaagtacctgcggaacttcatccacgggggcccgcccggctacgccccgtactgtgaggagcgcctgagaaggacctttgtcaatgggacacggacacagccgcccagctggctggagctgcaggccaccaagtccaagaagccaatcatgttgcccgtgacattcatggatgggaccaccaagaccctgctgacggactcggcaaccacggccaaggagctctgcaacgcgctggccgacaagatctctctcaaggaccggttcgggttctccctctacattgccctgtttgacaaggtgtcctccctgggcagcggcagtgaccacgtcatggacgccatctcccagtgcgagcagtacgccaaggagcagggcgcccaggagcgcaacgccccctggaggctcttcttccgcaaagaggtcttcacgccctggcacagcccctccgaggacaacgtggccaccaacctcatctaccagcaggtggtgcgaggagtcaagtttggggagtacaggtgtgagaaggaggacgacctggctgagctggcctcccagcagtactttgtagactatggctctgagatgatcctggagcgcctcctgaacctcgtgcccacctacatccccgaccgcgagatcacgcccctgaagacgctggagaagtgggcccagctggccatcgccgcccacaagaaggggatttatgcccagaggagaactgatgcccagaaggtcaaagaggatgtggtcagttatgcccgcttcaagtggcccttgctcttctccaggttttatgaagcctacaaattctcaggtaccccgcagcctgcaatgctcccagtcccttgctctgtagctccagcccacagcctacaaattctcaggtaccccgcagcctgcaacgctcccagtcccttgctctgtagctccagcccacagcctacaaattctcaggtaccccacagcctgcaatg

SEQ ID NO: 456556 - DNA, 7444 bp, Homo sapiens
tttaccggagcctgaatttgagaccaagcttgtctacttctaattattaccctttccactccatcctgcaaagggcctgagggaactctgatccccttactgacaacagtcagatggggccaaaatccctgccctgcccacctcttaggtctgcgggaaaatcccctaagagaaggagcggtccttgaggggtagaggtggctggtaccatcctgactgaaccctgttagaactgacagtgtctggctgccagagaggtcgaggcccttacccgggttggcactcatcccgcgctcccgcccgtcccggccccttcccctgaagtgcgcagcctgggccccaggagagcacgctgacgttctggctccccgcaggaacactggatctctccgcagaacgcaacgcacatcaagcctatgcaccccacgtcggtccacggcgtggaggacatgatccgcctgggggacctcaacgaggcgggcatcttgcgcaacctgcttatccgctaccgggaccacctcatctacacgtatacgggctccatcctggtggctgtgaacccctaccagctgctctccatctactcgccagagcacatccgccagtataccaacaagaagattggggagatgcccccccacatctttgccattgctgacaactgctacttcaacatgaaacgcaacagccgagaccagtgctgcatcatcagtggggaatctggggccgggaagacggagagcacaaagctgatcctgcagttcctggcagccatcagtgggcagcactcgtggattgagcagcaggtcttggaggccacccccattctggaagcatttgggaatgccaagaccatccgcaatgacaactcaagccgtttcggaaagtacatcgacatccacttcaacaagcggggcgccatcgagggcgcgaagattgagcagtacctgctggaaaagtcacgtgtctgtcgccaggccctggatgaaaggaactaccacgtgttctactgcatgctggagggtatgagtgaggatcagaagaagaagctgggcttgggccaggcctctgactacaactacttggccatgggtaactgcataacctgtgagggccgggtggacagccaggagtacgccaacatccgctccgccatgaaggtgctcatgttcactgacaccgagaactgggagatctcgaagctcctggctgccatcctgcacctgggcaacctgcagtatgaggcacgcacatttgaaaacctggatgcctgtgaggttctcttctccccatcgctggccacagctgcatccctgcttgaggtgaaccccccagacctgatgagctgcctgactagccgcaccctcatcacccgcggggagacggtgtccaccccactgagcagggaacaggcactggacgtgcgcgacgccttcgtaaaggggatctacgggcggctgttcgtgtggattgtggacaagatcaacgcagcaatttacaagcctccctcccaggatgtgaagaactctcgcaggtccatcggcctcctggacatctttgggtttgagaactttgctgtgaacagctttgagcagctctgcatcaacttcgccaatgagcacctgcagcagttctttgtgcggcacgtgttcaagctggagcaggaggaatatgacctggagagcattgactggctgcacatcgagttcactgacaaccaggatgccctggacatgattgccaacaagcccatgaacatcatctccctcatcgatgaggagagcaagttccccaagggcacagacaccaccatgttacacaagctgaactcccagcacaagctcaacgccaactacatcccccccaagaacaaccatgagacccagtttggcatcaaccattttgcaggcatcgtctactatgagacccaaggcttcctggagaagaaccgagacaccctgcatggggacattatccagctggtccactcctccaggaacaagttcatcaagcagatcttccaggccgatgtcgccatgggcgccgagaccaggaagcgctcgcccacacttagcagccagttcaagcggtcactggagctgctgatgcgcacgctgggtgcctgccagcccttctttgtgcgatgcatcaagcccaatgagttcaagaagcccatgctgttcgaccggcacctgtgcgtgcgccagctgcggtactcaggaatgatggagaccatccgaatccgccgagctggctaccccatccgctacagcttcgtagagtttgtggagcggtaccgtgtgctgctgccaggtgtgaagccggcctacaagcagggcgacctccgcgggacttgccagcgcatggctgaggctgtgctgggcacccacgatgactggcagataggcaaaaccaagatctttctgaaggaccaccatgacatgctgctggaagtggagcgggacaaagccatcaccgacagagtcatcctccttcagaaagtcatccggggattcaaagacaggtctaactttctgaagctgaagaacgctgccacactgatccagaggcactggcggggtcacaactgtaggaagaactacgggctgatgcgtctgggcttcctgcggctgcaggccctgcaccgctcccggaagctgcaccagcagtaccgcctggcccgccagcgcatcatccagttccaggcccgctgccgcgcctatctggtgcgcaaggccttccgccaccgcctctgggctgtgctcaccgtgcaggcctatgcccggggcatgatcgcccgcaggctgcaccaacgcctcagggctgagtatctgtggcgcctcgaggctgagaaaatgcggctggcggaggaagagaagcttcggaaggagatgagcgccaagaaggccaaggaggaggccgagcgcaagcatcaggagcgcctggcccagctggctcgtgaggacgctgagcgggagctgaaggagaaggaggccgctcggcggaagaaggagctcctggagcagatggaaagggcccgccatgagcctgtcaatcactcagacatggtggacaagatgtttggcttcctggggacttcaggtggcctgccaggccaggagggccaggcacctagtggctttgaggacctggagcgagggcggagggagatggtggaggaggacctggatgcagccctgcccctgcctgacgaggatgaggaggacctctctgagtataaatttgccaagttcgcggccacctacttccaggggacaaccacgcactcctacacccggcggccactcaaacagccactgctctaccatgacgacgagggtgaccagctggcagccctggcggtctggatcaccatcctccgcttcatgggggacctccctgagcccaagtaccacacagccatgagtgatggcagtgagaagatccctgtgatgaccaagatttatgagaccctgggcaagaagacgtacaagagggagctgcaggccctgcagggcgagggcgaggcccagctccccgagggccagaagaagagcagtgtgaggcacaagctggtgcatttgactctgaaaaagaagtccaagctcacagaggaggtgaccaagaggctgcatgacggggagtccacagtgcagggcaacagcatgctggaggaccggcccacctccaacctggagaagctgcacttcatcatcggcaatggcatcctgcggccagcactccgggacgagatctactgccagatcagcaagcagctgacccacaacccctccaagagcagctatgcccggggctggattctcgtgtctctctgcgtgggctgtttcgccccctccgagaagtttgtcaagtacctgcggaacttcatccacgggggcccgcccggctacgccccgtactgtgaggagcgcctgagaaggacctttgtcaatgggacacggacacagccgcccagctggctggagctgcaggccaccaagtccaagaagccaatcatgttgcccgtgacattcatggatgggaccaccaagaccctgctgacggactcggcaaccacggccaaggagctctgcaacgcgctggccgacaagatctctctcaaggaccggttcgggttctccctctacattgccctgtttgacaaggtgtcctccctgggcagcggcagtgaccacgtcatggacgccatctcccagtgcgagcagtacgccaaggagcagggcgcccaggagcgcaacgccccctggaggctcttcttccgcaaagaggtcttcacgccctggcacagcccctccgaggacaacgtggccaccaacctcatctaccagcaggtggtgcgaggagtcaagtttggggagtacaggtgtgagaaggaggacgacctggctgagctggcctcccagcagtactttgtagactatggctctgagatgatcctggagcgcctcctgaacctcgtgcccacctacatccccgaccgcgagatcacgcccctgaagacgctggagaagtgggcccagctggccatcgccgcccacaagaaggggatttatgcccagaggagaactgatgcccagaaggtcaaagaggatgtggtcagttatgcccgcttcaagtggcccttgctcttctccaggttttatgaagcctacaaattctcaggccccagtctccccaagaacgacgtcatcgtggccgtcaactggacgggtgtgtactttgtggatgagcaggagcaggtacttctggagctgtccttcccagagatcatggccgtgtccagcagcagggagtgccgtgtctggctctcactgggctgctctgatcttggctgtgctgcgcctcactcaggctgggcaggactgaccccggcggggccctgttctccgtgttggtcctgcaggggagcgaaaacgacggcccccagcttcacgctggccaccatcaagggggacgaatacaccttcacctccagtaatgctgaggacattcgtgacctggtggtcaccttcctagaggggctccggaagagatctaagtatgttgtggccctgcaggataaccccaaccccgcaggcgaggagtcaggcttcctcagctttgccaagggagacctcatcatcctggaccatgacacgggcgagcaggtcatgaactcgggctgggccaacggcatcaatgagaggaccaagcagcgtggggacttccccaccgacagtgtgtacgtcatgcccactgtcaccatgccaccgcgggagattgtggccctggtcaccatgactcccgatcagaggcaggacgttgtccggctcttgcagctgcgaacggcggagcccgaggtgcgtgccaagccctacacgctggaggagttttcctatgactacttcaggcccccacccaagcacacgctgagccgtgtcatggtgtccaaggcccgaggcaaggaccggctgtggagccacacgcgggaaccgctcaagcaggcgctgctcaagaagctcctgggcagtgaggagctctcgcaggaggcctgcctggccttcattgctgtgctcaagtacatgggcgactacccgtccaagaggacacgctccgtcaacgagctcaccgaccagatctttgagggtcccctgaaagccgagcccctgaaggacgaggcatatgtgcagatcctgaagcagctgaccgacaaccacatcaggtacagcgaggagcggggttgggagctgctctggctgtgcacgggccttttcccacccagcaacatcctcctgccccacgtgcagcgcttcctgcagtcccgaaagcactgcccactcgccatcgactgcctgcaacggctccagaaagccctgagaaacgggtcccggaagtaccctccgcacctggtggaggtggaggccatccagcacaagaccacccagattttccacaaggtctacttccctgatgacactgacgaggccttcgaagtggagtccagcaccaaggccaaggacttctgccagaacatcgccaccaggctgctcctcaagtcctcagagggattcagcctctttgtcaaaattgcagacaaggtcctcagcgttcctgagaatgacttcttctttgactttgttcgacacttgacagactggataaagaaagctcggcccatcaaggacggaattgtgccctcactcacctaccaggtgttcttcatgaagaagctgtggaccaccacggtgccagggaaggatcccatggccgattccatcttccactattaccaggagttgcccaagtatctccgaggctaccacaagtgcacgcgggaggaggtgctgcagctgggggcgctgatctacagggtcaagttcgaggaggacaagtcctacttccccagcatccccaagctgctgcgggagctggtgccccaggaccttatccggcaggtctcacctgatgactggaagcggtccatcgtcgcctacttcaacaagcacgcagggaagtccaaggaggaggccaagctggccttcctgaagctcatcttcaagtggcccacctttggctcagccttcttcgaggtgaagcaaactacggagccaaacttccctgagatcctcctaattgccatcaacaagtatggggtcagcctcatcgatcccaaaacgaaggatatcctcaccactcatcccttcaccaagatctccaactggagcagcggcaacacctacttccacatcaccattgggaacttggtgcgcgggagcaaactgctctgcgagacgtcactgggctacaagatggatgacctcctgacttcctacattagccagatgctcacagccatgagcaaacagcggggctccaggagcggcaagtgaacagtcacggggaggtgctggttccatgcctgctctcgaggcagcagtgggttcaggcccatcagctacccctgcagctggggaagacttatgccatcccggcagcgaggctgggctggccagccaccactgactataccaactgggcctctgatgttcttccagtgaggcatctctctgggatgcagaacttccctccatccacccctctggcacctgggttggtctaatcctagtttgctgtggccttcccggttgtgagagcctgtgatccttagatgtgtctcctgtttcagaccagccccaccatgcaacttcctttgactttctgtgtaccactgggatagaggaatcaagaggacaatctagctctccatactttgaacaaccaaatgtgcattgaatactctgaaaccgaagggactggatctgcaggtgggatgagggagacagaccacttttctatattgcagtgtgaatgctgggcccctgctcaagtctaccctgatcacctcagggcataaagcatgtttcattctctgaaaaacaaaaat

SEQ ID NO: 456557 - DNA, 1499 bp, Homo sapiens
ataaggtcctggggcaccagctcccgcagcagcttggggatactggggaagtaggacttgtcctcctcgaacttgaccctgtagaacatcgccaccaggctgctcctcaagtcctcagagggattcagcctctttgtcaaaattgcagacaaggtcctcagcgttcctgagaatgacttcttctttgactttgttcgacacttgacagactggataaagaaagctcggcccatcaaggacggaattgtgccctcactcacctaccaggtgttcttcatgaagaagctgtggaccaccacggtgccagggaaggatcccatggccgattccatcttccactattaccaggagttgcccaagtatctccgaggctaccacaagtgcacgcgggaggaggtgctgcagctgggggcgctgatctacagggtcaagttcgaggaggacaagtcctacttccccagcatccccaagctgctgcgggagctggtgccccaggaccttatccggcaggtctcacctgatgactggaagcggtccatcgtcgcctacttcaacaagcacgcagggaagtccaaggaggaggccaagctggccttcctgaagctcatcttcaagtggcccacctttggctcagccttcttcgaggtgaagcaaactacggagccaaacttccctgagatcctcctaattgccatcaacaagtatggggtcagcctcatcgatcccaaaacgaaggatatcctcaccactcatcccttcaccaagatctccaactggagcagcggcaacacctacttccacatcaccattgggaacttggtgcgcgggagcaaactgctctgcgagacgtcactgggctacaagatggatgacctcctgacttcctacattagccagatgctcacagccatgagcaaacagcggggctccaggagcggcaagtgaacagtcacggggaggtgctggttccatgcctgctctcgaggcagcagtgggttcaggcccatcagctacccctgcagctggggaagacttatgccatcccggcagcgaggctgggctggccagccaccactgactataccaactgggcctctgatgttcttccagtgaggcatctctctgggatgcagaacttccctccatccacccctctggcacctgggttggtctaatcctagtttgctgtggccttcccggttgtgagagcctgtgatccttagatgtgtctcctgtttcagaccagccccaccatgcaacttcctttgactttctgtgtaccactgggatagaggaatcaagaggacaatctagctctccatactttgaacaaccaaatgtgcattgaatactctgaaaccgaagggactggatctgcaggtgggatgagggagacagaccacttttctatattgcagtgtgaatgctgggcccctgctcaagtctaccctgatcacctcagggcataaagcatgtttcattctctgaaaaacaaaaat

SEQ ID NO: 456558 - DNA, 332 bp, Homo sapiens
ctgcgaacggcggagcccgaggtgcgtgccaagccctacacgctggaggagttttcctatgactacttcaggtgatgcctcctggggaaggatgggagccacagggctaggagctgcaggcttccgctactgtctggtcgtgtgctggggctgctttgtgaagcccccacctgtgagcagggcctgggtcagagggagctggagggctgtttctgtctgccaggatgacccgtcctatgtgtctcatcttatcttccttccttcaagagatgtcactgcacccaccccaggctgggcattcgagactgagtcctggtggggatgcgggctgg

SEQ ID NO: 456559 - DNA, 7360 bp, Homo sapiens
gctctgggcaggagagagagggagagacaagagacacacacagagagacggcgaggaagggaaagacccagagggacgcctagaacgagacttggagccagacagaggaagaggggacgtgtgtttgcagactggctgggcccgtgacccagcttcctgagtcctccgtgcaggtggcagctgtaccaggctggcaggtcactgagagtgggcagctgggccccagaactgtgcctggcccagtgggcagcaggagctcctgacttgggaccatggtgattcttcagcagggggaccatgtgtggatggacctgagattggggcaggagttcgacgtgcccatcggggcggtggtgaagctctgcgactctgggcaggtccaggtggtggatgatgaagacaatgaacactggatctctccgcagaacgcaacgcacatcaagcctatgcaccccacgtcggtccacggcgtggaggacatgatccgcctgggggacctcaacgaggcgggcatcttgcgcaacctgcttatccgctaccgggaccacctcatctacacgtatacgggctccatcctggtggctgtgaacccctaccagctgctctccatctactcgccagagcacatccgccagtataccaacaagaagattggggagatgcccccccacatctttgccattgctgacaactgctacttcaacatgaaacgcaacagccgagaccagtgctgcatcatcagtggggaatctggggccgggaagacggagagcacaaagctgatcctgcagttcctggcagccatcagtgggcagcactcgtggattgagcagcaggtcttggaggccacccccattctggaagcatttgggaatgccaagaccatccgcaatgacaactcaagccgtttcggaaagtacatcgacatccacttcaacaagcggggcgccatcgagggcgcgaagattgagcagtacctgctggaaaagtcacgtgtctgtcgccaggccctggatgaaaggaactaccacgtgttctactgcatgctggagggtatgagtgaggatcagaagaagaagctgggcttgggccaggcctctgactacaactacttggccatgggtaactgcataacctgtgagggccgggtggacagccaggagtacgccaacatccgctccgccatgaaggtgctcatgttcactgacaccgagaactgggagatctcgaagctcctggctgccatcctgcacctgggcaacctgcagtatgaggcacgcacatttgaaaacctggatgcctgtgaggttctcttctccccatcgctggccacagctgcatccctgcttgaggtgaaccccccagacctgatgagctgcctgactagccgcaccctcatcacccgcggggagacggtgtccaccccactgagcagggaacaggcactggacgtgcgcgacgccttcgtaaaggggatctacgggcggctgttcgtgtggattgtggacaagatcaacgcagcaatttacaagcctccctcccaggatgtgaagaactctcgcaggtccatcggcctcctggacatctttgggtttgagaactttgctgtgaacagctttgagcagctctgcatcaacttcgccaatgagcacctgcagcagttctttgtgcggcacgtgttcaagctggagcaggaggaatatgacctggagagcattgactggctgcacatcgagttcactgacaaccaggatgccctggacatgattgccaacaagcccatgaacatcatctccctcatcgatgaggagagcaagttccccaagggcacagacaccaccatgttacacaagctgaactcccagcacaagctcaacgccaactacatcccccccaagaacaaccatgagacccagtttggcatcaaccattttgcaggcatcgtctactatgagacccaaggcttcctggagaagaaccgagacaccctgcatggggacattatccagctggtccactcctccaggaacaagttcatcaagcagatcttccaggccgatgtcgccatgggcgccgagaccaggaagcgctcgcccacacttagcagccagttcaagcggtcactggagctgctgatgcgcacgctgggtgcctgccagcccttctttgtgcgatgcatcaagcccaatgagttcaagaagcccatgctgttcgaccggcacctgtgcgtgcgccagctgcggtactcaggaatgatggagaccatccgaatccgccgagctggctaccccatccgctacagcttcgtagagtttgtggagcggtaccgtgtgctgctgccaggtgtgaagccggcctacaagcagggcgacctccgcgggacttgccagcgcatggctgaggctgtgctgggcacccacgatgactggcagataggcaaaaccaagatctttctgaaggaccaccatgacatgctgctggaagtggagcgggacaaagccatcaccgacagagtcatcctccttcagaaagtcatccggggattcaaagacaggtctaactttctgaagctgaagaacgctgccacactgatccagaggcactggcggggtcacaactgtaggaagaactacgggctgatgcgtctgggcttcctgcggctgcaggccctgcaccgctcccggaagctgcaccagcagtaccgcctggcccgccagcgcatcatccagttccaggcccgctgccgcgcctatctggtgcgcaaggccttccgccaccgcctctgggctgtgctcaccgtgcaggcctatgcccggggcatgatcgcccgcaggctgcaccaacgcctcagggctgagtatctgtggcgcctcgaggctgagaaaatgcggctggcggaggaagagaagcttcggaaggagatgagcgccaagaaggccaaggaggaggccgagcgcaagcatcaggagcgcctggcccagctggctcgtgaggacgctgagcgggagctgaaggagaaggaggccgctcggcggaagaaggagctcctggagcagatggaaagggcccgccatgagcctgtcaatcactcagacatggtggacaagatgtttggcttcctggggacttcaggtggcctgccaggccaggagggccaggcacctagtggctttgaggacctggagcgagggcggagggagatggtggaggaggacctggatgcagccctgcccctgcctgacgaggatgaggaggacctctctgagtataaatttgccaagttcgcggccacctacttccaggggacaaccacgcactcctacacccggcggccactcaaacagccactgctctaccatgacgacgagggtgaccagctggcagccctggcggtctggatcaccatcctccgcttcatgggggacctccctgagcccaagtaccacacagccatgagtgatggcagtgagaagatccctgtgatgaccaagatttatgagaccctgggcaagaagacgtacaagagggagctgcaggccctgcagggcgagggcgaggcccagctccccgagggccagaagaagagcagtgtgaggcacaagctggtgcatttgactctgaaaaagaagtccaagctcacagaggaggtgaccaagaggctgcatgacggggagtccacagtgcagggcaacagcatgctggaggaccggcccacctccaacctggagaagctgcacttcatcatcggcaatggcatcctgcggccagcactccgggacgagatctactgccagatcagcaagcagctgacccacaacccctccaagagcagctatgcccggggctggattctcgtgtctctctgcgtgggctgtttcgccccctccgagaagtttgtcaagtacctgcggaacttcatccacgggggcccgcccggctacgccccgtactgtgaggagcgcctgagaaggacctttgtcaatgggacacggacacagccgcccagctggctggagctgcaggccaccaagtccaagaagccaatcatgttgcccgtgacattcatggatgggaccaccaagaccctgctgacggactcggcaaccacggccaaggagctctgcaacgcgctggccgacaagatctctctcaaggaccggttcgggttctccctctacattgccctgtttgacaaggtgtcctccctgggcagcggcagtgaccacgtcatggacgccatctcccagtgcgagcagtacgccaaggagcagggcgcccaggagcgcaacgccccctggaggctcttcttccgcaaagaggtcttcacgccctggcacagcccctccgaggacaacgtggccaccaacctcatctaccagcaggtggtgcgaggagtcaagtttggggagtacaggtgtgagaaggaggacgacctggctgagctggcctcccagcagtactttgtagactatggctctgagatgatcctggagcgcctcctgaacctcgtgcccacctacatccccgaccgcgagatcacgcccctgaagacgctggagaagtgggcccagctggccatcgccgcccacaagaaggggatttatgcccagaggagaactgatgcccagaaggtcaaagaggatgtggtcagttatgcccgcttcaagtggcccttgctcttctccaggttttatgaagcctacaaattctcaggccccagtctccccaagaacgacgtcatcgtggccgtcaactggacgggtgtgtactttgtggatgagcaggagcaggtacttctggagctgtccttcccagagatcatggccgtgtccagcagcaggggagcgaaaacgacggcccccagcttcacgctggccaccatcaagggggacgaatacaccttcacctccagtaatgctgaggacattcgtgacctggtggtcaccttcctagaggggctccggaagagatctaagtatgttgtggccctgcaggataaccccaaccccgcaggcgaggagtcaggcttcctcagctttgccaagggagacctcatcatcctggaccatgacacgggcgagcaggtcatgaactcgggctgggccaacggcatcaatgagaggaccaagcagcgtggggacttccccaccgacagtgtgtacgtcatgcccactgtcaccatgccaccgcgggagattgtggccctggtcaccatgactcccgatcagaggcaggacgttgtccggctcttgcagctgcgaacggcggagcccgaggtgcgtgccaagccctacacgctggaggagttttcctatgactacttcaggcccccacccaagcacacgctgagccgtgtcatggtgtccaaggcccgaggcaaggaccggctgtggagccacacgcgggaaccgctcaagcaggcgctgctcaagaagctcctgggcagtgaggagctctcgcaggaggcctgcctggccttcattgctgtgctcaagtacatgggcgactacccgtccaagaggacacgctccgtcaacgagctcaccgaccagatctttgagggtcccctgaaagccgagcccctgaaggacgaggcatatgtgcagatcctgaagcagctgaccgacaaccacatcaggtacagcgaggagcggggttgggagctgctctggctgtgcacgggccttttcccacccagcaacatcctcctgccccacgtgcagcgcttcctgcagtcccgaaagcactgcccactcgccatcgactgcctgcaacggctccagaaagccctgagaaacgggtcccggaagtaccctccgcacctggtggaggtggaggccatccagcacaagaccacccagattttccacaaggtctacttccctgatgacactgacgaggccttcgaagtggagtccagcaccaaggccaaggacttctgccagaacatcgccaccaggctgctcctcaagtcctcagagggattcagcctctttgtcaaaattgcagacaaggtcctcagcgttcctgagaatgacttcttctttgactttgttcgacacttgacagactggataaagaaagctcggcccatcaaggacggaattgtgccctcactcacctaccaggtgttcttcatgaagaagctgtggaccaccacggtgccagggaaggatcccatggccgattccatcttccactattaccaggagttgcccaagtatctccgaggctaccacaagtgcacgcgggaggaggtgctgcagctgggggcgctgatctacagggtcaagttcgaggaggacaagtcctacttccccagcatccccaagctgctgcgggagctggtgccccaggaccttatccggcaggtctcacctgatgactggaagcggtccatcgtcgcctacttcaacaagcacgcagggaagtccaaggaggaggccaagctggccttcctgaagctcatcttcaagtggcccacctttggctcagccttcttcgaggtgaagcaaactacggagccaaacttccctgagatcctcctaattgccatcaacaagtatggggtcagcctcatcgatcccaaaacgaaggatatcctcaccactcatcccttcaccaagatctccaactggagcagcggcaacacctacttccacatcaccattgggaacttggtgcgcgggagcaaactgctctgcgagacgtcactgggctacaagatggatgacctcctgacttcctacattagccagatgctcacagccatgagcaaacagcggggctccaggagcggcaagtgaacagtcacggggaggtgctggttccatgcctgctctcgaggcagcagtgggttcaggcccatcagctacccctgcagctggggaagacttatgccatcccggcagcgaggctgggctggccagccaccactgactataccaactgggcctctgatgttcttccagtgaggcatctctctgggatgcagaacttccctccatccacccctctggcacctgggttggtctaatcctagtttgctgtggccttcccggttgtgagagcctgtgatccttagatgtgtctcctgtttcagaccagccccaccatgcaacttcctttgactttctgtgtaccactgggatagaggaatcaagaggacaatctagctctccatactttgaacaaccaaatgtgcattgaatactctgaaaccgaagggactggatctgcaggtgggatgagggagacagaccacttttctatattgcagtgtgaatgctgggcccctgctcaagtctaccctgatcacctcagggcataaagcatgtttcattctctgaaaaacaaaaat

SEQ ID NO: 456560 - DNA, 6707 bp, Homo sapiens
gctctgggcaggagagagagggagagacaagagacacacacagagagacggcgaggaagggaaagacccagagggacgcctagaacgagacttggagccagacagaggaagaggggacgtgtgtttgcagactggctgggcccgtgacccagcttcctgagtcctccgtgcaggtggcagctgtaccaggctggcaggtcactgagagtgggcagctgggccccagaactgtgcctggcccagtgggcagcaggagctcctgacttgggaccatggtgattcttcagcagggggaccatgtgtggatggacctgagattggggcaggagttcgacgtgcccatcggggcggtggtgaagctctgcgactctgggcaggtccaggtggtggatgatgaagacaatgaacactggatctctccgcagaacgcaacgcacatcaagcctatgcaccccacgtcggtccacggcgtggaggacatgatccgcctgggggacctcaacgaggcgggcatcttgcgcaacctgcttatccgctaccgggaccacctcatctacacgtatacgggctccatcctggtggctgtgaacccctaccagctgctctccatctactcgccagagcacatccgccagtataccaacaagaagattggggagatgcccccccacatctttgccattgctgacaactgctacttcaacatgaaacgcaacagccgagaccagtgctgcatcatcagtggggaatctggggccgggaagacggagagcacaaagctgatcctgcagttcctggcagccatcagtgggcagcactcgtggattgagcagcaggtcttggaggccacccccattctggaagcatttgggaatgccaagaccatccgcaatgacaactcaagccgtttcggaaagtacatcgacatccacttcaacaagcggggcgccatcgagggcgcgaagattgagcagtacctgctggaaaagtcacgtgtctgtcgccaggccctggatgaaaggaactaccacgtgttctactgcatgctggagggtatgagtgaggatcagaagaagaagctgggcttgggccaggcctctgactacaactacttggccatgggtaactgcataacctgtgagggccgggtggacagccaggagtacgccaacatccgctccgccatgaaggtgctcatgttcactgacaccgagaactgggagatctcgaagctcctggctgccatcctgcacctgggcaacctgcagtatgaggcacgcacatttgaaaacctggatgcctgtgaggttctcttctccccatcgctggccacagctgcatccctgcttgaggtgaaccccccagacctgatgagctgcctgactagccgcaccctcatcacccgcggggagacggtgtccaccccactgagcagggaacaggcactggacgtgcgcgacgccttcgtaaaggggatctacgggcggctgttcgtgtggattgtggacaagatcaacgcagcaatttacaagcctccctcccaggatgtgaagaactctcgcaggtccatcggcctcctggacatctttgggtttgagaactttgctgtgaacagctttgagcagctctgcatcaacttcgccaatgagcacctgcagcagttctttgtgcggcacgtgttcaagctggagcaggaggaatatgacctggagagcattgactggctgcacatcgagttcactgacaaccaggatgccctggacatgattgccaacaagcccatgaacatcatctccctcatcgatgaggagagcaagttccccaagggcacagacaccaccatgttacacaagctgaactcccagcacaagctcaacgccaactacatcccccccaagaacaaccatgagacccagtttggcatcaaccattttgcaggcatcgtctactatgagacccaaggcttcctggagaagaaccgagacaccctgcatggggacattatccagctggtccactcctccaggaacaagttcatcaagcagatcttccaggccgatgtcgccatgggcgccgagaccaggaagcgctcgcccacacttagcagccagttcaagcggtcactggagctgctgatgcgcacgctgggtgcctgccagcccttctttgtgcgatgcatcaagcccaatgagttcaagaagcccatgctgttcgaccggcacctgtgcgtgcgccagctgcggtactcaggaatgatggagaccatccgaatccgccgagctggctaccccatccgctacagcttcgtagagtttgtggagcggtaccgtgtgctgctgccaggtgtgaagccggcctacaagcagggcgacctccgcgggacttgccagcgcatggctgaggctgtgctgggcacccacgatgactggcagataggcaaaaccaagatctttctgaaggaccaccatgacatgctgctggaagtggagcgggacaaagccatcaccgacagagtcatcctccttcagaaagtcatccggggattcaaagacaggtctaactttctgaagctgaagaacgctgccacactgatccagaggcactggcggggtcacaactgtaggaagaactacgggctgatgcgtctgggcttcctgcggctgcaggccctgcaccgctcccggaagctgcaccagcagtaccgcctggcccgccagcgcatcatccagttccaggcccgctgccgcgcctatctggtgcgcaaggccttccgccaccgcctctgggctgtgctcaccgtgcaggcctatgcccggggcatgatcgcccgcaggctgcaccaacgcctcagggctgagtatctgtggcgcctcgaggctgagaaaatgcggctggcggaggaagagaagcttcggaaggagatgagcgccaagaaggccaaggaggaggccgagcgcaagcatcaggagcgcctggcccagctggctcgtgaggacgctgagcgggagctgaaggagaaggaggccgctcggcggaagaaggagctcctggagcagatggaaagggcccgccatgagcctgtcaatcactcagacatggtggacaagatgtttggcttcctggggacttcaggtggcctgccaggccaggagggccaggcacctagtggctttgaggacctggagcgagggcggagggagatggtggaggaggacctggatgcagccctgcccctgcctgacgaggatgaggaggacctctctgagtataaatttgccaagttcgcggccacctacttccaggggacaaccacgcactcctacacccggcggccactcaaacagccactgctctaccatgacgacgagggtgaccagctggcagccctggcggtctggatcaccatcctccgcttcatgggggacctccctgagcccaagtaccacacagccatgagtgatggcagtgagaagatccctgtgatgaccaagatttatgagaccctgggcaagaagacgtacaagagggagctgcaggccctgcagggcgagggcgaggcccagctccccgagggccagaagaagagcagtgtgaggcacaagctggtgcatttgactctgaaaaagaagtccaagctcacagaggaggtgaccaagaggctgcatgacggggagtccacagtgcagggcaacagcatgctggaggaccggcccacctccaacctggagaagctgcacttcatcatcggcaatggcatcctgcggccagcactccgggacgagatctactgccagatcagcaagcagctgacccacaacccctccaagagcagctatgcccggggctggattctcgtgtctctctgcgtgggctgtttcgccccctccgagaagtttgtcaagtacctgcggaacttcatccacgggggcccgcccggctacgccccgtactgtgaggagcgcctgagaaggacctttgtcaatgggacacggacacagccgcccagctggctggagctgcaggccaccaagtccaagaagccaatcatgttgcccgtgacattcatggatgggaccaccaagaccctgctgacggactcggcaaccacggccaaggagctctgcaacgcgctggccgacaagatctctctcaaggaccggttcgggttctccctctacattgccctgtttgacaaggtgtcctccctgggcagcggcagtgaccacgtcatggacgccatctcccagtgcgagcagtacgccaaggagcagggcgcccaggagcgcaacgccccctggaggctcttcttccgcaaagaggtcttcacgccctggcacagcccctccgaggacaacgtggccaccaacctcatctaccagcaggtggtgcgaggagtcaagtttggggagtacaggtgtgagaaggaggacgacctggctgagctggcctcccagcagtactttgtagactatggctctgagatgatcctggagcgcctcctgaacctcgtgcccacctacatccccgaccgcgagatcacgcccctgaagacgctggagaagtgggcccagctggccatcgccgcccacaagaaggggatttatgcccagaggagaactgatgcccagaaggtcaaagaggatgtggtcagttatgcccgcttcaagtggcccttgctcttctccaggttttatgaagcctacaaattctcaggccccagtctccccaagaacgacgtcatcgtggccgtcaactggacgggtgtgtactttgtggatgagcaggagcaggtacttctggagctgtccttcccagagatcatggccgtgtccagcagcagggagtgccgtgtctggctctcactgggctgctctgatcttggctgtgctgcgcctcactcaggctgggcaggactgaccccggcggggccctgttctccgtgttggtcctgcaggggagcgaaaacgacggcccccagcttcacgctggccaccatcaagggggacgaatacaccttcacctccagtaatgctgaggacattcgtgacctggtggtcaccttcctagaggggctccggaagagatctaagtatgttgtggccctgcaggataaccccaaccccgcaggcgaggagtcaggcttcctcagctttgccaagggagacctcatcatcctggaccatgacacgggcgagcaggtcatgaactcgggctgggccaacggcatcaatgagaggaccaagcagcgtggggacttccccaccgacagtgtgtacgtcatgcccactgtcaccatgccaccgcgggagattgtggccctggtcaccatgactcccgatcagaggcaggacgttgtccggctcttgcagctgcgaacggcggagcccgaggtgcgtgccaagccctacacgctggaggagttttcctatgactacttcaggcccccacccaagcacacgctgagccgtgtcatggtgtccaaggcccgaggcaaggaccggctgtggagccacacgcgggaaccgctcaagcaggcgctgctcaagaagctcctgggcagtgaggagctctcgcaggaggcctgcctggccttcattgctgtgctcaagtacatgggcgactacccgtccaagaggacacgctccgtcaacgagctcaccgaccagatctttgagggtcccctgaaagccgagcccctgaaggacgaggcatatgtgcagatcctgaagcagctgaccgacaaccacatcaggtacagcgaggagcggggttgggagctgctctggctgtgcacgggccttttcccacccagcaacatcctcctgccccacgtgcagcgcttcctgcagtcccgaaagcactgcccactcgccatcgactgcctgcaacggctccagaaagccctgagaaacgggtcccggaagtaccctccgcacctggtggaggtggaggccatccagcacaagaccacccagattttccacaaggtctacttccctgatgacactgacgaggtgagggtcaccggcttctaggtctgcagtgcccaggacagggccgggcttcctgggtggacaccaaaggtggccttaagcctctcccccatcacctgacatttgccgcctcgtcctcctgccccgtagtggagtcggggctcaggacgaaggccatcgactccccaggtcaggggcccttggttcctgatccaacccctgcttcctggagcagcttccttcagaagggcgcccctccctccctgtctctgaggaggacttgccttggagaaaagcgcttctccctctgagctggctttgcactggctttgcacctccctgatgtagggccccactggcccccaggtccagacctcccctgtcgactgagcccactttcctgcaggcagaacctcaacaccccttcctccctctccacctgaggtggttgaggttccctccatccaggtcctgtctgccaaaggtcctgtctgtcatgcctgtagtcacgctgcccctcatggtccccagcccctgcctgtctcaacacagtgtctcattcagataagcttttcatttgaagagtcatttatgaaacttgtctgaggctggagactcagaaatgccataacaggatttcatttgcaaggaccaaagacttcctcaaatcctttcctgtccctccagacatctctcctgccattaaacttcccc

SEQ ID NO: 456561 - DNA, 4513 bp, Homo sapiens
gctctgggcaggagagagagggagagacaagagacacacacagagagacggcgaggaagggaaagacccagagggacgcctagaacgagacttggagccagacagaggaagaggggacgtgtgtttgcagactggctgggcccgtgacccagcttcctgagtcctccgtgcaggtggcagctgtaccaggctggcaggtcactgagagtgggcagctgggccccagaactgtgcctggcccagtgggcagcaggagctcctgacttgggaccatggtgattcttcagcagggggaccatgtgtggatggacctgagattggggcaggagttcgacgtgcccatcggggcggtggtgaagctctgcgactctgggcaggtccaggtggtggatgatgaagacaatgaacactggatctctccgcagaacgcaacgcacatcaagcctatgcaccccacgtcggtccacggcgtggaggacatgatccgcctgggggacctcaacgaggcgggcatcttgcgcaacctgcttatccgctaccgggaccacctcatctacacgtatacgggctccatcctggtggctgtgaacccctaccagctgctctccatctactcgccagagcacatccgccagtataccaacaagaagattggggagatgcccccccacatctttgccattgctgacaactgctacttcaacatgaaacgcaacagccgagaccagtgctgcatcatcagtggggaatctggggccgggaagacggagagcacaaagctgatcctgcagttcctggcagccatcagtgggcagcactcgtggattgagcagcaggtcttggaggccacccccattctggaagcatttgggaatgccaagaccatccgcaatgacaactcaagccgtttcggaaagtacatcgacatccacttcaacaagcggggcgccatcgagggcgcgaagattgagcagtacctgctggaaaagtcacgtgtctgtcgccaggccctggatgaaaggaactaccacgtgttctactgcatgctggagggtatgagtgaggatcagaagaagaagctgggcttgggccaggcctctgactacaactacttggccatgggtaactgcataacctgtgagggccgggtggacagccaggagtacgccaacatccgctccgccatgaaggtgctcatgttcactgacaccgagaactgggagatctcgaagctcctggctgccatcctgcacctgggcaacctgcagtatgaggcacgcacatttgaaaacctggatgcctgtgaggttctcttctccccatcgctggccacagctgcatccctgcttgaggtgaaccccccagacctgatgagctgcctgactagccgcaccctcatcacccgcggggagacggtgtccaccccactgagcagggaacaggcactggacgtgcgcgacgccttcgtaaaggggatctacgggcggctgttcgtgtggattgtggacaagatcaacgcagcaatttacaagcctccctcccaggatgtgaagaactctcgcaggtccatcggcctcctggacatctttgggtttgagaactttgctgtgaacagctttgagcagctctgcatcaacttcgccaatgagcacctgcagcagttctttgtgcggcacgtgttcaagctggagcaggaggaatatgacctggagagcattgactggctgcacatcgagttcactgacaaccaggatgccctggacatgattgccaacaagcccatgaacatcatctccctcatcgatgaggagagcaagttccccaagggcacagacaccaccatgttacacaagctgaactcccagcacaagctcaacgccaactacatcccccccaagaacaaccatgagacccagtttggcatcaaccattttgcaggcatcgtctactatgagacccaaggcttcctggagaagaaccgagacaccctgcatggggacattatccagctggtccactcctccaggaacaagttcatcaagcagatcttccaggccgatgtcgccatgggcgccgagaccaggaagcgctcgcccacacttagcagccagttcaagcggtcactggagctgctgatgcgcacgctgggtgcctgccagcccttctttgtgcgatgcatcaagcccaatgagttcaagaagcccatgctgttcgaccggcacctgtgcgtgcgccagctgcggtactcaggaatgatggagaccatccgaatccgccgagctggctaccccatccgctacagcttcgtagagtttgtggagcggtaccgtgtgctgctgccaggtgtgaagccggcctacaagcagggcgacctccgcgggacttgccagcgcatggctgaggctgtgctgggcacccacgatgactggcagataggcaaaaccaagatctttctgaaggaccaccatgacatgctgctggaagtggagcgggacaaagccatcaccgacagagtcatcctccttcagaaagtcatccggggattcaaagacaggtctaactttctgaagctgaagaacgctgccacactgatccagaggcactggcggggtcacaactgtaggaagaactacgggctgatgcgtctgggcttcctgcggctgcaggccctgcaccgctcccggaagctgcaccagcagtaccgcctggcccgccagcgcatcatccagttccaggcccgctgccgcgcctatctggtgcgcaaggccttccgccaccgcctctgggctgtgctcaccgtgcaggcctatgcccggggcatgatcgcccgcaggctgcaccaacgcctcagggctgagtatctgtggcgcctcgaggctgagaaaatgcggctggcggaggaagagaagcttcggaaggagatgagcgccaagaaggccaaggaggaggccgagcgcaagcatcaggagcgcctggcccagctggctcgtgaggacgctgagcgggagctgaaggagaaggaggccgctcggcggaagaaggagctcctggagcagatggaaagggcccgccatgagcctgtcaatcactcagacatggtggacaagatgtttggcttcctggggacttcaggtggcctgccaggccaggagggccaggcacctagtggctttgaggacctggagcgagggcggagggagatggtggaggaggacctggatgcagccctgcccctgcctgacgaggatgaggaggacctctctgagtataaatttgccaagttcgcggccacctacttccaggggacaaccacgcactcctacacccggcggccactcaaacagccactgctctaccatgacgacgagggtgaccagctggcagccctggcggtctggatcaccatcctccgcttcatgggggacctccctgagcccaagtaccacacagccatgagtgatggcagtgagaagatccctgtgatgaccaagatttatgagaccctgggcaagaagacgtacaagagggagctgcaggccctgcagggcgagggcgaggcccagctccccgagggccagaagaagagcagtgtgaggcacaagctggtgcatttgactctgaaaaagaagtccaagctcacagaggaggtgaccaagaggctgcatgacggggagtccacagtgcagggcaacagcatgctggaggaccggcccacctccaacctggagaagctgcacttcatcatcggcaatggcatcctgcggccagcactccgggacgagatctactgccagatcagcaagcagctgacccacaacccctccaagagcagctatgcccggggctggattctcgtgtctctctgcgtgggctgtttcgccccctccgagaagtttgtcaagtacctgcggaacttcatccacgggggcccgcccggctacgccccgtactgtgaggagcgcctgagaaggacctttgtcaatgggacacggacacagccgcccagctggctggagctgcaggccaccaagtccaagaagccaatcatgttgcccgtgacattcatggatgggaccaccaagaccctgctgacggactcggcaaccacggccaaggagctctgcaacgcgctggccgacaagatctctctcaaggaccggttcgggttctccctctacattgccctgtttgacaaggtatggccgcccggaagcacctcctcccggaagcacctcctcccggccccactccgggctgccagtgctgccacctacttgccggggctattcacccttgagcacctcggtttccccctgagcctgtgctaattggctctgcctgactcctcaggactgccgagaactcggccaggtgcggtggttcacacctgtaatcccagcactttgggaggctgaggcgggcagatcacaaagtcaggagttcgagaccagcctggctaatgtagtgaaacctcgtctctactaaaaatacaaaaattagtggagcacggtgg

SEQ ID NO: 456562 - DNA, 954 bp, Homo sapiens
caggagaggctgactttatcccagctggggccaggcttcattcctgtccccaaatgcttttcttgctctgggcccccatctgatgccttctcatctttttttctagcaaactacggagccaaacttccctgagatcctcctaattgccatcaacaagtatggggtcagcctcatcgatcccaaaacgaaggatatcctcaccactcatcccttcaccaagatctccaactggagcagcggcaacacctacttccacatcaccattgggaacttggtgcgcgggagcaaactgctctgcgagacgtcactgggctacaagatggatgacctcctgacttcctacattagccagatgctcacagccatgagcaaacagcggggctccaggagcggcaagtgaacagtcacggggaggtgctggttccatgcctgctctcgaggcagcagtgggttcaggcccatcagctacccctgcagctggggaagacttatgccatcccggcagcgaggctgggctggccagccaccactgactataccaactgggcctctgatgttcttccagtgaggcatctctctgggatgcagaacttccctccatccacccctctggcacctgggttggtctaatcctagtttgctgtggccttcccggttgtgagagcctgtgatccttagatgtgtctcctgtttcagaccagccccaccatgcaacttcctttgactttctgtgtaccactgggatagaggaatcaagaggacaatctagctctccatactttgaacaaccaaatgtgcattgaatactctgaaaccgaagggactggatctgcaggtgggatgagggagacagaccacttttctatattgcagtgtgaatgctgggcccctgctcaagtctaccctgatcacctcagggcataaagcatgtttcattctctgaaaaacaaaaat

SEQ ID NO: 456563 - DNA, 168 bp, Homo sapiens
ccggaaagtggagggatccgggtgtgggtggagggaggggcaggctggcaggtgagcacctggggtgttgcctgtaccaggtgaaccccccagacctgatgagctgcctgactagccgcaccctcatcacccgcggggagacggtgtccaccccactgagcagggaac

SEQ ID NO: 456564 - DNA, 1096 bp, Homo sapiens
gttccggtgggctctgaaccctgaaaggctcgcgatgcctctacacaagtatcccgtgtggctctggaagcggctgcagctgcgggagggcatctgttcccgcctgcccggccactacctgcgctccctggaggaggagcggacgcccactcccgtgcactataggcctcatggggccaagttcaagatcaaccccaagaacgggcagcgggagcgtgtggaggacgtgcccattcccatctactttccccccgaatcccagcgggggttgtggggcggcgagggctggatcctgggccaaatatatgccaacaacgacaagctctccaagaggctgaagaaagtgtggaagccacagctgtttgagcgagagttctacagtgagatcctggacaagaagttcacagtgactgtgaccatgcggaccctggacctcatcgatgaggcttatgggctcgacttttacatcctcaagaccccgaaggaggacctgtgctccaagtttgggatggacctgaagcgagggatgctgctgcggcttgcccggcaggacccccagctgcaccccgaggaccccgagcggcgggcagccatctacgacaagtacaaggaatttgccatcccagaggaggaggcagagtgggtgggcctcacgctggaggaggccattgagaagcagagacttttggaggagaaggaccctgtacccctgttcaagatctatgtggcggagctgatccagcagctgcagcagcaggcactgtcagagccggcggtggtgcagaagagagccagtggccagtgaccacacagctcctccatgcctgaccaacaggcccagctttccctgccaggccctttgcactgaggacacagatcccggggagctgtgagggccaccggtgggcagtgggtggatcctggtttcgtgtgctgcccatgcaccttccagcccggggccagcttggcagggatccccaggaggcctgggccgcccagaggctcctctcaggctgggccccgacgtttgcggcagtgttccttgtgcccgtggggccgggagcgagtaaagtctgggccaggctgtgtgtgtgta

SEQ ID NO: 456565 - DNA, 889 bp, Homo sapiens
gttccggtgggctctgaaccctgaaaggctcgcgatgcctctacacaagtatcccgtgtggctctggaagcggctgcagctgcgggagggcatctgttcccgcctgcccggccactacctgcgctccctggaggaggagcggacgcccactcccgtgcactataggcctcatggggccaagttcaagatcaaccccaagaacgggcagcgggagcgtgtggaggacgtgcccattcccatctactttccccccgaatcccagcgggggttgtggggcggcgagggctggatcctgggccaaatatatgccaacaacgacaagctctccaagaggctgaagaaagtgtggaagccacagctgtttgagcgagagttctacagtgagatcctggacaagaagttcacagtgactgtgaccatgcggaccctggacctcatcgatgaggcttatgggctcgacttttacatcctcaaggcaagcggggtggggcgagtcagtgcacacagggtctgggatgggccagtcagactcacgggagccccaggtcagcatcacaccggggcacgctgacatctgcacaggagggtcactgggaaagcgtgagtggggccatgcccctttctggccagcaccagtggggtttcctgccttcaggagaggctgtcgctctgtgggtggctgacttgcccgtggggcctgagcgagcacagccgcccctttccctgcacttggacttgcttctgtgctgatcccacccccaggctggggtgctgaggcggacccacccgggccttctctgtcctgtcctgggaccaccagcggctagagaggagccaggtgggttggctggaagggtaggtggggccctgccaccagcacctggcccca

SEQ ID NO: 456566 - DNA, 330 bp, Homo sapiens
tctccggcaaaggagcacgctgagtgaagaaccgcagttctggcaaacaggactgataaagtaggggtgaggtggggtgactcaggccgggggagcaaccagaggccgtggggagtcggggtaaagttaggatggggaggaggcctgtgtgatgagcagagcaggtgggagaggcgagcagagcaggtgggggaggcgagcagagcttcgagcaggaggcctgggccgcccagaggctcctctcaggctgggccccgacgtttgcggcagtgttccttgtgcccgtggggccgggagcgagtaaagtctgggccaggctgtgtgtgtgta

SEQ ID NO: 456567 - DNA, 1108 bp, Homo sapiens
  misc_feature (18)..(18): n is a, c, g, or t
  misc_feature (27)..(27): n is a, c, g, or t
aaaggctaggtacgaggnctgggtgtnggaacctgaaaggctcgcgatgcctctacacaagtatcccgtgtggctctggaagcggctgcagctgcgggagggcatctgttcccgcctgcccggccactacctgcgctccctggaggaggagcggacgcccactcccgtgcactataggcctcatggggccaagttcaagatcaaccccaagaacgggcagcgggagcgtgtggaggacgtgcccattcccatctactttccccccgaatcccagcgggggttgtggggcggcgagggctggatcctgggccaaatatatgccaacaacgacaagctctccaagaggctgaagaaagtgtggaagccacagctgtttgagcgagagttctacagtgagatcctggacaagaagttcacagtgactgtgaccatgcggaccctggacctcatcgatgaggcttatgggctcgacttttacatcctcaagaccccgaaggaggacctgtgctccaagtttgggatggacctgaagcgagggatgctgctgcggcttgcccggcaggacccccagctgcaccccgaggaccccgagcggcgggcagccatctacgacaagtacaaggaatttgccatcccagaggaggaggcagagtgggtgggcctcacgctggaggaggccattgagaagcagagacttttggaggagaaggaccctgtacccctgttcaagatctatgtggcggagctgatccagcagctgcagcagcaggcactgtcagagccggcggtggtgcagaagagagccagtggccagtgaccacacagctcctccatgcctgaccaacaggcccagctttccctgccaggccctttgcactgaggacacagatcccggggagctgtgagggccaccggtgggcagtgggtggatcctggtttcgtgtgctgcccatgcaccttccagcccggggccagcttggcagggatccccaggaggcctgggccgcccagaggctcctctcaggctgggccccgacgtttgcggcagtgttccttgtgcccgtggggccgggagcgagtaaagtctgggccaggctgtgtgtgtgta

SEQ ID NO: 456568 - DNA, 1116 bp, Homo sapiens
cggctaaggtacgaggcctgggtggttgtgggtctgaaccctgaaaggctcgcgatgcctctacacaagtatcccgtgtggctctggaagcggctgcagctgcgggagggcatctgttcccgcctgcccggccactacctgcgctccctggaggaggagcggacgcccactcccgtgcactataggcctcatggggccaagttcaagatcaaccccaagaacgggcagcgggagcgtgtggaggacgtgcccattcccatctactttccccccgaatcccagcgggggttgtggggcggcgagggctggatcctgggccaaatatatgccaacaacgacaagctctccaagaggctgaagaaagtgtggaagccacagctgtttgagcgagagttctacagtgagatcctggacaagaagttcacagtgactgtgaccatgcggaccctggacctcatcgatgaggcttatgggctcgacttttacatcctcaagaccccgaaggaggacctgtgctccaagtttgggatggacctgaagcgagggatgctgctgcggcttgcccggcaggacccccagctgcaccccgaggaccccgagcggcgggcagccatctacgacaagtacaaggaatttgccatcccagaggaggaggcagagtgggtgggcctcacgctggaggaggccattgagaagcagagacttttggaggagaaggaccctgtacccctgttcaagatctatgtggcggagctgatccagcagctgcagcagcaggcactgtcagagccggcggtggtgcagaagagagccagtggccagtgaccacacagctcctccatgcctgaccaacaggcccagctttccctgccaggccctttgcactgaggacacagatcccggggagctgtgagggccaccggtgggcagtgggtggatcctggtttcgtgtgctgcccatgcaccttccagcccggggccagcttggcagggatccccaggaggcctgggccgcccagaggctcctctcaggctgggccccgacgtttgcggcagtgttccttgtgcccgtggggccgggagcgagtaaagtctgggccaggctgtgtgtgtgta

SEQ ID NO: 456569 - DNA, 1115 bp, Homo sapiens
ggcaggtggggtgtgggggggcgccggggcagaaggggaggggcaggctcgcgatgcctctacacaagtatcccgtgtggctctggaagcggctgcagctgcgggagggcatctgttcccgcctgcccggccactacctgcgctccctggaggaggagcggacgcccactcccgtgcactataggcctcatggggccaagttcaagatcaaccccaagaacgggcagcgggagcgtgtggaggacgtgcccattcccatctactttccccccgaatcccagcgggggttgtggggcggcgagggctggatcctgggccaaatatatgccaacaacgacaagctctccaagaggctgaagaaagtgtggaagccacagctgtttgagcgagagttctacagtgagatcctggacaagaagttcacagtgactgtgaccatgcggaccctggacctcatcgatgaggcttatgggctcgacttttacatcctcaagaccccgaaggaggacctgtgctccaagtttgggatggacctgaagcgagggatgctgctgcggcttgcccggcaggacccccagctgcaccccgaggaccccgagcggcgggcagccatctacgacaagtacaaggaatttgccatcccagaggaggaggcagagtgggtgggcctcacgctggaggaggccattgagaagcagagacttttggaggagaaggaccctgtacccctgttcaagatctatgtggcggagctgatccagcagctgcagcagcaggcactgtcagagccggcggtggtgcagaagagagccagtggccagtgaccacacagctcctccatgcctgaccaacaggcccagctttccctgccaggccctttgcactgaggacacagatcccggggagctgtgagggccaccggtgggcagtgggtggatcctggtttcgtgtgctgcccatgcaccttccagcccggggccagcttggcagggatccccaggaggcctgggccgcccagaggctcctctcaggctgggccccgacgtttgcggcagtgttccttgtgcccgtggggccgggagcgagtaaagtctgggccaggctgtgtgtgtgta

SEQ ID NO: 456570 - DNA, 876 bp, Homo sapiens
tgacacgggggcccagcacgagtagtcctcatgggcactcacagactgcgtgctctcatgtacttccagtgctggagcatggtatgaccagattttatcacagtgccatttgaagggaaaggagttcagacagacagacgtattccccaaaaagggataccccagagccgatggtgttcagccatttagcagctgaaaaaggaaacagtgcacaccaatgggaggcagcctgcgtagccctcatcaggcaagacagactgaatgcaggagtgggtgattagctgctccttgaacttgaggctgccttggcagcaggggcacagcaggcctcaagagcccctaattgtctcagggttcaaaggaagacactgacctttcccatcccggtgggaagtcgacttcccacgggaggaggcagagtgggtgggcctcacgctggaggaggccattgagaagcagagacttttggaggagaaggaccctgtacccctgttcaagatctatgtggcggagctgatccagcagctgcagcagcaggcactgtcagagccggcggtggtgcagaagagagccagtggccagtgaccacacagctcctccatgcctgaccaacaggcccagctttccctgccaggccctttgcactgaggacacagatcccggggagctgtgagggccaccggtgggcagtgggtggatcctggtttcgtgtgctgcccatgcaccttccagcccggggccagcttggcagggatccccaggaggcctgggccgcccagaggctcctctcaggctgggccccgacgtttgcggcagtgttccttgtgcccgtggggccgggagcgagtaaagtctgggccaggctgtgtgtgtgta

SEQ ID NO: 456571 - DNA, 668 bp, Homo sapiens
gttccggtgggctctgaaccctgaaaggctcgcgatgcctctacacaagtatcccgtgtggctctggaagcggctgcagctgcgggagggcatctgttcccgcctgcccggccactacctgcgctccctggaggaggagcggacgcccactcccgtgcactataggcctcatggggccaagttcaagatcaaccccaagaacgggcagcgggagcgtgtggaggacgtgcccattcccatctactttccccccgaatcccagcgggggttgtggggcggcgagggctggatcctgggccaaatatatgccaacaacgacaaggcagcaggcactgtcagagccggcggtggtgcagaagagagccagtggccagtgaccacacagctcctccatgcctgaccaacaggcccagctttccctgccaggccctttgcactgaggacacagatcccggggagctgtgagggccaccggtgggcagtgggtggatcctggtttcgtgtgctgcccatgcaccttccagcccggggccagcttggcagggatccccaggaggcctgggccgcccagaggctcctctcaggctgggccccgacgtttgcggcagtgttccttgtgcccgtggggccgggagcgagtaaagtctgggccaggctgtgtgtgtgta

SEQ ID NO: 456572 - DNA, 440 bp, Homo sapiens
gttccggtgggctctgaaccctgaaaggctcgcgatgcctctacacaagtatcccgtgtggctctggaagcggctgcagctgcgggagggcatctgttcccgcctgcccggccactacctgcgctccctggaggaggagcggacgcccactcccgtgcactataggcctcatggggccaagttcaagatcaaccccaagaacgggcagcgggagcgtgtggaggacgtgcccattcccatctactttccccccgaatcccagcgggggttgtggggcggcgagggctggatcctgggccaaatatatgccaacaacgacaagcaggaggcctgggccgcccagaggctcctctcaggctgggccccgacgtttgcggcagtgttccttgtgcccgtggggccgggagcgagtaaagtctgggccaggctgtgtgtgtgta

SEQ ID NO: 456573 - DNA, 1001 bp, Homo sapiens
cggctaaggtacgaggcctgggtggttgtgggtctgaaccctgaaaggctcgcgatgcctctacacaagtatcccgtgtggctctggaagcggctgcagctgcgggagggcatctgttcccgcctgcccggccactacctgcgctccctggaggaggagcggacgcccactcccgtgcactataggcctcatggggccaagttcaagatcaaccccaagaacgggcagcgggagcgtgtggaggacgtgcccattcccatctactttccccccgaatcccagcgggggttgtggggcggcgagggctggatcctgggccaaatatatgccaacaacgacaagctctccaagaggctgaagaaagtgtggaagccacagctgtttgagcgagagttctacagtgagatcctggacaagaagttcacagtgactgtgaccatgcggaccctggacctcatcgatgaggcttatgggctcgacttttacatcctcaagaccccgaaggaggacctgtgctccaagtttgggatggacctgaagcgagggatgctgctgcggcttgcccggcaggacccccagctgcaccccgaggaccccgagcggcgggcagccatctacgacaagtacaaggaatttgccatcccagaggaggaggcagagtgggtgggcctcacgctggaggaggccattgagaagcagagacttttggaggagaaggaccctgtacccctgttcaagatctatgtggcggagctgatccagcagctgcagcagcaggcactgtcagagccggcggtggtgcagaagagagccagtggccagtgagagccagaagtccatgctggacaaaggccaagatcgccgggccttggtgggcccatccggaggagagcacgggagggggacgggcgggcagcccacggagggagcccagatggcaagcttcgggccgagaagtcagcgaacagggaacaaacatggggaggatacactgcgcgcaa

SEQ ID NO: 456574 - DNA, 1148 bp, Homo sapiens
agccagtcagcggtgggaggagggccaggcgcggcagatcggcttccggttccggtgggctctgaaccctgaaaggtgggctcgcgatgcctctacacaagtatcccgtgtggctctggaagcggctgcagctgcgggagggcatctgttcccgcctgcccggccactacctgcgctccctggaggaggagcggacgcccactcccgtgcactataggcctcatggggccaagttcaagatcaaccccaagaacgggcagcgggagcgtgtggaggacgtgcccattcccatctactttccccccgaatcccagcgggggttgtggggcggcgagggctggatcctgggccaaatatatgccaacaacgacaagctctccaagaggctgaagaaagtgtggaagccacagctgtttgagcgagagttctacagtgagatcctggacaagaagttcacagtgactgtgaccatgcggaccctggacctcatcgatgaggcttatgggctcgacttttacatcctcaagaccccgaaggaggacctgtgctccaagtttgggatggacctgaagcgagggatgctgctgcggcttgcccggcaggacccccagctgcaccccgaggaccccgagcggcgggcagccatctacgacaagtacaaggaatttgccatcccagaggaggaggcagagtgggtgggcctcacgctggaggaggccattgagaagcagagacttttggaggagaaggaccctgtacccctgttcaagatctatgtggcggagctgatccagcagctgcagcagcaggcactgtcagagccggcggtggtgcagaagagagccagtggccagtgaccacacagctcctccatgcctgaccaacaggcccagctttccctgccaggccctttgcactgaggacacagatcccggggagctgtgagggccaccggtgggcagtgggtggatcctggtttcgtgtgctgcccatgcaccttccagcccggggccagcttggcagggatccccaggaggcctgggccgcccagaggctcctctcaggctgggccccgacgtttgcggcagtgttccttgtgcccgtggggccgggagcgagtaaagtctgggccaggctgtgtgtgtgta

SEQ ID NO: 456575 - DNA, 1128 bp, Homo sapiens
  misc_feature (27)..(27): n is a, c, g, or t
  misc_feature (51)..(51): n is a, c, g, or t
cattagtgctagtagaggctggtgttnaatcggacgagggtgggctctgancctgaaaggctcgcgatgcctctacacaagtatcccgtgtggctctggaagcggctgcagctgcgggagggcatctgttcccgcctgcccggccactacctgcgctccctggaggaggagcggacgcccactcccgtgcactataggcctcatggggccaagttcaagatcaaccccaagaacgggcagcgggagcgtgtggaggacgtgcccattcccatctactttccccccgaatcccagcgggggttgtggggcggcgagggctggatcctgggccaaatatatgccaacaacgacaagctctccaagaggctgaagaaagtgtggaagccacagctgtttgagcgagagttctacagtgagatcctggacaagaagttcacagtgactgtgaccatgcggaccctggacctcatcgatgaggcttatgggctcgacttttacatcctcaagaccccgaaggaggacctgtgctccaagtttgggatggacctgaagcgagggatgctgctgcggcttgcccggcaggacccccagctgcaccccgaggaccccgagcggcgggcagccatctacgacaagtacaaggaatttgccatcccagaggaggaggcagagtgggtgggcctcacgctggaggaggccattgagaagcagagacttttggaggagaaggaccctgtacccctgttcaagatctatgtggcggagctgatccagcagctgcagcagcaggcactgtcagagccggcggtggtgcagaagagagccagtggccagtgaccacacagctcctccatgcctgaccaacaggcccagctttccctgccaggccctttgcactgaggacacagatcccggggagctgtgagggccaccggtgggcagtgggtggatcctggtttcgtgtgctgcccatgcaccttccagcccggggccagcttggcagggatccccaggaggcctgggccgcccagaggctcctctcaggctgggccccgacgtttgcggcagtgttccttgtgcccgtggggccgggagcgagtaaagtctgggccaggctgtgtgtgtgta

SEQ ID NO: 456576 - DNA, 911 bp, Homo sapiens
aatttttaaaaatcataccatgtgggggacaggcacggtggctcacgcctgtagtcccagcactttggaagactgaggtgggcggatcacttgaggtcaggagttcgagaccccccttgaaggagaaatctcacaagctctccaagaggctgaagaaagtgtggaagccacagctgtttgagcgagagttctacagtgagatcctggacaagaagttcacagtgactgtgaccatgcggaccctggacctcatcgatgaggcttatgggctcgacttttacatcctcaagaccccgaaggaggacctgtgctccaagtttgggatggacctgaagcgagggatgctgctgcggcttgcccggcaggacccccagctgcaccccgaggaccccgagcggcgggcagccatctacgacaagtacaaggaatttgccatcccagaggaggaggcagagtgggtgggcctcacgctggaggaggccattgagaagcagagacttttggaggagaaggaccctgtacccctgttcaagatctatgtggcggagctgatccagcagctgcagcagcaggcactgtcagagccggcggtggtgcagaagagagccagtggccagtgaccacacagctcctccatgcctgaccaacaggcccagctttccctgccaggccctttgcactgaggacacagatcccggggagctgtgagggccaccggtgggcagtgggtggatcctggtttcgtgtgctgcccatgcaccttccagcccggggccagcttggcagggatccccaggaggcctgggccgcccagaggctcctctcaggctgggccccgacgtttgcggcagtgttccttgtgcccgtggggccgggagcgagtaaagtctgggccaggctgtgtgtgtgta

SEQ ID NO: 456577 - DNA, 500 bp, Homo sapiens
ggcaggtggggtgtgggggggcgccggggcagaaggggaggggcaggctcgcgatgcctctacacaagtatcccgtgtggctctggaagcggctgcagctgcgggagggcatctgttcccgcctgcccggccactacctgcgctccctggaggagcagcaggcactgtcagagccggcggtggtgcagaagagagccagtggccagtgaccacacagctcctccatgcctgaccaacaggcccagctttccctgccaggccctttgcactgaggacacagatcccggggagctgtgagggccaccggtgggcagtgggtggatcctggtttcgtgtgctgcccatgcaccttccagcccggggccagcttggcagggatccccaggaggcctgggccgcccagaggctcctctcaggctgggccccgacgtttgcggcagtgttccttgtgcccgtggggccgggagcgagtaaagtctgggccaggctgtgtgtgtgta

SEQ ID NO: 456578 - DNA, 542 bp, Homo sapiens
aagctagtgaccactgattacagaattgcgagctcaggtacccatttcgtgcaggtgctaaagggaattcagtgcatggtgctataggggatatcggtgcatggtgctcaagcgttttccagggcttcccagaggtctgtgcgactagcccctgtctatcaaaagttattagagaggatgaagcattagcttgaagcactacaggaggaatgcaccacggcagctctccgccaatttctctcagatttccacagagactgtttgaatgttttcaaaaccaagtatcacaaacatgaatcaagcaatccagcctcatgggaagtcctggcacagtttttgtaaagcccttgcacagctggagaaatggcatcattataagctatgagttgaaatgttctgtcaaatgtgtctcacatctacacgtggcttggaggcttttatggggccctgtccaggtagaaaagaaatggtatgtagagcttagatttccctattgtgacagagccatggtgtgtttgtaataataaaaccaaagaaacata

SEQ ID NO: 456579 - DNA, 3328 bp, Homo sapiens
  misc_feature (2805)..(2805): n is a, c, g, or t
cgctccctcccgctcgcagcttacttaacctggcccgggcggcggaggcgctctcacttccctggagccgcccgcttgcccgtcggtcgctagctcgctcggtgcgcgtcgtcccgctccatggcgctcttcgtgcggctgctggctctcgccctggctctggccctgggccccgccgcgaccctggcgggtcccgccaagtcgccctaccagctggtgctgcagcacagcaggctccggggccgccagcacggccccaacgtgtgtgctgtgcagaaggttattggcactaataggaagtacttcaccaactgcaagcagtggtaccaaaggaaaatctgtggcaaatcaacagtcatcagctacgagtgctgtcctggatatgaaaaggtccctggggagaagggctgtccagcagccctaccactctcaaacctttacgagaccctgggagtcgttggatccaccaccactcagctgtacacggaccgcacggagaagctgaggcctgagatggaggggcccggcagcttcaccatcttcgcccctagcaacgaggcctgggcctccttgccagctgaagtgctggactccctggtcagcaatgtcaacattgagctgctcaatgccctccgctaccatatggtgggcaggcgagtcctgactgatgagctgaaacacggcatgaccctcacctctatgtaccagaattccaacatccagatccaccactatcctaatgggattgtaactgtgaactgtgcccggctgctgaaagccgaccaccatgcaaccaacggggtggtgcacctcatcgataaggtcatctccaccatcaccaacaacatccagcagatcattgagatcgaggacacctttgagacccttcgggctgctgtggctgcatcagggctcaacacgatgcttgaaggtaacggccagtacacgcttttggccccgaccaatgaggccttcgagaagatccctagtgagactttgaaccgtatcctgggcgacccagaagccctgagagacctgctgaacaaccacatcttgaagtcagctatgtgtgctgaagccatcgttgcggggctgtctgtggagaccctggagggcacgacactggaggtgggctgcagcggggacatgctcactatcaacgggaaggcgatcatctccaataaagacatcctagccaccaacggggtgatccactacattgatgagctactcatcccagactcagccaagacactatttgaattggctgcagagtctgatgtgtccacagccattgaccttttcagacaagccggcctcggcaatcatctctctggaagtgagcggttgaccctcctggctcccctgaattctgtattcaaagatggaacccctccaattgatgcccatacaaggaatttgcttcggaaccacataattaaagaccagctggcctctaagtatctgtaccatggacagaccctggaaactctgggcggcaaaaaactgagagtttttgtttatcgtaatagcctctgcattgagaacagctgcatcgcggcccacgacaagagggggaggtacgggaccctgttcacgatggaccgggtgctgacccccccaatggggactgtcatggatgtcctgaagggagacaatcgctttagcatgctggtagctgccatccagtctgcaggactgacggagaccctcaaccgggaaggagtctacacagtcttcgctcccacaaatgaagccttccgagccctgccaccaagagaacggagcagactcttgggagatgccaaggaacttgccaacatcctgaaataccacattggtgatgaaatcctggttagcggaggcatcggggccctggtgcggctaaagtctctccaaggtgacaagctggaagtcagcttgaaaaacaatgtggtgagtgtcaacaaggagcctgttgccgagcctgacatcatggccacaaatggcgtggtccatgtcatcaccaatgttctgcagcctccagccaacagacctcaggaaagaggggatgaacttgcagactctgcgcttgagatcttcaaacaagcatcagcgttttccagggcttcccagaggtctgtgcgactagcccctgtctatcaaaagttattagagaggatgaagcattagcttgaagcactacaggaggaatgcaccacggcagctctccgccaatttctctcagatttccacagagactgtttgaatgttttcaaaaccaagtatcacactttaatgtacatgggccgcaccataatgagatgtgagccttgtgcatgtgggggaggagggagagagatgtactttttaaatcatgttccccctaaacatggctgttaacccactgcatgcagaaacttggatgtcactgcctgacattcacttccagagaggacctatcccaaatgtggaattgactgcctatgccaagtccctggaaaaggagcttcagtattgtggggctcataaaacatgaatcaagcaatccagcctcatgggaagtcctggcacagtttttgtaaagcccttgcacagctggagaaatggcatcattataagctatgagttgaaatgttctgtcaaatgtgtctcacatctacacgtggcttggaggcttttatggggccctgtccaggtagaaaagaaatggtatgtagagcttagatttccctattgtgacagagccatggtgtgtttgtaataataaaaccaaagaaacataaaaaaaaaaaaaaaaaaaaaaaaaaaaaaaaaaaaaaaaanaaaaaaaaaagggggcggcgcgcgcgcgacaaaaaaagatatccccccggagggggcgcacacgaaatatagccgcgcggaccccaggttcttctgttgagcacaaggggggggcccaataatagggaggcggcgaactaattataacgcacgagacgcgaggcgggcggcggggtataaacaaccgcgggcgcgcgaggcggcgggggaacacacgcgtgccgctcaccggaagagaacactcgtggggaaaaaagagacacccctataacccgggcgggggggagcgcaacacaaactgcgggggcacaactcctccccatgcacgaggagatatttaaagacgctccccggaggggagcaaaatctattcacaaacttttcccaacacgggctaacaacacgggtggcgtcccacaccagcagcagcgacctaatggcgtggtgcgagtgctcagcaaaacatttttggcgcgccaaccgggagacatgttgatttcgggcaacaattttttcgcgcggg

SEQ ID NO: 456580 - DNA, 2940 bp, Homo sapiens
  misc_feature (2805)..(2805): n is a, c, g, or t
cgctccctcccgctcgcagcttacttaacctggcccgggcggcggaggcgctctcacttccctggagccgcccgcttgcccgtcggtcgctagctcgctcggtgcgcgtcgtcccgctccatggcgctcttcgtgcggctgctggctctcgccctggctctggccctgggccccgccgcgaccctggcgggtcccgccaagtcgccctaccagctggtgctgcagcacagcaggctccggggccgccagcacggccccaacgtgtgtgctgtgcagaaggttattggcactaataggaagtacttcaccaactgcaagcagtggtaccaaaggaaaatctgtggcaaatcaacagtcatcagctacgagtgctgtcctggatatgaaaaggtccctggggagaagggctgtccagcagccctaccactctcaaacctttacgagaccctgggagtcgttggatccaccaccactcagctgtacacggaccgcacggagaagctgaggcctgagatggaggggcccggcagcttcaccatcttcgcccctagcaacgaggcctgggcctccttgccagctgaagtgctggactccctggtcagcaatgtcaacattgagctgctcaatgccctccgctaccatatggtgggcaggcgagtcctgactgatgagctgaaacacggcatgaccctcacctctatgtaccagaattccaacatccagatccaccactatcctaatgggattgtaactgtgaactgtgcccggctgctgaaagccgaccaccatgcaaccaacggggtggtgcacctcatcgataaggtcatctccaccatcaccaacaacatccagcagatcattgagatcgaggacacctttgagacccttcgggctgctgtggctgcatcagggctcaacacgatgcttgaaggtaacggccagtacacgcttttggccccgaccaatgaggccttcgagaagatccctagtgagactttgaaccgtatcctgggcgacccagaagccctgagagacctgctgaacaaccacatcttgaagtcagctatgtgtgctgaagccatcgttgcggggctgtctgtggagaccctggagggcacgacactggaggtgggctgcagcggggacatgctcactatcaacgggaaggcgatcatctccaataaagacatcctagccaccaacggggtgatccactacattgatgagctactcatcccagactcagccaagacactatttgaattggctgcagagtctgatgtgtccacagccattgaccttttcagacaagccggcctcggcaatcatctctctggaagtgagcggttgaccctcctggctcccctgaattctgtattcaaagatggaacccctccaattgatgcccatacaaggaatttgcttcggaaccacataattaaagaccagctggcctctaagtatctgtaccatggacagaccctggaaactctgggcggcaaaaaactgagagtttttgtttatcgtaatagcctctgcattgagaacagctgcatcgcggcccacgacaagagggggaggtacgggaccctgttcacgatggaccgggtgctgacccccccaatggggactgtcatggatgtcctgaagggagacaatcgctttagcatgctggtagctgccatccagtctgcaggactgacggagaccctcaaccgggaaggagtctacacagtcttcgctcccacaaatgaagccttccgagccctgccaccaagagaacggagcagactcttgggagatgccaaggaacttgccaacatcctgaaataccacattggtgatgaaatcctggttagcggaggcatcggggccctggtgcggctaaagtctctccaaggtgacaagctggaagtcagcttgaaaaacaatgtggtgagtgtcaacaaggagcctgttgccgagcctgacatcatggccacaaatggcgtggtccatgtcatcaccaatgttctgcagcctccagccaacagacctcaggaaagaggggatgaacttgcagactctgcgcttgagatcttcaaacaagcatcagcgttttccagggcttcccagaggtctgtgcgactagcccctgtctatcaaaagttattagagaggatgaagcattagcttgaagcactacaggaggaatgcaccacggcagctctccgccaatttctctcagatttccacagagactgtttgaatgttttcaaaaccaagtatcacactttaatgtacatgggccgcaccataatgagatgtgagccttgtgcatgtgggggaggagggagagagatgtactttttaaatcatgttccccctaaacatggctgttaacccactgcatgcagaaacttggatgtcactgcctgacattcacttccagagaggacctatcccaaatgtggaattgactgcctatgccaagtccctggaaaaggagcttcagtattgtggggctcataaaacatgaatcaagcaatccagcctcatgggaagtcctggcacagtttttgtaaagcccttgcacagctggagaaatggcatcattataagctatgagttgaaatgttctgtcaaatgtgtctcacatctacacgtggcttggaggcttttatggggccctgtccaggtagaaaagaaatggtatgtagagcttagatttccctattgtgacagagccatggtgtgtttgtaataataaaaccaaagaaacataaaaaaaaaaaaaaaaaaaaaaaaaaaaaaaaaaaaaaaaanaggggggttttatttggggggggggaaaaagaggttataaagggggtgtggtaaagggttcgggacacctttttgtagaaagggggaaaaggggggggcccaaagggggggggataaaatgagagacggggtcta

SEQ ID NO: 456581 - DNA, 3117 bp, Homo sapiens
  misc_feature (2805)..(2805): n is a, c, g, or t
cgctccctcccgctcgcagcttacttaacctggcccgggcggcggaggcgctctcacttccctggagccgcccgcttgcccgtcggtcgctagctcgctcggtgcgcgtcgtcccgctccatggcgctcttcgtgcggctgctggctctcgccctggctctggccctgggccccgccgcgaccctggcgggtcccgccaagtcgccctaccagctggtgctgcagcacagcaggctccggggccgccagcacggccccaacgtgtgtgctgtgcagaaggttattggcactaataggaagtacttcaccaactgcaagcagtggtaccaaaggaaaatctgtggcaaatcaacagtcatcagctacgagtgctgtcctggatatgaaaaggtccctggggagaagggctgtccagcagccctaccactctcaaacctttacgagaccctgggagtcgttggatccaccaccactcagctgtacacggaccgcacggagaagctgaggcctgagatggaggggcccggcagcttcaccatcttcgcccctagcaacgaggcctgggcctccttgccagctgaagtgctggactccctggtcagcaatgtcaacattgagctgctcaatgccctccgctaccatatggtgggcaggcgagtcctgactgatgagctgaaacacggcatgaccctcacctctatgtaccagaattccaacatccagatccaccactatcctaatgggattgtaactgtgaactgtgcccggctgctgaaagccgaccaccatgcaaccaacggggtggtgcacctcatcgataaggtcatctccaccatcaccaacaacatccagcagatcattgagatcgaggacacctttgagacccttcgggctgctgtggctgcatcagggctcaacacgatgcttgaaggtaacggccagtacacgcttttggccccgaccaatgaggccttcgagaagatccctagtgagactttgaaccgtatcctgggcgacccagaagccctgagagacctgctgaacaaccacatcttgaagtcagctatgtgtgctgaagccatcgttgcggggctgtctgtggagaccctggagggcacgacactggaggtgggctgcagcggggacatgctcactatcaacgggaaggcgatcatctccaataaagacatcctagccaccaacggggtgatccactacattgatgagctactcatcccagactcagccaagacactatttgaattggctgcagagtctgatgtgtccacagccattgaccttttcagacaagccggcctcggcaatcatctctctggaagtgagcggttgaccctcctggctcccctgaattctgtattcaaagatggaacccctccaattgatgcccatacaaggaatttgcttcggaaccacataattaaagaccagctggcctctaagtatctgtaccatggacagaccctggaaactctgggcggcaaaaaactgagagtttttgtttatcgtaatagcctctgcattgagaacagctgcatcgcggcccacgacaagagggggaggtacgggaccctgttcacgatggaccgggtgctgacccccccaatggggactgtcatggatgtcctgaagggagacaatcgctttagcatgctggtagctgccatccagtctgcaggactgacggagaccctcaaccgggaaggagtctacacagtcttcgctcccacaaatgaagccttccgagccctgccaccaagagaacggagcagactcttgggagatgccaaggaacttgccaacatcctgaaataccacattggtgatgaaatcctggttagcggaggcatcggggccctggtgcggctaaagtctctccaaggtgacaagctggaagtcagcttgaaaaacaatgtggtgagtgtcaacaaggagcctgttgccgagcctgacatcatggccacaaatggcgtggtccatgtcatcaccaatgttctgcagcctccagccaacagacctcaggaaagaggggatgaacttgcagactctgcgcttgagatcttcaaacaagcatcagcgttttccagggcttcccagaggtctgtgcgactagcccctgtctatcaaaagttattagagaggatgaagcattagcttgaagcactacaggaggaatgcaccacggcagctctccgccaatttctctcagatttccacagagactgtttgaatgttttcaaaaccaagtatcacactttaatgtacatgggccgcaccataatgagatgtgagccttgtgcatgtgggggaggagggagagagatgtactttttaaatcatgttccccctaaacatggctgttaacccactgcatgcagaaacttggatgtcactgcctgacattcacttccagagaggacctatcccaaatgtggaattgactgcctatgccaagtccctggaaaaggagcttcagtattgtggggctcataaaacatgaatcaagcaatccagcctcatgggaagtcctggcacagtttttgtaaagcccttgcacagctggagaaatggcatcattataagctatgagttgaaatgttctgtcaaatgtgtctcacatctacacgtggcttggaggcttttatggggccctgtccaggtagaaaagaaatggtatgtagagcttagatttccctattgtgacagagccatggtgtgtttgtaataataaaaccaaagaaacataaaaaaaaaaaaaaaaaaaaaaaaaaaaaaaaaaaaaaaaanaagacaacaacaaacaaaaaaaaaacaaaaaaagacgaggggggcggcggcgccccgccgacccccccgcgcgaggcccccaacgctcacgcagcccaccggcatgctgcttgccgacctcacgaacgggtgcgccccgcccaactcaggcggcgcgcgccgcatctatattacacgcacgccgtacgtgcgcggtcctcgcgtcctctccctcacgcccctgcgtcgtggtgggctcacctccgccgtccttcttcgcgccgcgcttccgttgcgccccccccccccctccctcccgcgggcgcacgctcg

SEQ ID NO: 456582 - DNA, 3528 bp, Homo sapiens
cgctccctcccgctcgcagcttacttaacctggcccgggcggcggaggcgctctcacttccctggagccgcccgcttgcccgtcggtcgctagctcgctcggtgcgcgtcgtcccgctccatggcgctcttcgtgcggctgctggctctcgccctggctctggccctgggccccgccgcgaccctggcgggtcccgccaagtcgccctaccagctggtgctgcagcacagcaggctccggggccgccagcacggccccaacgtgtgtgctgtgcagaaggttattggcactaataggaagtacttcaccaactgcaagcagtggtaccaaaggaaaatctgtggcaaatcaacagtcatcagctacgagtgctgtcctggatatgaaaaggtccctggggagaagggctgtccagcagccctaccactctcaaacctttacgagaccctgggagtcgttggatccaccaccactcagctgtacacggaccgcacggagaagctgaggcctgagatggaggggcccggcagcttcaccatcttcgcccctagcaacgaggcctgggcctccttgccagctgaagtgctggactccctggtcagcaatgtcaacattgagctgctcaatgccctccgctaccatatggtgggcaggcgagtcctgactgatgagctgaaacacggcatgaccctcacctctatgtaccagaattccaacatccagatccaccactatcctaatgggattgtaactgtgaactgtgcccggctgctgaaagccgaccaccatgcaaccaacggggtggtgcacctcatcgataaggtcatctccaccatcaccaacaacatccagcagatcattgagatcgaggacacctttgagacccttcgggctgctgtggctgcatcagggctcaacacgatgcttgaaggtaacggccagtacacgcttttggccccgaccaatgaggccttcgagaagatccctagtgagactttgaaccgtatcctgggcgacccagaagccctgagagacctgctgaacaaccacatcttgaagtcagctatgtgtgctgaagccatcgttgcggggctgtctgtggagaccctggagggcacgacactggaggtgggctgcagcggggacatgctcactatcaacgggaaggcgatcatctccaataaagacatcctagccaccaacggggtgatccactacattgatgagctactcatcccagactcagccaagacactatttgaattggctgcagagtctgatgtgtccacagccattgaccttttcagacaagccggcctcggcaatcatctctctggaagtgagcggttgaccctcctggctcccctgaattctgtattcaaagatggaacccctccaattgatgcccatacaaggaatttgcttcggaaccacataattaaagaccagctggcctctaagtatctgtaccatggacagaccctggaaactctgggcggcaaaaaactgagagtttttgtttatcgtaatagcctctgcattgagaacagctgcatcgcggcccacgacaagagggggaggtacgggaccctgttcacgatggaccgggtgctgacccccccaatggggactgtcatggatgtcctgaagggagacaatcgctttagcatgctggtagctgccatccagtctgcaggactgacggagaccctcaaccgggaaggagtctacacagtcttcgctcccacaaatgaagccttccgagccctgccaccaagagaacggagcagactcttgggagatgccaaggaacttgccaacatcctgaaataccacattggtgatgaaatcctggttagcggaggcatcggggccctggtgcggctaaagtctctccaaggtgacaagctggaagtcagcttgaaaaacaatgtggtgagtgtcaacaaggagcctgttgccgagcctgacatcatggccacaaatggcgtggtccatgtcatcaccaatgttctgcagcctccagccaacagacctcaggaaagaggggatgaacttgcagactctgcgcttgagatcttcaaacaagcatcagcgttttccagggcttcccagaggtctgtgcgactagcccctgtctatcaaaagttattagagaggatgaagcattagcttgaagcactacaggaggaatgcaccacggcagctctccgccaatttctctcagatttccacagagactgtttgaatgttttcaaaaccaagtatcacactttaatgtacatgggccgcaccataatgagatgtgagccttgtgcatgtgggggaggagggagagagatgtactttttaaatcatgttccccctaaacatggctgttaacccactgcatgcagaaacttggatgtcactgcctgacattcacttccagagaggacctatcccaaatgtggaattgactgcctatgccaagtccctggaaaaggagcttcagtattgtggggctcataaaacatgaatcaagcaatccagcctcatgggaagtcctggcacagtttttgtaaagcccttgcacagctggagaaatggcatcattataagctatgagttgaaatgttctgtcaaatgtgtctcacatctacacgtggcttggaggcttttatggggccctgtccaggtagaaaagaaatggtatgtagagcttagatttccctattgtgacagagccatggtgtgtttgtaataataaaaccaaagaaacataaagaacacaatagagagaaaaaatgcgagggactctatagagttccgagggtgcgcgaacaacagccaggtaggtgcaacacggggcacacgtggcttcactcatgcgagttttccgtcgaaccacagattaccctaggtcttcaccaacagccgggacacaactctgagcgcggtttctccccctatcctatgcgtccgcaagtccgcacctagcagacttgtcagcaatataacacagcgcgcatgggcacaccccgtgttgccaatctcaatgtgagaaacttcggcgcgacacagtagccctccctccagaccatacaccccccaactgagagagcgccgcaccgagcagacctccctcccacatcgcagacgaacgccgagaagaaccaaatcagacaactagaaacccgcataaaccgctacaaacataggtagcacacaacaaactaacacaaatacacaatcctaacaaaaaccaacacccccaactaaaactccgctcaaccctagggcgaaaaagaggccaaaaccaatagcatgcaaagccacgcatgacacccacgacatcccactgcaacaaacgacagaaccctataactaaagtacaaaagcaccaaccacaagaagacctcagaacgaaaaccatacaaactcatgaccaacacagcgccccaaacctaaccgacagacaacagaaacagcaaagcaaacacaaaaccaatcaccaaacaagccaaatacaaacgcacgcgaaacgca

SEQ ID NO: 456583 - DNA, 2543 bp, Homo sapiens
gaagtaactgacgggtgattaatagatgcttggccccaacgtgtgtgctgtgcagaaggttattggcactaataggaagtacttcaccaactgcaagcagtggtaccaaaggaaaatctgtggcaaatcaacagtcatcagctacgagtgctgtcctggatatgaaaaggtccctggggagaagggctgtccagcagccctaccactctcaaacctttacgagaccctgggagtcgttggatccaccaccactcagctgtacacggaccgcacggagaagctgaggcctgagatggaggggcccggcagcttcaccatcttcgcccctagcaacgaggcctgggcctccttgccagctgaagtgctggactccctggtcagcaatgtcaacattgagctgctcaatgccctccgctaccatatggtgggcaggcgagtcctgactgatgagctgaaacacggcatgaccctcacctctatgtaccagaattccaacatccagatccaccactatcctaatgggattgtaactgtgaactgtgcccggctgctgaaagccgaccaccatgcaaccaacggggtggtgcacctcatcgataaggtcatctccaccatcaccaacaacatccagcagatcattgagatcgaggacacctttgagacccttcgggctgctgtggctgcatcagggctcaacacgatgcttgaaggtaacggccagtacacgcttttggccccgaccaatgaggccttcgagaagatccctagtgagactttgaaccgtatcctgggcgacccagaagccctgagagacctgctgaacaaccacatcttgaagtcagctatgtgtgctgaagccatcgttgcggggctgtctgtggagaccctggagggcacgacactggaggtgggctgcagcggggacatgctcactatcaacgggaaggcgatcatctccaataaagacatcctagccaccaacggggtgatccactacattgatgagctactcatcccagactcagccaagacactatttgaattggctgcagagtctgatgtgtccacagccattgaccttttcagacaagccggcctcggcaatcatctctctggaagtgagcggttgaccctcctggctcccctgaattctgtattcaaagatggaacccctccaattgatgcccatacaaggaatttgcttcggaaccacataattaaagaccagctggcctctaagtatctgtaccatggacagaccctggaaactctgggcggcaaaaaactgagagtttttgtttatcgtaatagcctctgcattgagaacagctgcatcgcggcccacgacaagagggggaggtacgggaccctgttcacgatggaccgggtgctgacccccccaatggggactgtcatggatgtcctgaagggagacaatcgctttagcatgctggtagctgccatccagtctgcaggactgacggagaccctcaaccgggaaggagtctacacagtcttcgctcccacaaatgaagccttccgagccctgccaccaagagaacggagcagactcttgggagatgccaaggaacttgccaacatcctgaaataccacattggtgatgaaatcctggttagcggaggcatcggggccctggtgcggctaaagtctctccaaggtgacaagctggaagtcagcttgaaaaacaatgtggtgagtgtcaacaaggagcctgttgccgagcctgacatcatggccacaaatggcgtggtccatgtcatcaccaatgttctgcagcctccagccaacagacctcaggaaagaggggatgaacttgcagactctgcgcttgagatcttcaaacaagcatcagcgttttccagggcttcccagaggtctgtgcgactagcccctgtctatcaaaagttattagagaggatgaagcattagcttgaagcactacaggaggaatgcaccacggcagctctccgccaatttctctcagatttccacagagactgtttgaatgttttcaaaaccaagtatcacactttaatgtacatgggccgcaccataatgagatgtgagccttgtgcatgtgggggaggagggagagagatgtactttttaaatcatgttccccctaaacatggctgttaacccactgcatgcagaaacttggatgtcactgcctgacattcacttccagagaggacctatcccaaatgtggaattgactgcctatgccaagtccctggaaaaggagcttcagtattgtggggctcataaaacatgaatcaagcaatccagcctcatgggaagtcctggcacagtttttgtaaagcccttgcacagctggagaaatggcatcattataagctatgagttgaaatgttctgtcaaatgtgtctcacatctacacgtggcttggaggcttttatggggccctgtccaggtagaaaagaaatggtatgtagagcttagatttccctattgtgacagagccatggtgtgtttgtaataataaaaccaaagaaacata

SEQ ID NO: 456584 - DNA, 2710 bp, Homo sapiens
cgctccctcccgctcgcagcttacttaacctggcccgggcggcggaggcgctctcacttccctggagccgcccgcttgcccgtcggtcgctagctcgctcggtgcgcgtcgtcccgctccatggcgctcttcgtgcggctgctggctctcgccctggctctggccctgggccccgccgcgaccctggcgggtcccgccaagtcgccctaccagctggtgctgcagcacagcaggctccggggccgccagcacggccccaacgtgtgtgctgtgcagaaggttattggcactaataggaagtacttcaccaactgcaagcagtggtaccaaaggaaaatctgtggcaaatcaacagtcatcagctacgagtgctgtcctggatatgaaaaggtccctggggagaagggctgtccagcagccctaccactctcaaacctttacgagaccctgggagtcgttggatccaccaccactcagctgtacacggaccgcacggagaagctgaggcctgagatggaggggcccggcagcttcaccatcttcgcccctagcaacgaggcctgggcctccttgccagctgaagtgctggactccctggtcagcaatgtcaacattgagctgctcaatgccctccgctaccatatggtgggcaggcgagtcctgactgatgagctgaaacacggcatgaccctcacctctatgtaccagaattccaacatccagatccaccactatcctaatgggattgtaactgtgaactgtgcccggctgctgaaagccgaccaccatgcaaccaacggggtggtgcacctcatcgataaggtcatctccaccatcaccaacaacatccagcagatcattgagatcgaggacacctttgagacccttcgggctgctgtggctgcatcagggctcaacacgatgcttgaaggtaacggccagtacacgcttttggccccgaccaatgaggccttcgagaagatccctagtgagactttgaaccgtatcctgggcgacccagaagccctgagagacctgctgaacaaccacatcttgaagtcagctatgtgtgctgaagccatcgttgcggggctgtctgtggagaccctggagggcacgacactggaggtgggctgcagcggggacatgctcactatcaacgggaaggcgatcatctccaataaagacatcctagccaccaacggggtgatccactacattgatgagctactcatcccagactcagccaagacactatttgaattggctgcagagtctgatgtgtccacagccattgaccttttcagacaagccggcctcggcaatcatctctctggaagtgagcggttgaccctcctggctcccctgaattctgtattcaaagatggaacccctccaattgatgcccatacaaggaatttgcttcggaaccacataattaaagaccagctggcctctaagtatctgtaccatggacagaccctggaaactctgggcggcaacgcggcccacgacaagagggggaggtacgggaccctgttcacgatggaccgggtgctgacccccccaatggggactgtcatggatgtcctgaagggagacaatcgctttagcatgctggtagctgccatccagtctgcaggactgacggagaccctcaaccgggaaggagtctacacagtcttcgctcccacaaatgaagccttccgagccctgccaccaagagaacggagcagactcttgggagatgccaaggaacttgccaacatcctgaaataccacattggtgatgaaatcctggttagcggaggcatcggggccctggtgcggctaaagtctctccaaggtgacaagctggaagtcagcttgaaaaacaatgtggtgagtgtcaacaaggagcctgttgccgagcctgacatcatggccacaaatggcgtggtccatgtcatcaccaatgttctgcagcctccagccaacagacctcaggaaagaggggatgaacttgcagactctgcgcttgagatcttcaaacaagcatcagcgttttccagggcttcccagaggtctgtgcgactagcccctgtctatcaaaagttattagagaggatgaagcattagcttgaagcactacaggaggaatgcaccacggcagctctccgccaatttctctcagatttccacagagactgtttgaatgttttcaaaaccaagtatcacactttaatgtacatgggccgcaccataatgagatgtgagccttgtgcatgtgggggaggagggagagagatgtactttttaaatcatgttccccctaaacatggctgttaacccactgcatgcagaaacttggatgtcactgcctgacattcacttccagagaggacctatcccaaatgtggaattgactgcctatgccaagtccctggaaaaggagcttcagtattgtggggctcataaaacatgaatcaagcaatccagcctcatgggaagtcctggcacagtttttgtaaagcccttgcacagctggagaaatggcatcattataagctatgagttgaaatgttctgtcaaatgtgtctcacatctacacgtggcttggaggcttttatggggccctgtccaggtagaaaagaaatggtatgtagagcttagatttccctattgtgacagagccatggtgtgtttgtaataataaaaccaaagaaacata

SEQ ID NO: 456585 - DNA, 2744 bp, Homo sapiens
cgctccctcccgctcgcagcttacttaacctggcccgggcggcggaggcgctctcacttccctggagccgcccgcttgcccgtcggtcgctagctcgctcggtgcgcgtcgtcccgctccatggcgctcttcgtgcggctgctggctctcgccctggctctggccctgggccccgccgcgaccctggcgggtcccgccaagtcgccctaccagctggtgctgcagcacagcaggctccggggccgccagcacggccccaacgtgtgtgctgtgcagaaggttattggcactaataggaagtacttcaccaactgcaagcagtggtaccaaaggaaaatctgtggcaaatcaacagtcatcagctacgagtgctgtcctggatatgaaaaggtccctggggagaagggctgtccagcagccctaccactctcaaacctttacgagaccctgggagtcgttggatccaccaccactcagctgtacacggaccgcacggagaagctgaggcctgagatggaggggcccggcagcttcaccatcttcgcccctagcaacgaggcctgggcctccttgccagctgaagtgctggactccctggtcagcaatgtcaacattgagctgctcaatgccctccgctaccatatggtgggcaggcgagtcctgactgatgagctgaaacacggcatgaccctcacctctatgtaccagaattccaacatccagatccaccactatcctaatgggattgtaactgtgaactgtgcccggctgctgaaagccgaccaccatgcaaccaacggggtggtgcacctcatcgataaggtcatctccaccatcaccaacaacatccagcagatcattgagatcgaggacacctttgagacccttcgggctgctgtggctgcatcagggctcaacacgatgcttgaaggtaacggccagtacacgcttttggccccgaccaatgaggccttcgagaagatccctagtgagactttgaaccgtatcctgggcgacccagaagccctgagagacctgctgaacaaccacatcttgaagtcagctatgtgtgctgaagccatcgttgcggggctgtctgtggagaccctggagggcacgacactggaggtgggctgcagcggggacatgctcactatcaacgggaaggcgatcatctccaataaagacatcctagccaccaacggggtgatccactacattgatgagctactcatcccagactcagccaagacactatttgaattggctgcagagtctgatgtgtccacagccattgaccttttcagacaagccggcctcggcaatcatctctctggaagtgagcggttgaccctcctggctcccctgaattctgtattcaaagatggaacccctccaattgatgcccatacaaggaatttgcttcggaaccacataattaaagaccagctggcctctaagtatctgtaccatggacagaccctggaaactctgggcggcaaaaaactgagagtttttgtttatcgtaatagcctctgcattgagaacagctgcatcgcggcccacgacaagagggggaggtacgggaccctgttcacgatggaccgggtgctgacccccccaatggggactgtcatggatgtcctgaagggagacaatcgctttagcatgctggtagctgccatccagtctgcaggactgacggagaccctcaaccgggaaggagtctacacagtcttcgctcccacaaatgaagccttccgagccctgccaccaagagaacggagcagactcttgggagatgccaaggaacttgccaacatcctgaaataccacattggtgatgaaatcctggttagcggaggcatcggggccctggtgcggctaaagtctctccaaggtgacaagctggaagtcagcttgaaaaacaatgtggtgagtgtcaacaaggagcctgttgccgagcctgacatcatggccacaaatggcgtggtccatgtcatcaccaatgttctgcagcctccagccaacagacctcaggaaagaggggatgaacttgcagactctaccttgtgttttctttcaggcttcccagaggtctgtgcgactagcccctgtctatcaaaagttattagagaggatgaagcattagcttgaagcactacaggaggaatgcaccacggcagctctccgccaatttctctcagatttccacagagactgtttgaatgttttcaaaaccaagtatcacactttaatgtacatgggccgcaccataatgagatgtgagccttgtgcatgtgggggaggagggagagagatgtactttttaaatcatgttccccctaaacatggctgttaacccactgcatgcagaaacttggatgtcactgcctgacattcacttccagagaggacctatcccaaatgtggaattgactgcctatgccaagtccctggaaaaggagcttcagtattgtggggctcataaaacatgaatcaagcaatccagcctcatgggaagtcctggcacagtttttgtaaagcccttgcacagctggagaaatggcatcattataagctatgagttgaaatgttctgtcaaatgtgtctcacatctacacgtggcttggaggcttttatggggccctgtccaggtagaaaagaaatggtatgtagagcttagatttccctattgtgacagagccatggtgtgtttgtaataataaaaccaaagaaacata

SEQ ID NO: 456586 - DNA, 2484 bp, Homo sapiens
cgctccctcccgctcgcagcttacttaacctggcccgggcggcggaggcgctctcacttccctggagccgcccgcttgcccgtcggtcgctagctcgctcggtgcgcgtcgtcccgctccatggcgctcttcgtgcggctgctggctctcgccctggctctggccctgggccccgccgcgaccctggcgggtcccgccaagtcgccctaccagctggtgctgcagcacagcaggctccggggccgccagcacggccccaacgtgtgtgctgtgcagaaggttattggcactaataggaagaagtgctggactccctggtcagcaatgtcaacattgagctgctcaatgccctccgctaccatatggtgggcaggcgagtcctgactgatgagctgaaacacggcatgaccctcacctctatgtaccagaattccaacatccagatccaccactatcctaatgggattgtaactgtgaactgtgcccggctgctgaaagccgaccaccatgcaaccaacggggtggtgcacctcatcgataaggtcatctccaccatcaccaacaacatccagcagatcattgagatcgaggacacctttgagacccttcgggctgctgtggctgcatcagggctcaacacgatgcttgaaggtaacggccagtacacgcttttggccccgaccaatgaggccttcgagaagatccctagtgagactttgaaccgtatcctgggcgacccagaagccctgagagacctgctgaacaaccacatcttgaagtcagctatgtgtgctgaagccatcgttgcggggctgtctgtggagaccctggagggcacgacactggaggtgggctgcagcggggacatgctcactatcaacgggaaggcgatcatctccaataaagacatcctagccaccaacggggtgatccactacattgatgagctactcatcccagactcagccaagacactatttgaattggctgcagagtctgatgtgtccacagccattgaccttttcagacaagccggcctcggcaatcatctctctggaagtgagcggttgaccctcctggctcccctgaattctgtattcaaagatggaacccctccaattgatgcccatacaaggaatttgcttcggaaccacataattaaagaccagctggcctctaagtatctgtaccatggacagaccctggaaactctgggcggcaaaaaactgagagtttttgtttatcgtaatagcctctgcattgagaacagctgcatcgcggcccacgacaagagggggaggtacgggaccctgttcacgatggaccgggtgctgacccccccaatggggactgtcatggatgtcctgaagggagacaatcgctttagcatgctggtagctgccatccagtctgcaggactgacggagaccctcaaccgggaaggagtctacacagtcttcgctcccacaaatgaagccttccgagccctgccaccaagagaacggagcagactcttgggagatgccaaggaacttgccaacatcctgaaataccacattggtgatgaaatcctggttagcggaggcatcggggccctggtgcggctaaagtctctccaaggtgacaagctggaagtcagcttgaaaaacaatgtggtgagtgtcaacaaggagcctgttgccgagcctgacatcatggccacaaatggcgtggtccatgtcatcaccaatgttctgcagcctccagccaacagacctcaggaaagaggggatgaacttgcagactctgcgcttgagatcttcaaacaagcatcagcgttttccagggcttcccagaggtctgtgcgactagcccctgtctatcaaaagttattagagaggatgaagcattagcttgaagcactacaggaggaatgcaccacggcagctctccgccaatttctctcagatttccacagagactgtttgaatgttttcaaaaccaagtatcacactttaatgtacatgggccgcaccataatgagatgtgagccttgtgcatgtgggggaggagggagagagatgtactttttaaatcatgttccccctaaacatggctgttaacccactgcatgcagaaacttggatgtcactgcctgacattcacttccagagaggacctatcccaaatgtggaattgactgcctatgccaagtccctggaaaaggagcttcagtattgtggggctcataaaacatgaatcaagcaatccagcctcatgggaagtcctggcacagtttttgtaaagcccttgcacagctggagaaatggcatcattataagctatgagttgaaatgttctgtcaaatgtgtctcacatctacacgtggcttggaggcttttatggggccctgtccaggtagaaaagaaatggtatgtagagcttagatttccctattgtgacagagccatggtgtgtttgtaataataaaaccaaagaaacata

SEQ ID NO: 456587 - DNA, 2277 bp, Homo sapiens
cgctccctcccgctcgcagcttacttaacctggcccgggcggcggaggcgctctcacttccctggagccgcccgcttgcccgtcggtcgctagctcgctcggtgcgcgtcgtcccgctccatggcgctcttcgtgcggctgctggctctcgccctggctctggccctgggccccgccgcgaccctggcgggtcccgccaagtcgccctaccagctggtgctgcagcacagcaggctccggggccgccagcacggccccaacgtgtgtgctgtgcagaaggttattggcactaataggaagtacttcaccaactgcaagcagtggtaccaaaggaaaatctgtggcaaatcaacagtcatcagctacgagtgctgtcctggatatgaaaaggtccctggggagaagggctgtccagcagccctaccactctcaaacctttacgagaccctgggagtcgttggatccaccaccactcagctgtacacggaccgcacggagaagctgaggcctgagatggaggggcccggcagcttcaccatcttcgcccctagcaacgaggcctgggcctccttgccagctgaagtgctggactccctggtcagcaatgtcaacattgagctgctcaatgccctccgctaccatatggtgggcaggcgagtcctgactgatgagctgaaacacggcatgaccctcacctctatgtaccagaattccaacatccagatccaccactatcctaatgggattgtaactgtgaactgtgcccggctgctgaaagccgaccaccatgcaaccaacggggtggtgcacctcatcgataaggtcatctccaccatcaccaacaacatccagcagatcattgagatcgaggacacctttgagacccttcgggctgctgtggctgcatcagggctcaacacgatgcttgaaggtaacggccagtacacgcttttggccccgaccaatgaggccttcgagaagatccctagtgagactttgaaccgtatcctgggcgacccagaagccctgagagacctgctgaacaaccacatcttgaagtcagctatgtgtgctgaagccatcgttgcggggctgtctgtggagaccctggagggcacgacactggaggtgggctgcagcggggacatgctcactatcaacgggaaggcgatcatctccaataaagacatcctagccaccaacggggtgatccactacattgatgagctactcatcccagactcagccaagacactatttgaattggctgcagagtctgatgtgtccacagccattgaccttttcagacaagccggcctcggcaatcatctctctggaagtgagcggttgaccctcctggctcccctgaattctgtattcaaagatggaacccctccaattgatgcccatacaaggaatttgcttcggaaccacataattaaagaccagctggcctctaagtatctgtaccatggacagaccctggaaactctgggcggcaaaaaactgagagtttttgtttatcgtaatagcctctgcattgagaacagctgcatcgcggcccacgacaagagggggaggtacgggaccctgttcacgatggaccgggtgctgacccccccaatggggactgtcatggatgtcctgaagggagacaatcgctttagcatgctggtagctgccatccagtctgcaggactgacggagaccctcaaccgggaaggagtctacacagtcttcgctcccacaaatgaagccttccgagccctgccaccaagagaacggagcagactcttgggagatgccaaggaacttgccaacatcctgaaataccacattggtgatgaaatcctggttagcggaggcatcggggccctggtgcggctaaagtctctccaaggtgacaagctggaagtcagcttgaaaaacaatgtggtgagtgtcaacaaggagcctgttgccgagcctgacatcatggccacaaatggcgtggtccatgtcatcaccaatgttctgcagcctccagccaacagacctcaggaaagaggggatgaacttgcagactctgcgcttgagatcttcaaacaagcatcagcgttttccagggcttcccagaggtctgtgcgactagcccctgtctatcaaaagttattagagaggatgaagcattagcttgaagcactacaggaggaatgcaccacggcagctctccgccaatttctctcagatttccacagagacatggtgtgtttgtaataataaaaccaaagaaacata

SEQ ID NO: 456588 - DNA, 2034 bp, Homo sapiens
  misc_feature (161)..(161): n is a, c, g, or t
ggtccaccatcaacaagcaacatccaggcagatcattgacgatcgagagacacacttgtgaggacgccttcggagcatgctggtgagactgcatacagggggcctcgaatcgacagatagcgtattgcaaggataaacgcgtcgcaggtatcgagcagctntggttgggcaccccagacgcacatagaagcgccgttgcgaagcaatgatacccatagatgcagcacttatgataccggtcatccctgcgtggcgaccgccagacaagccactcgagatgatgctgcatgaatcgaaccagcgacctgctgaacaaccacatcttgaagtcagctatgtgtgctgaagccatcgttgcggggctgtctgtggagaccctggagggcacgacactggaggtgggctgcagcggggacatgctcactatcaacgggaaggcgatcatctccaataaagacatcctagccaccaacggggtgatccactacattgatgagctactcatcccagactcagccaagacactatttgaattggctgcagagtctgatgtgtccacagccattgaccttttcagacaagccggcctcggcaatcatctctctggaagtgagcggttgaccctcctggctcccctgaattctgtattcaaagatggaacccctccaattgatgcccatacaaggaatttgcttcggaaccacataattaaagaccagctggcctctaagtatctgtaccatggacagaccctggaaactctgggcggcaaaaaactgagagtttttgtttatcgtaatagcctctgcattgagaacagctgcatcgcggcccacgacaagagggggaggtacgggaccctgttcacgatggaccgggtgctgacccccccaatggggactgtcatggatgtcctgaagggagacaatcgctttagcatgctggtagctgccatccagtctgcaggactgacggagaccctcaaccgggaaggagtctacacagtcttcgctcccacaaatgaagccttccgagccctgccaccaagagaacggagcagactcttgggagatgccaaggaacttgccaacatcctgaaataccacattggtgatgaaatcctggttagcggaggcatcggggccctggtgcggctaaagtctctccaaggtgacaagctggaagtcagcttgaaaaacaatgtggtgagtgtcaacaaggagcctgttgccgagcctgacatcatggccacaaatggcgtggtccatgtcatcaccaatgttctgcagcctccagccaacagacctcaggaaagaggggatgaacttgcagactctgcgcttgagatcttcaaacaagcatcagcgttttccagggcttcccagaggtctgtgcgactagcccctgtctatcaaaagttattagagaggatgaagcattagcttgaagcactacaggaggaatgcaccacggcagctctccgccaatttctctcagatttccacagagactgtttgaatgttttcaaaaccaagtatcacactttaatgtacatgggccgcaccataatgagatgtgagccttgtgcatgtgggggaggagggagagagatgtactttttaaatcatgttccccctaaacatggctgttaacccactgcatgcagaaacttggatgtcactgcctgacattcacttccagagaggacctatcccaaatgtggaattgactgcctatgccaagtccctggaaaaggagcttcagtattgtggggctcataaaacatgaatcaagcaatccagcctcatgggaagtcctggcacagtttttgtaaagcccttgcacagctggagaaatggcatcattataagctatgagttgaaatgttctgtcaaatgtgtctcacatctacacgtggcttggaggcttttatggggccctgtccaggtagaaaagaaatggtatgtagagcttagatttccctattgtgacagagccatggtgtgtttgtaataataaaaccaaagaaacata

SEQ ID NO: 456589 - DNA, 2030 bp, Homo sapiens
gctgatacagtgagtattgattctttgggctgtagtcagatattggattatgatcaatattatcaccatttattttgttgctccagttcttccagctgtggccaatccttcagttggattcttgtgccccatcaacattctccatcctggctttttgttttgagcacttccttccttcctagcaccaccaggctcctgtattatccctgtccctgccctggaatcgactcctcctccagagagccctggtttcttttgttagaggatggtatatagaatccaacatgcagacacttggtggacttattgttactggggttttgttatactagggtttcagtggtcagtgctagtatttatgtatgttaacccacgctgtgcgttgagatcaggcatgtccggacatgcctgaatgctcactatcaacgggaaggcgatcatctccaataaagacatcctagccaccaacggggtgatccactacattgatgagctactcatcccagactcagccaagacactatttgaattggctgcagagtctgatgtgtccacagccattgaccttttcagacaagccggcctcggcaatcatctctctggaagtgagcggttgaccctcctggctcccctgaattctgtattcaaagatggaacccctccaattgatgcccatacaaggaatttgcttcggaaccacataattaaagaccagctggcctctaagtatctgtaccatggacagaccctggaaactctgggcggcaaaaaactgagagtttttgtttatcgtaatagcctctgcattgagaacagctgcatcgcggcccacgacaagagggggaggtacgggaccctgttcacgatggaccgggtgctgacccccccaatggggactgtcatggatgtcctgaagggagacaatcgctttagcatgctggtagctgccatccagtctgcaggactgacggagaccctcaaccgggaaggagtctacacagtcttcgctcccacaaatgaagccttccgagccctgccaccaagagaacggagcagactcttgggagatgccaaggaacttgccaacatcctgaaataccacattggtgatgaaatcctggttagcggaggcatcggggccctggtgcggctaaagtctctccaaggtgacaagctggaagtcagcttgaaaaacaatgtggtgagtgtcaacaaggagcctgttgccgagcctgacatcatggccacaaatggcgtggtccatgtcatcaccaatgttctgcagcctccagccaacagacctcaggaaagaggggatgaacttgcagactctgcgcttgagatcttcaaacaagcatcagcgttttccagggcttcccagaggtctgtgcgactagcccctgtctatcaaaagttattagagaggatgaagcattagcttgaagcactacaggaggaatgcaccacggcagctctccgccaatttctctcagatttccacagagactgtttgaatgttttcaaaaccaagtatcacactttaatgtacatgggccgcaccataatgagatgtgagccttgtgcatgtgggggaggagggagagagatgtactttttaaatcatgttccccctaaacatggctgttaacccactgcatgcagaaacttggatgtcactgcctgacattcacttccagagaggacctatcccaaatgtggaattgactgcctatgccaagtccctggaaaaggagcttcagtattgtggggctcataaaacatgaatcaagcaatccagcctcatgggaagtcctggcacagtttttgtaaagcccttgcacagctggagaaatggcatcattataagctatgagttgaaatgttctgtcaaatgtgtctcacatctacacgtggcttggaggcttttatggggccctgtccaggtagaaaagaaatggtatgtagagcttagatttccctattgtgacagagccatggtgtgtttgtaataataaaaccaaagaaacata

SEQ ID NO: 456590 - DNA, 1699 bp, Homo sapiens
cgctccctcccgctcgcagcttacttaacctggcccgggcggcggaggcgctctcacttccctggagccgcccgcttgcccgtcggtcgctagctcgctcggtgcgcgtcgtcccgctccatggcgctcttcgtgcggctgctggctctcgccctggctctggccctgggccccgccgcgaccctggcgggtcccgccaagtcgccctaccagctggtgctgcagcacagcaggctccggggccgccagcacggccccaacgtgtgtgctgtgcagaaggttattggcactaataggaagtacttcaccaactgcaagcagtggtaccaaaggaaaatctgtggcaaatcaacagtcatcagctacgagtgctgtcctggatatgaaaaggtccctggggagaagggctgtccagcagccctaccactctcaaacctttacgagaccctgggagtcgttggatccaccaccactcagctgtacacggaccgcacggagaagctgaggcctgagatggaggggcccggcagcttcaccatcttcgcccctagcaacgaggcctgggcctccttgccagctgaagtgctggactccctggtcagcaatgtcaacattgagctgctcaatgccctccgctaccatatggtgggcaggcgagtcctgactgatgagctgaaacacggcatgaccctcacctctatgtaccagaattccaacatccagatccaccactatcctaatgggattgtaactgtgaactgtgcccggctgctgaaagccgaccaccatgcaaccaacggggtggtgcacctcatcgataaggtcatctccaccatcaccaacaacatccagcagatcattgagatcgaggacacctttgagacccttcgggctgctgtggctgcatcagggctcaacacgatgcttgaaggtaacggccagtacacgcttttggccccgaccaatgaggccttcgagaagatccctagtgagactttgaaccgtatcctgggcgacccagaagccctgagagacctgctgaacaaccacatcttgaagtcagctatgtgtgctgaagccatcgttgcggggctgtctgtggagaccctggagggcacgacactggaggtgggctgcagcggggacatgctcactatcaacgggaaggcgatcatctccaataaagacatcctagccaccaacggggtgatccactacattgatgagctactcatcccagactcagccaagacactatttgaattggctgcagagtctgatgtgtccacagccattgaccttttcagacaagccggcctcggcaatcatctctctggaagtgagcggttgaccctcctggctcccctgaattctgtattcaaagatggaacccctccaattgatgcccatacaaggaatttgcttcggaaccacataattaaagaccagctggcctctaagtatctgtaccatggacagaccctggaaactctgggcggcaaaaaactgagagtttttgtttatcgtaatgtaagttctgggtcctaaatcatgctcctgggaagctccttactgtgggacttgtattagtgtaaaaaaaaatgtcctcaataagcaggagtttgcatgagaactggttgctgacaaggaaggaaataatttctggaaaatatagataacaaaatgagatcctgcagaa

SEQ ID NO: 456591 - DNA, 1451 bp, Homo sapiens
  misc_feature (135)..(135): n is a, c, g, or t
gggctttacctttattacaaaaattaagagcaaaggctggtgagttacacttcttcctccccaccaggtgctctctgcagctctggaaaaatggtgtcctctttgttgtcccaccagggggcgccacctccagcnccgccccagcctcatacccagttcttcagctcggccagcggtaactgaagcctcccagaatcctggatccgggcccctagtaccctctttcccagggacccaggagtcctgcctccagtcgcctgcacttgtaactgagagctggagggtgcccagcttcatgagaccccggaatgggttggacagtcccatctgtctccgggtccttcagattggctgaaggaagagactgaagaatgaggcttaagttctcattggtgagatgggaatatgaaacagcatgtatttactaccagtgttgtggggagaaaaagaaaagaaaagaaaagaatggaaagtgcccagaaatgtgcctggtgcttaatagatctatttgcagcctggagacattggtgatgaaatcctggttagcggaggcatcggggccctggtgcggctaaagtctctccaaggtgacaagctggaagtcagcttgaaaaacaatgtggtgagtgtcaacaaggagcctgttgccgagcctgacatcatggccacaaatggcgtggtccatgtcatcaccaatgttctgcagcctccagccaacagacctcaggaaagaggggatgaacttgcagactctgcgcttgagatcttcaaacaagcatcagcgttttccagggcttcccagaggtctgtgcgactagcccctgtctatcaaaagttattagagaggatgaagcattagcttgaagcactacaggaggaatgcaccacggcagctctccgccaatttctctcagatttccacagagactgtttgaatgttttcaaaaccaagtatcacactttaatgtacatgggccgcaccataatgagatgtgagccttgtgcatgtgggggaggagggagagagatgtactttttaaatcatgttccccctaaacatggctgttaacccactgcatgcagaaacttggatgtcactgcctgacattcacttccagagaggacctatcccaaatgtggaattgactgcctatgccaagtccctggaaaaggagcttcagtattgtggggctcataaaacatgaatcaagcaatccagcctcatgggaagtcctggcacagtttttgtaaagcccttgcacagctggagaaatggcatcattataagctatgagttgaaatgttctgtcaaatgtgtctcacatctacacgtggcttggaggcttttatggggccctgtccaggtagaaaagaaatggtatgtagagcttagatttccctattgtgacagagccatggtgtgtttgtaataataaaaccaaagaaacata

SEQ ID NO: 456592 - DNA, 1260 bp, Homo sapiens
cgctccctcccgctcgcagcttacttaacctggcccgggcggcggaggcgctctcacttccctggagccgcccgcttgcccgtcggtcgctagctcgctcggtgcgcgtcgtcccgctccatggcgctcttcgtgcggctgctggctctcgccctggctctggccctgggccccgccgcgaccctggcgggtcccgccaagtcgccctaccagctggtgctgcagcacagcaggctccggggccgccagcacggccccaacgtgtgtgctgtgcagaaggttattggcactaataggaagtacttcaccaactgcaagcagtggtaccaaaggaaaatctgtggcaaatcaacagtcatcagctacgagtgctgtcctggatatgaaaaggtccctggggagaagggctgtccagcagccctaccactctcaaacctttacgagaccctgggagtcgttggatccaccaccactcagctgtacacggaccgcacggagaagctgaggcctgagatggaggggcccggcagcttcaccatcttcgcccctagcaacgaggcctgggcctccttgccagctgaagtgctggactccctggtcagcaatgtcaacattgagctgctcaatgccctccgctaccatatggtgggcaggcgagtcctgactgatgagctgaaacacggcatgaccctcacctctatgtaccagaattccaacatccagatccaccactatcctaatgggattgtaactgtgaactgtgcccggctgctgaaagccgaccaccatgcaaccaacggggtggtgcacctcatcgataaggtcatctccaccatcaccaacaacatccagcagatcattgagatcgaggacacctttgagacccttcgggctgctgtggctgcatcagggctcaacacgatgcttgaaggtaacggccagtacacgcttttggccccgaccaatgaggccttcgagaagatccctagtgagactttgaaccgtatcctgggcgacccagaagccctgagaggtgagcatcctttggctcctgctgctgcctcatttgtgcagctagattgagcccaagacctgctctggtccaagatgaacataccacctgccatgaggtgaccctcaggatatccactgcagccatgggctggggtcatcctgtcctgttgcttcagctaaccgtgtctctagcagccacactactctgagggctgactacagaatccagcagcttttgtctgggag

SEQ ID NO: 456593 - DNA, 781 bp, Homo sapiens
aagctagtgaccactgattacagaattgcgagctcaggtacccatttcgtgcaggtgctaaagggaattcagtgcatggtgctataggggatatcggtgcatggtgctcaagcgttttccagggcttcccagaggtctgtgcgactagcccctgtctatcaaaagttattagagaggatgaagcattagcttgaagcactacaggaggaatgcaccacggcagctctccgccaatttctctcagatttccacagagactgtttgaatgttttcaaaaccaagtatcacactttaatgtacatgggccgcaccataatgagatgtgagccttgtgcatgtgggggaggagggagagagatgtactttttaaatcatgttccccctaaacatggctgttaacccactgcatgcagaaacttggatgtcactgcctgacattcacttccagagaggacctatcccaaatgtggaattgactgcctatgccaagtccctggaaaaggagcttcagtattgtggggctcataaaacatgaatcaagcaatccagcctcatgggaagtcctggcacagtttttgtaaagcccttgcacagctggagaaatggcatcattataagctatgagttgaaatgttctgtcaaatgtgtctcacatctacacgtggcttggaggcttttatggggccctgtccaggtagaaaagaaatggtatgtagagcttagatttccctattgtgacagagccatggtgtgtttgtaataataaaaccaaagaaacata

SEQ ID NO: 456594 - DNA, 405 bp, Homo sapiens
caacaacatccagcagatcattgagatcgaggacacctttgagacccttcgggtaagggactgccctgggtggaggcccaggcttgggacacattgcctcccaagaggggcctagcaggaactcttctgcaggagaggtagaggatggctcctgtaggggaacatagagcaggttcccctgaatgcccttgaacatggagaattcattgaccagacattcagcttgacctaacctgtgaaattctccatcttctttataaagtgttcccttccttgcctcccctggaaaggtcagtggtgtgtggctgcagcagcacagtgtcctctgagccctggacctgcactgtggcttccagaggtggcagttcccacatggggtactagaataaatggcctatcaggctg

SEQ ID NO: 456595 - DNA, 2764 bp, Homo sapiens
cgctccctcccgctcgcagcttacttaacctggcccgggcggcggaggcgctctcacttccctggagccgcccgcttgcccgtcggtcgctagctcgctcggtgcgcgtcgtcccgctccatggcgctcttcgtgcggctgctggctctcgccctggctctggccctgggccccgccgcgaccctggcgggtcccgccaagtcgccctaccagctggtgctgcagcacagcaggctccggggccgccagcacggccccaacgtgtgtgctgtgcagaaggttattggcactaataggaagtacttcaccaactgcaagcagtggtaccaaaggaaaatctgtggcaaatcaacagtcatcagctacgagtgctgtcctggatatgaaaaggtccctggggagaagggctgtccagcagccctaccactctcaaacctttacgagaccctgggagtcgttggatccaccaccactcagctgtacacggaccgcacggagaagctgaggcctgagatggaggggcccggcagcttcaccatcttcgcccctagcaacgaggcctgggcctccttgccagctgaagtgctggactccctggtcagcaatgtcaacattgagctgctcaatgccctccgctaccatatggtgggcaggcgagtcctgactgatgagctgaaacacggcatgaccctcacctctatgtaccagaattccaacatccagatccaccactatcctaatgggattgtaactgtgaactgtgcccggctgctgaaagccgaccaccatgcaaccaacggggtggtgcacctcatcgataaggtcatctccaccatcaccaacaacatccagcagatcattgagatcgaggacacctttgagacccttcgggctgctgtggctgcatcagggctcaacacgatgcttgaaggtaacggccagtacacgcttttggccccgaccaatgaggccttcgagaagatccctagtgagactttgaaccgtatcctgggcgacccagaagccctgagagacctgctgaacaaccacatcttgaagtcagctatgtgtgctgaagccatcgttgcggggctgtctgtggagaccctggagggcacgacactggaggtgggctgcagcggggacatgctcactatcaacgggaaggcgatcatctccaataaagacatcctagccaccaacggggtgatccactacattgatgagctactcatcccagactcagccaagacactatttgaattggctgcagagtctgatgtgtccacagccattgaccttttcagacaagccggcctcggcaatcatctctctggaagtgagcggttgaccctcctggctcccctgaattctgtattcaaagatggaacccctccaattgatgcccatacaaggaatttgcttcggaaccacataattaaagaccagctggcctctaagtatctgtaccatggacagaccctggaaactctgggcggcaaaaaactgagagtttttgtttatcgtaatagcctctgcattgagaacagctgcatcgcggcccacgacaagagggggaggtacgggaccctgttcacgatggaccgggtgctgacccccccaatggggactgtcatggatgtcctgaagggagacaatcgctttagcatgctggtagctgccatccagtctgcaggactgacggagaccctcaaccgggaaggagtctacacagtcttcgctcccacaaatgaagccttccgagccctgccaccaagagaacggagcagactcttgggagatgccaaggaacttgccaacatcctgaaataccacattggtgatgaaatcctggttagcggaggcatcggggccctggtgcggctaaagtctctccaaggtgacaagctggaagtcagcttgaaaaacaatgtggtgagtgtcaacaaggagcctgttgccgagcctgacatcatggccacaaatggcgtggtccatgtcatcaccaatgttctgcagcctccagccaacagacctcaggaaagaggggatgaacttgcagactctgcgcttgagatcttcaaacaagcatcagcgttttccagggcttcccagaggtctgtgcgactagcccctgtctatcaaaagttattagagaggatgaagcattagcttgaagcactacaggaggaatgcaccacggcagctctccgccaatttctctcagatttccacagagactgtttgaatgttttcaaaaccaagtatcacactttaatgtacatgggccgcaccataatgagatgtgagccttgtgcatgtgggggaggagggagagagatgtactttttaaatcatgttccccctaaacatggctgttaacccactgcatgcagaaacttggatgtcactgcctgacattcacttccagagaggacctatcccaaatgtggaattgactgcctatgccaagtccctggaaaaggagcttcagtattgtggggctcataaaacatgaatcaagcaatccagcctcatgggaagtcctggcacagtttttgtaaagcccttgcacagctggagaaatggcatcattataagctatgagttgaaatgttctgtcaaatgtgtctcacatctacacgtggcttggaggcttttatggggccctgtccaggtagaaaagaaatggtatgtagagcttagatttccctattgtgacagagccatggtgtgtttgtaataataaaaccaaagaaacata

SEQ ID NO: 456596 - DNA, 3082 bp, Homo sapiens
  misc_feature (2805)..(2805): n is a, c, g, or t
cgctccctcccgctcgcagcttacttaacctggcccgggcggcggaggcgctctcacttccctggagccgcccgcttgcccgtcggtcgctagctcgctcggtgcgcgtcgtcccgctccatggcgctcttcgtgcggctgctggctctcgccctggctctggccctgggccccgccgcgaccctggcgggtcccgccaagtcgccctaccagctggtgctgcagcacagcaggctccggggccgccagcacggccccaacgtgtgtgctgtgcagaaggttattggcactaataggaagtacttcaccaactgcaagcagtggtaccaaaggaaaatctgtggcaaatcaacagtcatcagctacgagtgctgtcctggatatgaaaaggtccctggggagaagggctgtccagcagccctaccactctcaaacctttacgagaccctgggagtcgttggatccaccaccactcagctgtacacggaccgcacggagaagctgaggcctgagatggaggggcccggcagcttcaccatcttcgcccctagcaacgaggcctgggcctccttgccagctgaagtgctggactccctggtcagcaatgtcaacattgagctgctcaatgccctccgctaccatatggtgggcaggcgagtcctgactgatgagctgaaacacggcatgaccctcacctctatgtaccagaattccaacatccagatccaccactatcctaatgggattgtaactgtgaactgtgcccggctgctgaaagccgaccaccatgcaaccaacggggtggtgcacctcatcgataaggtcatctccaccatcaccaacaacatccagcagatcattgagatcgaggacacctttgagacccttcgggctgctgtggctgcatcagggctcaacacgatgcttgaaggtaacggccagtacacgcttttggccccgaccaatgaggccttcgagaagatccctagtgagactttgaaccgtatcctgggcgacccagaagccctgagagacctgctgaacaaccacatcttgaagtcagctatgtgtgctgaagccatcgttgcggggctgtctgtggagaccctggagggcacgacactggaggtgggctgcagcggggacatgctcactatcaacgggaaggcgatcatctccaataaagacatcctagccaccaacggggtgatccactacattgatgagctactcatcccagactcagccaagacactatttgaattggctgcagagtctgatgtgtccacagccattgaccttttcagacaagccggcctcggcaatcatctctctggaagtgagcggttgaccctcctggctcccctgaattctgtattcaaagatggaacccctccaattgatgcccatacaaggaatttgcttcggaaccacataattaaagaccagctggcctctaagtatctgtaccatggacagaccctggaaactctgggcggcaaaaaactgagagtttttgtttatcgtaatagcctctgcattgagaacagctgcatcgcggcccacgacaagagggggaggtacgggaccctgttcacgatggaccgggtgctgacccccccaatggggactgtcatggatgtcctgaagggagacaatcgctttagcatgctggtagctgccatccagtctgcaggactgacggagaccctcaaccgggaaggagtctacacagtcttcgctcccacaaatgaagccttccgagccctgccaccaagagaacggagcagactcttgggagatgccaaggaacttgccaacatcctgaaataccacattggtgatgaaatcctggttagcggaggcatcggggccctggtgcggctaaagtctctccaaggtgacaagctggaagtcagcttgaaaaacaatgtggtgagtgtcaacaaggagcctgttgccgagcctgacatcatggccacaaatggcgtggtccatgtcatcaccaatgttctgcagcctccagccaacagacctcaggaaagaggggatgaacttgcagactctgcgcttgagatcttcaaacaagcatcagcgttttccagggcttcccagaggtctgtgcgactagcccctgtctatcaaaagttattagagaggatgaagcattagcttgaagcactacaggaggaatgcaccacggcagctctccgccaatttctctcagatttccacagagactgtttgaatgttttcaaaaccaagtatcacactttaatgtacatgggccgcaccataatgagatgtgagccttgtgcatgtgggggaggagggagagagatgtactttttaaatcatgttccccctaaacatggctgttaacccactgcatgcagaaacttggatgtcactgcctgacattcacttccagagaggacctatcccaaatgtggaattgactgcctatgccaagtccctggaaaaggagcttcagtattgtggggctcataaaacatgaatcaagcaatccagcctcatgggaagtcctggcacagtttttgtaaagcccttgcacagctggagaaatggcatcattataagctatgagttgaaatgttctgtcaaatgtgtctcacatctacacgtggcttggaggcttttatggggccctgtccaggtagaaaagaaatggtatgtagagcttagatttccctattgtgacagagccatggtgtgtttgtaataataaaaccaaagaaacataaaaaaaaaaaaaaaaaaaaaaaaaaaaaaaaaaaaaaaaanaaaaaaaaaagggggggggggaaaaaattctccccgggggggcccattgggcgcgtgaaccacgagattttctgcgaacaaaaggggggcgccccaaagaaggaggcgcggcacaataataacgccgacggagccaggagggcgcacggacgttataaccaaggacggcgacgacggggggaacaatgtcgacccaggggagcaccctcgcgaggagaagaaccccatcaccaagggggggggcgcaaacatggtgggcgacacactcaccctgaga

SEQ ID NO: 456597 - DNA, 2963 bp, Homo sapiens
cgctccctcccgctcgcagcttacttaacctggcccgggcggcggaggcgctctcacttccctggagccgcccgcttgcccgtcggtcgctagctcgctcggtgcgcgtcgtcccgctccatggcgctcttcgtgcggctgctggctctcgccctggctctggccctgggccccgccgcgaccctggcgggtcccgccaagtcgccctaccagctggtgctgcagcacagcaggctccggggccgccagcacggccccaacgtgtgtgctgtgcagaaggttattggcactaataggaagtacttcaccaactgcaagcagtggtaccaaaggaaaatctgtggcaaatcaacagtcatcagctacgagtgctgtcctggatatgaaaaggtccctggggagaagggctgtccagcagccctaccactctcaaacctttacgagaccctgggagtcgttggatccaccaccactcagctgtacacggaccgcacggagaagctgaggcctgagatggaggggcccggcagcttcaccatcttcgcccctagcaacgaggcctgggcctccttgccagctgaagtgctggactccctggtcagcaatgtcaacattgagctgctcaatgccctccgctaccatatggtgggcaggcgagtcctgactgatgagctgaaacacggcatgaccctcacctctatgtaccagaattccaacatccagatccaccactatcctaatgggattgtaactgtgaactgtgcccggctgctgaaagccgaccaccatgcaaccaacggggtggtgcacctcatcgataaggtcatctccaccatcaccaacaacatccagcagatcattgagatcgaggacacctttgagacccttcgggctgctgtggctgcatcagggctcaacacgatgcttgaaggtaacggccagtacacgcttttggccccgaccaatgaggccttcgagaagatccctagtgagactttgaaccgtatcctgggcgacccagaagccctgagagacctgctgaacaaccacatcttgaagtcagctatgtgtgctgaagccatcgttgcggggctgtctgtggagaccctggagggcacgacactggaggtgggctgcagcggggacatgctcactatcaacgggaaggcgatcatctccaataaagacatcctagccaccaacggggtgatccactacattgatgagctactcatcccagactcagccaagacactatttgaattggctgcagagtctgatgtgtccacagccattgaccttttcagacaagccggcctcggcaatcatctctctggaagtgagcggttgaccctcctggctcccctgaattctgtattcaaagatggaacccctccaattgatgcccatacaaggaatttgcttcggaaccacataattaaagaccagctggcctctaagtatctgtaccatggacagaccctggaaactctgggcggcaaaaaactgagagtttttgtttatcgtaatagcctctgcattgagaacagctgcatcgcggcccacgacaagagggggaggtacgggaccctgttcacgatggaccgggtgctgacccccccaatggggactgtcatggatgtcctgaagggagacaatcgctttagcatgctggtagctgccatccagtctgcaggactgacggagaccctcaaccgggaaggagtctacacagtcttcgctcccacaaatgaagccttccgagccctgccaccaagagaacggagcagactcttgggagatgccaaggaacttgccaacatcctgaaataccacattggtgatgaaatcctggttagcggaggcatcggggccctggtgcggctaaagtctctccaaggtgacaagctggaagtcagcttgaaaaacaatgtggtgagtgtcaacaaggagcctgttgccgagcctgacatcatggccacaaatggcgtggtccatgtcatcaccaatgttctgcagcctccagccaacagacctcaggaaagaggggatgaacttgcagactctgcgcttgagatcttcaaacaagcatcagcgttttccagggcttcccagaggtctgtgcgactagcccctgtctatcaaaagttattagagaggatgaagcattagcttgaagcactacaggaggaatgcaccacggcagctctccgccaatttctctcagatttccacagagactgtttgaatgttttcaaaaccaagtatcacactttaatgtacatgggccgcaccataatgagatgtgagccttgtgcatgtgggggaggagggagagagatgtactttttaaatcatgttccccctaaacatggctgttaacccactgcatgcagaaacttggatgtcactgcctgacattcacttccagagaggacctatcccaaatgtggaattgactgcctatgccaagtccctggaaaaggagcttcagtattgtggggctcataaaacatgaatcaagcaatccagcctcatgggaagtcctggcacagtttttgtaaagcccttgcacagctggagaaatggcatcattataagctatgagttgaaatgttctgtcaaatgtgtctcacatctacacgtggcttggaggcttttatggggccctgtccaggtagaaaagaaatggtatgtagagcttagatttccctattgtgacagagccatggtgtgtttgtaataataaaaccaaagaaacataaaaaacaacaatacaacacacatataaaacaaacataaaaacaacaaaatacattgaaacaaacaaacacaaagaaaacaccaaaacaaaagaaaacaaacaagaacatagcacaataataaaaaataaacaaactcagctaataaagaccactcactcacctgctttgtacacaactaaggcgcacatactactcctt

SEQ ID NO: 456598 - DNA, 2805 bp, Homo sapiens
cgctccctcccgctcgcagcttacttaacctggcccgggcggcggaggcgctctcacttccctggagccgcccgcttgcccgtcggtcgctagctcgctcggtgcgcgtcgtcccgctccatggcgctcttcgtgcggctgctggctctcgccctggctctggccctgggccccgccgcgaccctggcgggtcccgccaagtcgccctaccagctggtgctgcagcacagcaggctccggggccgccagcacggccccaacgtgtgtgctgtgcagaaggttattggcactaataggaagtacttcaccaactgcaagcagtggtaccaaaggaaaatctgtggcaaatcaacagtcatcagctacgagtgctgtcctggatatgaaaaggtccctggggagaagggctgtccagcagccctaccactctcaaacctttacgagaccctgggagtcgttggatccaccaccactcagctgtacacggaccgcacggagaagctgaggcctgagatggaggggcccggcagcttcaccatcttcgcccctagcaacgaggcctgggcctccttgccagctgaagtgctggactccctggtcagcaatgtcaacattgagctgctcaatgccctccgctaccatatggtgggcaggcgagtcctgactgatgagctgaaacacggcatgaccctcacctctatgtaccagaattccaacatccagatccaccactatcctaatgggattgtaactgtgaactgtgcccggctgctgaaagccgaccaccatgcaaccaacggggtggtgcacctcatcgataaggtcatctccaccatcaccaacaacatccagcagatcattgagatcgaggacacctttgagacccttcgggctgctgtggctgcatcagggctcaacacgatgcttgaaggtaacggccagtacacgcttttggccccgaccaatgaggccttcgagaagatccctagtgagactttgaaccgtatcctgggcgacccagaagccctgagagacctgctgaacaaccacatcttgaagtcagctatgtgtgctgaagccatcgttgcggggctgtctgtggagaccctggagggcacgacactggaggtgggctgcagcggggacatgctcactatcaacgggaaggcgatcatctccaataaagacatcctagccaccaacggggtgatccactacattgatgagctactcatcccagactcagccaagacactatttgaattggctgcagagtctgatgtgtccacagccattgaccttttcagacaagccggcctcggcaatcatctctctggaagtgagcggttgaccctcctggctcccctgaattctgtattcaaaggagcacatctctctggacctaaccatcaccctttcttgtagatggaacccctccaattgatgcccatacaaggaatttgcttcggaaccacataattaaagaccagctggcctctaagtatctgtaccatggacagaccctggaaactctgggcggcaaaaaactgagagtttttgtttatcgtaatagcctctgcattgagaacagctgcatcgcggcccacgacaagagggggaggtacgggaccctgttcacgatggaccgggtgctgacccccccaatggggactgtcatggatgtcctgaagggagacaatcgctttagcatgctggtagctgccatccagtctgcaggactgacggagaccctcaaccgggaaggagtctacacagtcttcgctcccacaaatgaagccttccgagccctgccaccaagagaacggagcagactcttgggagatgccaaggaacttgccaacatcctgaaataccacattggtgatgaaatcctggttagcggaggcatcggggccctggtgcggctaaagtctctccaaggtgacaagctggaagtcagcttgaaaaacaatgtggtgagtgtcaacaaggagcctgttgccgagcctgacatcatggccacaaatggcgtggtccatgtcatcaccaatgttctgcagcctccagccaacagacctcaggaaagaggggatgaacttgcagactctgcgcttgagatcttcaaacaagcatcagcgttttccagggcttcccagaggtctgtgcgactagcccctgtctatcaaaagttattagagaggatgaagcattagcttgaagcactacaggaggaatgcaccacggcagctctccgccaatttctctcagatttccacagagactgtttgaatgttttcaaaaccaagtatcacactttaatgtacatgggccgcaccataatgagatgtgagccttgtgcatgtgggggaggagggagagagatgtactttttaaatcatgttccccctaaacatggctgttaacccactgcatgcagaaacttggatgtcactgcctgacattcacttccagagaggacctatcccaaatgtggaattgactgcctatgccaagtccctggaaaaggagcttcagtattgtggggctcataaaacatgaatcaagcaatccagcctcatgggaagtcctggcacagtttttgtaaagcccttgcacagctggagaaatggcatcattataagctatgagttgaaatgttctgtcaaatgtgtctcacatctacacgtggcttggaggcttttatggggccctgtccaggtagaaaagaaatggtatgtagagcttagatttccctattgtgacagagccatggtgtgtttgtaataataaaaccaaagaaacata

SEQ ID NO: 456599 - DNA, 2762 bp, Homo sapiens
cgctccctcccgctcgcagcttacttaacctggcccgggcggcggaggcgctctcacttccctggagccgcccgcttgcccgtcggtcgctagctcgctcggtgcgcgtcgtcccgctccatggcgctcttcgtgcggctgctggctctcgccctggctctggccctgggccccgccgcgaccctggcgggtcccgccaagtcgccctaccagctggtgctgcagcacagcaggctccggggccgccagcacggccccaacgtgtgtgctgtgcagaaggttattggcactaataggaagtacttcaccaactgcaagcagtggtaccaaaggaaaatctgtggcaaatcaacagtcatcagctacgagtgctgtcctggatatgaaaaggtccctggggagaagggctgtccagcagccctaccactctcaaacctttacgagaccctgggagtcgttggatccaccaccactcagctgtacacggaccgcacggagaagctgaggcctgagatggaggggcccggcagcttcaccatcttcgcccctagcaacgaggcctgggcctccttgccagctgaagtgctggactccctggtcagcaatgtcaacattgagctgctcaatgccctccgctaccatatggtgggcaggcgagtcctgactgatgagctgaaacacggcatgaccctcacctctatgtaccagaattccaacatccagatccaccactatcctaatgggattgtaactgtgaactgtgcccggctgctgaaagccgaccaccatgcaaccaacggggtggtgcacctcatcgataaggtcatctccaccatcaccaacaacatccagcagatcattgagatcgaggacacctttgagacccttcgggctgctgtggctgcatcagggctcaacacgatgcttgaaggtaacggccagtacacgcttttggccccgaccaatgaggccttcgagaagatccctagtgagactttgaaccgtatcctgggcgacccagaagccctgagagacctgctgaacaaccacatcttgaagtcagctatgtgtgctgaagccatcgttgcggggctgtctgtggagaccctggagggcacgacactggaggtgggctgcagcggggacatgctcactatcaacgggaaggcgatcatctccaataaagacatcctagccaccaacggggtgatccactacattgatgagctactcatcccagactcagccaagacactatttgaattggctgcagagtctgatgtgtccacagccattgaccttttcagacaagccggcctcggcaatcatctctctggaagtgagcggttgaccctcctggctcccctgaattctgtattcaaagatggaacccctccaattgatgcccatacaaggaatttgcttcggaaccacataattaaagaccagctggcctctaagtatctgtaccatggacagaccctggaaactctgggcggcaaaaaactgagagtttttgtttatcgtaatagcctctgcattgagaacagctgcatcgcggcccacgacaagagggggaggtacgggaccctgttcacgatggaccgggtgctgacccccccaatggggactgtcatggatgtcctgaagggagacaatcgctttagcatgctggtagctgccatccagtctgcaggactgacggagaccctcaaccgggaaggagtctacacagtcttcgctcccacaaatgaagccttccgagccctgccaccaagagaacggagcagactcttgggagatgccaaggaacttgccaacatcctgaaataccacattggtgatgaaatcctggttagcggaggcatcggggccctggtgcggctaaagtctctccaaggtgacaagctggaagtcagcttgaaaaacaatgtggtgagtgtcaacaaggagcctgttgccgagcctgacatcatggccacaaatggcgtggtccatgtcatcaccaatgttctgcagcctccagccaacagacctcaggaaagaggggatgaacttgcagactctgcgcttgagatcttcaaacaagcatcagcgttttccagggttaccaacttctctttttcagccccctgtctatcaaaagttattagagaggatgaagcattagcttgaagcactacaggaggaatgcaccacggcagctctccgccaatttctctcagatttccacagagactgtttgaatgttttcaaaaccaagtatcacactttaatgtacatgggccgcaccataatgagatgtgagccttgtgcatgtgggggaggagggagagagatgtactttttaaatcatgttccccctaaacatggctgttaacccactgcatgcagaaacttggatgtcactgcctgacattcacttccagagaggacctatcccaaatgtggaattgactgcctatgccaagtccctggaaaaggagcttcagtattgtggggctcataaaacatgaatcaagcaatccagcctcatgggaagtcctggcacagtttttgtaaagcccttgcacagctggagaaatggcatcattataagctatgagttgaaatgttctgtcaaatgtgtctcacatctacacgtggcttggaggcttttatggggccctgtccaggtagaaaagaaatggtatgtagagcttagatttccctattgtgacagagccatggtgtgtttgtaataataaaaccaaagaaacata

SEQ ID NO: 456600 - DNA, 3119 bp, Homo sapiens
cgctccctcccgctcgcagcttacttaacctggcccgggcggcggaggcgctctcacttccctggagccgcccgcttgcccgtcggtcgctagctcgctcggtgcgcgtcgtcccgctccatggcgctcttcgtgcggctgctggctctcgccctggctctggccctgggccccgccgcgaccctggcgggtcccgccaagtcgccctaccagctggtgctgcagcacagcaggctccggggccgccagcacggccccaacgtgtgtgctgtgcagaaggttattggcactaataggaagtacttcaccaactgcaagcagtggtaccaaaggaaaatctgtggcaaatcaacagtcatcagctacgagtgctgtcctggatatgaaaaggtccctggggagaagggctgtccagcagccctaccactctcaaacctttacgagaccctgggagtcgttggatccaccaccactcagctgtacacggaccgcacggagaagctgaggcctgagatggaggggcccggcagcttcaccatcttcgcccctagcaacgaggcctgggcctccttgccagctgtgagatgacctccgtctgcccgggggactcttatggggaactgccttacttccccgaggggtgggcatgatgaatgggagtctgcagtcatttcctactgtttcaggaagctttctccttaaccccttagaaaaggctgtggaacttgagctaaaatatgtcttaccaggttgcgtctaatgccccccgttccctactgggcagaaagacttgggtgcttcctgaggagggatccttggcagaagagaggcctgggctcacgagggctgagaacatgtttcccagagttgcaaggacccatctcttaaacacagagtctgcagcccctaactgacaccctgtccttcctcctaggaagtgctggactccctggtcagcaatgtcaacattgagctgctcaatgccctccgctaccatatggtgggcaggcgagtcctgactgatgagctgaaacacggcatgaccctcacctctatgtaccagaattccaacatccagatccaccactatcctaatgggattgtaactgtgaactgtgcccggctgctgaaagccgaccaccatgcaaccaacggggtggtgcacctcatcgataaggtcatctccaccatcaccaacaacatccagcagatcattgagatcgaggacacctttgagacccttcgggctgctgtggctgcatcagggctcaacacgatgcttgaaggtaacggccagtacacgcttttggccccgaccaatgaggccttcgagaagatccctagtgagactttgaaccgtatcctgggcgacccagaagccctgagagacctgctgaacaaccacatcttgaagtcagctatgtgtgctgaagccatcgttgcggggctgtctgtggagaccctggagggcacgacactggaggtgggctgcagcggggacatgctcactatcaacgggaaggcgatcatctccaataaagacatcctagccaccaacggggtgatccactacattgatgagctactcatcccagactcagccaagacactatttgaattggctgcagagtctgatgtgtccacagccattgaccttttcagacaagccggcctcggcaatcatctctctggaagtgagcggttgaccctcctggctcccctgaattctgtattcaaagatggaacccctccaattgatgcccatacaaggaatttgcttcggaaccacataattaaagaccagctggcctctaagtatctgtaccatggacagaccctggaaactctgggcggcaaaaaactgagagtttttgtttatcgtaatagcctctgcattgagaacagctgcatcgcggcccacgacaagagggggaggtacgggaccctgttcacgatggaccgggtgctgacccccccaatggggactgtcatggatgtcctgaagggagacaatcgctttagcatgctggtagctgccatccagtctgcaggactgacggagaccctcaaccgggaaggagtctacacagtcttcgctcccacaaatgaagccttccgagccctgccaccaagagaacggagcagactcttgggagatgccaaggaacttgccaacatcctgaaataccacattggtgatgaaatcctggttagcggaggcatcggggccctggtgcggctaaagtctctccaaggtgacaagctggaagtcagcttgaaaaacaatgtggtgagtgtcaacaaggagcctgttgccgagcctgacatcatggccacaaatggcgtggtccatgtcatcaccaatgttctgcagcctccagccaacagacctcaggaaagaggggatgaacttgcagactctgcgcttgagatcttcaaacaagcatcagcgttttccagggcttcccagaggtctgtgcgactagcccctgtctatcaaaagttattagagaggatgaagcattagcttgaagcactacaggaggaatgcaccacggcagctctccgccaatttctctcagatttccacagagactgtttgaatgttttcaaaaccaagtatcacactttaatgtacatgggccgcaccataatgagatgtgagccttgtgcatgtgggggaggagggagagagatgtactttttaaatcatgttccccctaaacatggctgttaacccactgcatgcagaaacttggatgtcactgcctgacattcacttccagagaggacctatcccaaatgtggaattgactgcctatgccaagtccctggaaaaggagcttcagtattgtggggctcataaaacatgaatcaagcaatccagcctcatgggaagtcctggcacagtttttgtaaagcccttgcacagctggagaaatggcatcattataagctatgagttgaaatgttctgtcaaatgtgtctcacatctacacgtggcttggaggcttttatggggccctgtccaggtagaaaagaaatggtatgtagagcttagatttccctattgtgacagagccatggtgtgtttgtaataataaaaccaaagaaacata

SEQ ID NO: 456601 - DNA, 2067 bp, Homo sapiens
ggcaggtacgaggctgggtggtaatcggccgaggctatcctaatgggattgtaactgtgaactgtgcccggctgctgaaagccgaccaccatgcaaccaacggggtggtgcacctcatcgataaggtcatctccaccatcaccaacaacatccagcagatcattgagatcgaggacacctttgagacccttcgggctgctgtggctgcatcagggctcaacacgatgcttgaaggtaacggccagtacacgcttttggccccgaccaatgaggccttcgagaagatccctagtgagactttgaaccgtatcctgggcgacccagaagccctgagagacctgctgaacaaccacatcttgaagtcagctatgtgtgctgaagccatcgttgcggggctgtctgtggagaccctggagggcacgacactggaggtgggctgcagcggggacatgctcactatcaacgggaaggcgatcatctccaataaagacatcctagccaccaacggggtgatccactacattgatgagctactcatcccagactcagccaagacactatttgaattggctgcagagtctgatgtgtccacagccattgaccttttcagacaagccggcctcggcaatcatctctctggaagtgagcggttgaccctcctggctcccctgaattctgtattcaaagatggaacccctccaattgatgcccatacaaggaatttgcttcggaaccacataattaaagaccagctggcctctaagtatctgtaccatggacagaccctggaaactctgggcggcaaaaaactgagagtttttgtttatcgtaatagcctctgcattgagaacagctgcatcgcggcccacgacaagagggggaggtacgggaccctgttcacgatggaccgggtgctgacccccccaatggggactgtcatggatgtcctgaagggagacaatcgctttagcatgctggtagctgccatccagtctgcaggactgacggagaccctcaaccgggaaggagtctacacagtcttcgctcccacaaatgaagccttccgagccctgccaccaagagaacggagcagactcttgggagatgccaaggaacttgccaacatcctgaaataccacattggtgatgaaatcctggttagcggaggcatcggggccctggtgcggctaaagtctctccaaggtgacaagctggaagtcagcttgaaaaacaatgtggtgagtgtcaacaaggagcctgttgccgagcctgacatcatggccacaaatggcgtggtccatgtcatcaccaatgttctgcagcctccagccaacagacctcaggaaagaggggatgaacttgcagactctgcgcttgagatcttcaaacaagcatcagcgttttccagggcttcccagaggtctgtgcgactagcccctgtctatcaaaagttattagagaggatgaagcattagcttgaagcactacaggaggaatgcaccacggcagctctccgccaatttctctcagatttccacagagactgtttgaatgttttcaaaaccaagtatcacactttaatgtacatgggccgcaccataatgagatgtgagccttgtgcatgtgggggaggagggagagagatgtactttttaaatcatgttccccctaaacatggctgttaacccactgcatgcagaaacttggatgtcactgcctgacattcacttccagagaggacctatcccaaatgtggaattgactgcctatgccaagtccctggaaaaggagcttcagtattgtggggctcataaaacatgaatcaagcaatccagcctcatgggaagtcctggcacagtttttgtaaagcccttgcacagctggagaaatggcatcattataagctatgagttgaaatgttctgtcaaatgtgtctcacatctacacgtggcttggaggcttttatggggccctgtccaggtagaaaagaaatggtatgtagagcttagatttccctattgtgacagagccatggtgtgtttgtaataataaaaccaaagaaacata

SEQ ID NO: 456602 - DNA, 2581 bp, Homo sapiens
cgctccctcccgctcgcagcttacttaacctggcccgggcggcggaggcgctctcacttccctggagccgcccgcttgcccgtcggtcgctagctcgctcggtgcgcgtcgtcccgctccatggcgctcttcgtgcggctgctggctctcgccctggctctggccctgggccccgccgcgaccctggcgggtcccgccaagtcgccctaccagctggtgctgcagcacagcaggctccggggccgccagcacggccccaacgtgtgtgctgtgcagaaggttattggcactaataggaagtacttcaccaactgcaagcagtggtaccaaaggaaaatctgtggcaaatcaacagtcatcagctacgagtgctgtcctggatatgaaaaggtccctggggagaagggctgtccagcagccctaccactctcaaacctttacgagaccctgggagtcgttggatccaccaccactcagctgtacacggaccgcacggagaagctgaggcctgagatggaggggcccggcagcttcaccatcttcgcccctagcaacgaggcctgggcctccttgccagctgaagtgctggactccctggtcagcaatgtcaacattgagctgctcaatgccctccgctaccatatggtgggcaggcgagtcctgactgatgagctgaaacacggcatgaccctcacctctatgtaccagaattccaacatccagatccaccactatcctaatgggattgtaactgtgaactgtgcccggctgctgaaagccgaccaccatgcaaccaacggggtggtgcacctcatcgataaggtcatctccaccatcaccaacaacatccagcagatcattgagatcgaggacacctttgagacccttcgggctgctgtggctgcatcagggctcaacacgatgcttgaaggtaacggccagtacacgcttttggccccgaccaatgaggccttcgagaagatccctagtgagactttgaaccgtatcctgggcgacccagaagccctgagagacctgctgaacaaccacatcttgaagtcagctatgtgtgctgaagccatcgttgcggggctgtctgtggagaccctggagggcacgacactggaggtgggctgcagcggggacatgctcactatcaacgggaaggcgatcatctccaataaagacatcctagccaccaacggggtgatccactacattgatgagctactcatcccagactcagccaagacactatttgaattggctgcagagtctgatgtgtccacagccattgaccttttcagacaagccggcctcggcaatcatctctctggaagtgagcggttgaccctcctggctcccctgaattctgtattcaaagatggaacccctccaattgatgcccatacaaggaatttgcttcggaaccacataattaaagaccagctggcctctaagtatctgtaccatggacagaccctggaaactctgggcggcaaaaaactgagagtttttgtttatcgtaatagcctctgcattgagaacagctgcatcgcggcccacgacaagagggggaggtacgggaccctgttcacgatggaccgggtgctgacccccccaatggggactgtcatggatgtcctgaagggagacaatcgctttagcatgctggtagctgccatccagtctgcaggactgacggagaccctcaaccgggaaggagtctacacagtcttcgctcccacaaatgaagccttccgagccctgccaccaagagaacggagcagactcttgggagatgccaaggaacttgccaacatcctgaaataccacattggtgatgaaatcctggttagcggaggcatcggggccctggtgcggctaaagtctctccaaggtgacaagctggaagtcagcttgaaaaacaatgtggtgagtgtcaacaaggagcctgttgccgagcctgacatcatggccacaaatggcgtggtccatgtcatcaccaatgttctgcagcctccaggtaagtgtcgcatccccactgactctgcagccagtccttttcttcatgtggcagttggtggagagaagaaaaactgttctaaacaatgatgagaataacatgtaattgtgatagttaaactgtgcctatgtgactgattgcagagtgaattgggagctgttggttttgaatgcaccacactaaggaatgtgaggacacattgctctttgcggagttgcccagctatattagctcccctcggacacagcccagttttctgtattcgcgtggatgctgtccgcgcgattcccagcactcctcttacagcatctcacctcagtgtatgttccttgcctccagtgcagttgaacctcagtcctgcctctcctcatgtgtgcattcacctttcttggtgctctctccccatgggccaagttctaccatgagttatgaaacattatggagaaaacatgtctttggaaatgtgagccagaaagcccaccagtgcccctcagtcacggttgttatgaatgacatgctaatggtttcactctggtcaaacctgccttttctttc

SEQ ID NO: 456603 - DNA, 2625 bp, Homo sapiens
cgctccctcccgctcgcagcttacttaacctggcccgggcggcggaggcgctctcacttccctggagccgcccgcttgcccgtcggtcgctagctcgctcggtgcgcgtcgtcccgctccatggcgctcttcgtgcggctgctggctctcgccctggctctggccctgggccccgccgcgaccctggcgggtcccgccaagtcgccctaccagctggtgctgcagcacagcaggctccggggccgccagcacggccccaacgtgtgtgctgtgcagaaggttattggcactaataggaagtacttcaccaactgcaagcagtggtaccaaaggaaaatctgtggcaaatcaacagtcatcagctacgagtgctgtcctggatatgaaaaggtccctggggagaagggctgtccagcagccctaccactctcaaacctttacgagaccctgggagtcgttggatccaccaccactcagctgtacacggaccgcacggagaagctgaggcctgagatggaggggcccggcagcttcaccatcttcgcccctagcaacgaggcctgggcctccttgccagctgaagtgctggactccctggtcagcaatgtcaacattgagctgctcaatgccctccgctaccatatggtgggcaggcgagtcctgactgatgagctgaaacacggcatgaccctcacctctatgtaccagaattccaacatccagatccaccactatcctaatgggattgtaactgtgaactgtgcccggctgctgaaagccgaccaccatgcaaccaacggggtggtgcacctcatcgataaggtcatctccaccatcaccaacaacatccagcagatcattgagatcgaggacacctttgagacccttcgggctgctgtggctgcatcagggctcaacacgatgcttgaaggtaacggccagtacacgcttttggccccgaccaatgaggccttcgagaagatccctagtgagactttgaaccgtatcctgggcgacccagaagccctgagagacctgctgaacaaccacatcttgaagtcagctatgtgtgctgaagccatcgttgcggggctgtctgtggagaccctggagggcacgacactggaggtgggctgcagcggggacatgctcactatcaacgggaaggcgatcatctccaataaagacatcctagccaccaacggggtgatccactacattgatgagctactcatcccagactcagccaagacactatttgaattggctgcagagtctgatgtgtccacagccattgaccttttcagacaagccggcctcggcaatcatctctctggaagtgagcggttgaccctcctggctcccctgaattctgtattcaaagatggaacccctccaattgatgcccatacaaggaatttgcttcggaaccacataattaaagaccagctggcctctaagtatctgtaccatggacagaccctggaaactctgggcggcaaaaaactgagagtttttgtttatcgtaatagcctctgcattgagaacagctgcatcgcggcccacgacaagagggggaggtacgggaccctgttcacgatggaccgggtgctgacccccccaatggggactgtcatggattcctggcacagtttttgtaaagcccttgcacagctggagaaatggcatcattataagctatgagttgaaatgttctgtcaaatgtgtctcacatctacacgtggcttggaggcttttatggggccctgtccaggtagaaaagaaatggtatgtagagcttagatttccctattgtgacagagccatggtgtgtttgtaataataaaaccaaagaaacataaagaacacaatagagagaaaaaatgcgagggactctatagagttccgagggtgcgcgaacaacagccaggtaggtgcaacacggggcacacgtggcttcactcatgcgagttttccgtcgaaccacagattaccctaggtcttcaccaacagccgggacacaactctgagcgcggtttctccccctatcctatgcgtccgcaagtccgcacctagcagacttgtcagcaatataacacagcgcgcatgggcacaccccgtgttgccaatctcaatgtgagaaacttcggcgcgacacagtagccctccctccagaccatacaccccccaactgagagagcgccgcaccgagcagacctccctcccacatcgcagacgaacgccgagaagaaccaaatcagacaactagaaacccgcataaaccgctacaaacataggtagcacacaacaaactaacacaaatacacaatcctaacaaaaaccaacacccccaactaaaactccgctcaaccctagggcgaaaaagaggccaaaaccaatagcatgcaaagccacgcatgacacccacgacatcccactgcaacaaacgacagaaccctataactaaagtacaaaagcaccaaccacaagaagacctcagaacgaaaaccatacaaactcatgaccaacacagcgccccaaacctaaccgacagacaacagaaacagcaaagcaaacacaaaaccaatcaccaaacaagccaaatacaaacgcacgcgaaacgca

SEQ ID NO: 456604 - DNA, 1477 bp, Homo sapiens
cgctccctcccgctcgcagcttacttaacctggcccgggcggcggaggcgctctcacttccctggagccgcccgcttgcccgtcggtcgctagctcgctcggtgcgcgtcgtcccgctccatggcgctcttcgtgcggctgctggctctcgccctggctctggccctgggccccgccgcgaccctggcgggtcccgccaagtcgccctaccagctggtgctgcagcacagcaggctccggggccgccagcacggccccaacgtgtgtgctgtgcagaaggttattggcactaataggaagtacttcaccaactgcaagcagtggtaccaaaggaaaatctgtggcaaatcaacagtcatcagctacgagtgctgtcctggatatgaaaaggtccctggggagaagggctgtccagcagccctaccactctcaaacctttacgagaccctgggagtcgttggatccaccaccactcagctgtacacggaccgcacggagaagctgaggcctgagatggaggggcccggcagcttcaccatcttcgcccctagcaacgaggcctgggcctccttgccagctgaagtgctggactccctggtcagcaatgtcaacattgagctgctcaatgccctccgctaccatatggtgggcaggcgagtcctgactgatgagctgaaacacggcatgaccctcacctctatgtaccagaattccaacatccagatccaccactatcctaatgggattgtaactgtgaactgtgcccggctgctgaaagccgaccaccatgcaaccaacggggtggtgcacctcatcgataaggtcatctccaccatcaccaacaacatccagcagatcattgagatcgaggacacctttgagacccttcgggctgctgtggctgcatcagggctcaacacgatgcttgaaggtaacggccagtacacgcttttggccccgaccaatgaggccttcgagaagatccctagtgagactttgaaccgtatcctgggcgacccagaagccctgagagacctgctgaacaaccacatcttgaagtcagctatgtgtgctgaagccatcgttgcggggctgtctgtggagaccctggagggcacgacactggaggtgggctgcagcggggacatgctcactatcaacgggaaggcgatcatctccaataaagacatcctagccaccaacggggtgatccactacattgatgagctactcatcccagactcagccaagacactatttgaattggctgcagagtctgatgtgtccacagccattgaccttttcagacaagccggcctcggcaatcatctctctggaagtgagcggttgaccctcctggctcccctgaattctgtattcaaagcgatccgaagatggacccacgctacagatggactttcaggaatccgcgatgggatcacaatctacagacagacagcgctcggtgagtaattgt

SEQ ID NO: 456605 - DNA, 813 bp, Homo sapiens
  misc_feature (29)..(29): n is a, c, g, or t
  misc_feature (32)..(33): n is a, c, g, or t
  misc_feature (795)..(795): n is a, c, g, or t
cagaggataagtgtaaaagggtgtaattngtnnatataggctaggtacgaggcgggtgtgaatcggccgagggcgctgatgggaggatggacatactggtgtctgagtgctccgcgcggctgctgcagcaggaagaagagattaaatctctgactgctgaaattgaccggttgaaaaactgtggctgtttaggagcttctccaaatttggagcagttacaagaagaaaatttaaaattaaagtatcgactgaatattcttcgaaagagtcttcaggcagaaaggaacaaaccaactaaaaatatgattaacattattagccgcctacaagaggtctttggtcatgcaattaaggctgcatatccagatttggaaaatcctcctctgctagtgacaccaagtcagcaggccaagtttggggactatcagtgtaatagtgctatgggtatttctcagatgctcaaaaccaaggaacagaaagttaatccaagagaaattgctgaaaacattaccaaacacctcccagacaatgaatgtattgaaaaagttgaaattgctggtcctggttttattaatgtccacttaagaaaggattttgtatcagaacaattgaccagtcttctagtgaatggagttcaactacctgctctgggagagaataaaaaggttatagttgacttttcctcccctaatatagctaaagagatgcatgtaggccacctgaggtcaactatcataggagagagtataagccgcctctttgaatttgcagggtatgacgtgctcaggttttttnaaaaaaaaaaattttctc

SEQ ID NO: 456606 - DNA, 837 bp, Homo sapiens
tgaccgtttccgcttccgtccacttggcgagtgagacgctgatgggaggatggacatactggtgtctgagtgctccgcgcggctgctgcagcaggaagaagagattaaatctctgactgctgaaattgaccggttgaaaaactgtggctgtttaggagcttctccaaatttggagcagttacaagaagaaaatttaaaattaaagtatcgactgaatattcttcgaaagagtcttcaggcagaaaggaacaaaccaactaaaaatatgattaacattattagccgcctacaagaggtctttggtcatgcaattaaggctgcatatccagatttggaaaatcctcctctgctagtgacaccaagtcagcaggccaagtttggggactatcagtgtaatagtgctatgggtatttctcagatgctcaaaaccaaggaacagaaagttaatccaagagaaattgctgaaaacattaccaaacacctcccagacaatgaatgtattgaaaaagttgaaattgctggtcctggttttattaatgtccacttaagaaaggattttgtatcagaacaattgaccagtcttctagtgaatggagttcaactacctgctctgggagagaataaaaaggtatatgtacactcttctattaatatattagtatcttagaactgcgtggaaccaagcatggtggtatgtgcctatagtctcagctacttgggaggctgaagcaggaggattgcttgagcctagaagttcaaggctgaggtgtgctgtgatcgcacctgtgaatagctactgcacttcaacctgggcagtatcatgagacttcatctcta

SEQ ID NO: 456607 - DNA, 452 bp, Homo sapiens
cagcttaagtcaaggccacaactggtattggaatccggaagaattttgccagagccaggtcagtgtctggagcaaatccttaggagcgagtgattattcaagataagacagtatctgatattttttctcttctatccattaggttttattaatgtccacttaagaaaggattttgtatcagaacaattgaccagtcttctagtgaatggagttcaactacctgctctgggagagaataaaaaggtatatgtacactcttctattaatatattagtatcttagaactgcgtggaaccaagcatggtggtatgtgcctatagtctcagctacttgggaggctgaagcaggaggattgcttgagcctagaagttcaaggctgaggtgtgctgtgatcgcacctgtgaatagctactgcacttcaacctgggcagtatcatgagacttcatctcta

SEQ ID NO: 456608 - DNA, 2185 bp, Homo sapiens
  misc_feature (29)..(29): n is a, c, g, or t
  misc_feature (32)..(33): n is a, c, g, or t
cagaggataagtgtaaaagggtgtaattngtnnatataggctaggtacgaggcgggtgtgaatcggccgagggcgctgatgggaggatggacatactggtgtctgagtgctccgcgcggctgctgcagcaggaagaagagattaaatctctgactgctgaaattgaccggttgaaaaactgtggctgtttaggagcttctccaaatttggagcagttacaagaagaaaatttaaaattaaagtatcgactgaatattcttcgaaagagtcttcaggcagaaaggaacaaaccaactaaaaatatgattaacattattagccgcctacaagaggtctttggtcatgcaattaaggctgcatatccagatttggaaaatcctcctctgctagtgacaccaagtcagcaggccaagtttggggactatcagtgtaatagtgctatgggtatttctcagatgctcaaaaccaaggaacagaaagttaatccaagagaaattgctgaaaacattaccaaacacctcccagacaatgaatgtattgaaaaagttgaaattgctggtcctggttttattaatgtccacttaagaaaggattttgtatcagaacaattgaccagtcttctagtgaatggagttcaactacctgctctgggagagaataaaaaggttatagttgacttttcctcccctaatatagctaaagagatgcatgtaggccacctgaggtcaactatcataggagagagtataagccgcctctttgaatttgcagggtatgacgtgctcaggttaaatcatgtaggagactgggggacccagtttggcatgctcatcgctcacctgcaagacaaatttccagattatctaacagtttcacctcctattggggatcttcaggtcttttataaggaatctaagaagaggtttgatactgaggaggaatttaagaagcgagcatatcagtgtgtagttctgctccagggtaaaaacccagatattacaaaagcttggaagcttatctgtgatgtctcccgccaagagttaaataaaatctatgatgcattggacgtctctttaatagagagaggggaatccttctatcaagataggatgaatgatattgtaaaggaatttgaagatagaggatttgtgcaggtggatgatggcagaaagattgtatttgtcccagggtgttccataccattaaccatagtaaaatcagatggaggttatacctatgatacatctgacctggctgctattaaacaaagactatttgaggaaaaagcagatatgattatctatgttgtggacaatggacaatctgtgcacttccagacaatatttgctgctgctcaaatgattggttggtatgaccctaaagtaactcgagtcttccatgctggatttggtgtggtgctaggggaagacaagaaaaagtttaaaacacgttcgggtgaaacagtgcgcctcatggatcttctgggagaaggactaaaacgatccatggacaagttgaaggaaaaagaaagagacaaggtcttaactgcagaggaattgaatgctgctcagacatccgttgcatatggctgcatcaaatatgctgacctttcccataaccggttgaatgactacatcttctcctttgacaaaatgctagatgacagaggaaatacagctgcttacttgttgtatgccttcactagaatcaggtctattgcacgtctggccaatattgatgaagaaatgctccaaaaagctgctcgagaaaccaagattcttttggatcatgagaaggaatggaaactaggccggtgcattttacggttccctgagattctgcaaaagattttagatgacttatttctccacactctctgtgattatatatatgagctggcaactgctttcacagagttctatgatagctgctactgtgtggagaaagatagacagactggaaaaatattgaaggtgaacatgtggcgtatgctgctatgtgaagcagtagctgctgtcatggccaaggggtttgatatcctgggaataaaacctgtccaaaggatgtaatccttcataggtttgaacactgtgtgtttttaccaaagtggccattggcactgtttgcttttttacaatcatgtggacacaagcataagtaaagaaaatttgtcaaccaggaaaaa

SEQ ID NO: 456609 - DNA, 2143 bp, Homo sapiens
agttacggctaggtacgaggctgggtggtggcgctgatgggaggatggacatactggtgtctgagtgctccgcgcggctgctgcagcaggaagaagagattaaatctctgactgctgaaattgaccggttgaaaaactgtggctgtttaggagcttctccaaatttggagcagttacaagaagaaaatttaaaattaaagtatcgactgaatattcttcgaaagagtcttcaggcagaaaggaacaaaccaactaaaaatatgattaacattattagccgcctacaagaggtctttggtcatgcaattaaggctgcatatccagatttggaaaatcctcctctgctagtgacaccaagtcagcaggccaagtttggggactatcagtgtaatagtgctatgggtatttctcagatgctcaaaaccaaggaacagaaagttaatccaagagaaattgctgaaaacattaccaaacacctcccagacaatgaatgtattgaaaaagttgaaattgctggtcctggttttattaatgtccacttaagaaaggattttgtatcagaacaattgaccagtcttctagtgaatggagttcaactacctgctctgggagagaataaaaaggttatagttgacttttcctcccctaatatagctaaagagatgcatgtaggccacctgaggtcaactatcataggagagagtataagccgcctctttgaatttgcagggtatgacgtgctcaggttaaatcatgtaggagactgggggacccagtttggcatgctcatcgctcacctgcaagacaaatttccagattatctaacagtttcacctcctattggggatcttcaggtcttttataaggaatctaagaagaggtttgatactgaggaggaatttaagaagcgagcatatcagtgtgtagttctgctccagggtaaaaacccagatattacaaaagcttggaagcttatctgtgatgtctcccgccaagagttaaataaaatctatgatgcattggacgtctctttaatagagagaggggaatccttctatcaagataggatgaatgatattgtaaaggaatttgaagatagaggatttgtgcaggtggatgatggcagaaagattgtatttgtcccagggtgttccataccattaaccatagtaaaatcagatggaggttatacctatgatacatctgacctggctgctattaaacaaagactatttgaggaaaaagcagatatgattatctatgttgtggacaatggacaatctgtgcacttccagacaatatttgctgctgctcaaatgattggttggtatgaccctaaagtaactcgagtcttccatgctggatttggtgtggtgctaggggaagacaagaaaaagtttaaaacacgttcgggtgaaacagtgcgcctcatggatcttctgggagaaggactaaaacgatccatggacaagttgaaggaaaaagaaagagacaaggtcttaactgcagaggaattgaatgctgctcagacatccgttgcatatggctgcatcaaatatgctgacctttcccataaccggttgaatgactacatcttctcctttgacaaaatgctagatgacagaggaaatacagctgcttacttgttgtatgccttcactagaatcaggtctattgcacgtctggccaatattgatgaagaaatgctccaaaaagctgctcgagaaaccaagattcttttggatcatgagaaggaatggaaactaggccggtgcattttacggttccctgagattctgcaaaagattttagatgacttatttctccacactctctgtgattatatatatgagctggcaactgctttcacagagttctatgatagctgctactgtgtggagaaagatagacagactggaaaaatattgaaggtgaacatgtggcgtatgctgctatgtgaagcagtagctgctgtcatggccaaggggtttgatatcctgggaataaaacctgtccaaaggatgtaatccttcataggtttgaacactgtgtgtttttaccaaagtggccattggcactgtttgcttttttacaatcatgtggacacaagcataagtaaagaaaatttgtcaaccaggaaaaa

SEQ ID NO: 456610 - DNA, 3220 bp, Homo sapiens
tgaccgtttccgcttccgtccacttggcgagtgagacgctgatgggaggatggacatactggtgtctgagtgctccgcgcggctgctgcagcaggaagaagagattaaatctctgactgctgaaattgaccggttgaaaaactgtggctgtttaggagcttctccaaatttggagcagttacaagaagaaaatttaaaattaaagtatcgactgaatattcttcgaaagagtcttcaggcagaaaggaacaaaccaactaaaaatatgattaacattattagccgcctacaagaggtctttggtcatgcaattaaggctgcatatccagatttggaaaatcctcctctgctagtgacaccaagtcagcaggccaagtttggggactatcagtgtaatagtgctatgggtatttctcagatgctcaaaaccaaggaacagaaagttaatccaagagaaattgctgaaaacattaccaaacacctcccagacaatgaatgtattgaaaaagttgaaattgctggtcctggttttattaatgtccacttaagaaaggattttgtatcagaacaattgaccagtcttctagtgaatggagttcaactacctgctctgggagagaataaaaaggttatagttgacttttcctcccctaatatagctaaagagatgcatgtaggccacctgaggtcaactatcataggagagagtataagccgcctctttgaatttgcagggtatgacgtgctcaggtatgtgctcttgccttgcgtactattctctttccttattttcttgtttggaaaattctatagaacatggaatatctcactcaagaaagaacattcgactaaatcagtggttcatcagcttagttcttctttacaaccacccagtaagcttttaaaatatgtcctgagcctttcctctgaaccttttttactattttatttttttagactcttagtggaaccaaggacaaaactccttcattctacacatgtttcttgaggacctcttgtatgcaatgggtttatatcctagcagggagagaagtagtaaagaaacaggttgttttgggccttgtaagctgtgagaggcaattgagattttattctaagtgtactgggaagctattagagagttttagtttgtgaagcagggtgatcaaattaaagattagcctgggtaccatggctcacacctataattccagcactttggtaggccaaggtgggaggatcactagaggccaggagttctaggccagcttgggcaacatagcaagaacctgtctctattttttatatttttaaagaaataaaaatttttaaataatacaaattaaagattactaggcgtgagccattgcacccggcctcaacatatattttcaagaattttgttcattgatatttgggaaccattggtctaaattatattaagataatggttaaaatgttaaattttcataaaattgtgggaataaccaacattggcccagctgtcattgtctcaattagctacaaaataaacagattatagtccactgacagaaaacacattcattcagcaaattctggatgcctgccttgtgcagcctctagtacttgagtatgcagagctgaatgtaacagacatagttttcatctcttgtggagtttgcagaccagttgaagaaacaaccaagtaaacagatattactaaatggtgatgtactggcatgtaaatattagtggttcctaatggaatatagttcctctaatttaacttaaccatctttattatttaaaaaatgattatatattctctgattggtgttaggttaaatcatgtaggagactgggggacccagtttggcatgctcatcgctcacctgcaagacaaatttccagattatctaacagtttcacctcctattggggatcttcaggtcttttataaggaatctaagaagaggtttgatactgaggaggaatttaagaagcgagcatatcagtgtgtagttctgctccagggtaaaaacccagatattacaaaagcttggaagcttatctgtgatgtctcccgccaagagttaaataaaatctatgatgcattggacgtctctttaatagagagaggggaatccttctatcaagataggatgaatgatattgtaaaggaatttgaagatagaggatttgtgcaggtggatgatggcagaaagattgtatttgtcccagggtgttccataccattaaccatagtaaaatcagatggaggttatacctatgatacatctgacctggctgctattaaacaaagactatttgaggaaaaagcagatatgattatctatgttgtggacaatggacaatctgtgcacttccagacaatatttgctgctgctcaaatgattggttggtatgaccctaaagtaactcgagtcttccatgctggatttggtgtggtgctaggggaagacaagaaaaagtttaaaacacgttcgggtgaaacagtgcgcctcatggatcttctgggagaaggactaaaacgatccatggacaagttgaaggaaaaagaaagagacaaggtcttaactgcagaggaattgaatgctgctcagacatccgttgcatatggctgcatcaaatatgctgacctttcccataaccggttgaatgactacatcttctcctttgacaaaatgctagatgacagaggaaatacagctgcttacttgttgtatgccttcactagaatcaggtctattgcacgtctggccaatattgatgaagaaatgctccaaaaagctgctcgagaaaccaagattcttttggatcatgagaaggaatggaaactaggccggtgcattttacggttccctgagattctgcaaaagattttagatgacttatttctccacactctctgtgattatatatatgagctggcaactgctttcacagagttctatgatagctgctactgtgtggagaaagatagacagactggaaaaatattgaaggtgaacatgtggcgtatgctgctatgtgaagcagtagctgctgtcatggccaaggggtttgatatcctgggaataaaacctgtccaaaggatgtaatccttcataggtttgaacactgtgtgtttttaccaaagtggccattggcactgtttgcttttttacaatcatgtggacacaagcataagtaaagaaaatttgtcaaccaggaaaaa

SEQ ID NO: 456611 - DNA, 2327 bp, Homo sapiens
tgaccgtttccgcttccgtccacttggcgagtgagacgctgatgggaggatggacatactggtgtctgagtgctccgcgcggctgctgcagcaggaagaagagattaaatctctgactgctgaaattgaccggttgaaaaactgtggctgtttaggagcttctccaaatttggagcagttacaagaagaaaatttaaaattaaagtatcgactgaatattcttcgaaagagtcttcaggcagaaaggaacaaaccaactaaaaatatgattaacattattagccgcctacaagaggtctttggtcatgcaattaaggctgcatatccagatttggaaaatcctcctctgctagtgacaccaagtcagcaggccaagtttggggactatcagtgtaatagtgctatgggtatttctcagatgctcaaaaccaaggaacagaaagttaatccaagagaaattgctgaaaacattaccaaacacctcccagacaatgaatgtattgaaaaagttgaaattgctggtcctggttttattaatgtccacttaagaaaggattttgtatcagaacaattgaccagtcttctagtgaatggagttcaactacctgctctgggagagaataaaaaggttatagttgacttttcctcccctaatatagctaaagagatgcatgtaggccacctgaggtcaactatcataggagagagtataagccgcctctttgaatttgcagggtatgacgtgctcaggttaaatcatgtaggagactgggggacccagtttggcatgctcatcgctcacctgcaagacaaatttccagattatctaacagtttcacctcctattggggatcttcaggtcttttataaggaatctaagaagaggtttgatactgaggaggaatttaagaagcgagcatatcagtgtgtagttctgctccagggtaaaaacccagatattacaaaagcttggaagcttatctgtgatgtctcccgccaagagttaaataaaatctatgatgcattggacgtctctttaatagagagaggggaatccttctatcaagataggatgaatgatattgtaaaggaatttgaagatagaggatttgtgcaggtggatgatggcagaaagattgtatttgtcccagggtgttccataccattaaccatagtaaaatcagatggaggttatacctatgatacatctgacctggctgctattaaacaaagactatttgaggaaaaagcagatatgattatctatgttgtggacaatggacaatctgtgcacttccagacaatatttgctgctgctcaaatgattggttggtatgaccctaaagtaactcgagtcttccatgctggatttggtgtggtgctaggggaagacaagaaaaagtttaaaacacgttcgggtgaaacagtgcgcctcatggatcttctgggagaaggactaaaacgatccatggacaagttgaaggaaaaagaaagagacaaggtcttaactgcagaggaattgaatgctgctcagacatccgttgcatatggctgcatcaaatatgctgacctttcccataaccggttgaatgactacatcttctcctttgacaaaatgctagatgacagaggaaatacagctgcttacttgttgtatgccttcactagaatcaggtctattgcacgtctggccaatattgatgaagaaatgctccaaaaagctgctcgagaaaccaagattcttttggatcatgagaaggaatggaaactaggccggtgcattttacggttccctgagattctgcaaaagattttagatgacttatttctccacactctctgtgattatatatatgagctggcaactgctttcacagagttctatgatagctgctactgtgtggagaaagatagacagactggaaaaatattgaaggtgaacatgtggcgtatgctgctatgtgaagcagtagctgctgtcatggccaaggggtttgatatcctgggaataaaacctgtccaaaggatgtaatccttcataggtttgaacactgtgtgtttttaccaaagtggccattggcactgtttgcttttttacaatcatgtggacacaagcataagtaaagaaaatttgtcaaccaggaaaaaaaaaaaaaaataaaaagctcggagaaatagtgcttctcctctctccggaaccggcccctgggcggttggcaagaaacaagggcccttagaagggcgcgcaaaggggcgccggagacaagggtggcccctttttctcaaagcgtggcttttttgaaacccggtttttccattagaactgg

SEQ ID NO: 456612 - DNA, 2031 bp, Homo sapiens
tgaccgtttccgcttccgtccacttggcgagtgagacgctgatgggaggatggacatactggtgtctgagtgctccgcgcggctgctgcagcaggaagaagagattaaatctctgactgctgaaattgaccggttgaaaaactgtggctgtttaggagcttctccaaatttggagcagttacaagaagaaaatttaaaattaaagtatcgactgaatattcttcgaaagagtcttcaggcagaaaggaacaaaccaactaaaaatatgattaacattattagccgcctacaagaggtctttggtcatgcaattaaggctgcatatccagatttggaaaatcctcctctgctagtgacaccaagtcagcaggccaagtttggggactatcagtgtaatagtgctatgggtatttctcagatgctcaaaaccaaggaacagaaagttaatccaagagaaattgctgaaaacattaccaaacacctcccagacaatgaatgtattgaaaaagttgaaattgctggtcctggttttattaatgtccacttaagaaaggattttgtatcagaacaattgaccagtcttctagtgaatggagttcaactacctgctctgggagagaataaaaaggttatagttgacttttcctcccctaatatagctaaagagatgcatgtaggccacctgaggtcaactatcataggagagagtataagccgcctctttgaatttgcagggtatgacgtgctcaggttaaatcatgtaggagactgggggacccagtttggcatgctcatcgctcacctgcaagacaaatttccagattatctaacagtttcacctcctattggggatcttcaggtcttttataaggaatctaagaagaggtttgatactgaggaggaatttaagaagcgagcatatcagtgtgtagttctgctccagggtaaaaacccagatattacaaaagcttggaagcttatctgtgatgtctcccgccaagagttaaataaaatctatgatgcattggacgtctctttaatagagagaggggaatccttctatcaagataggatgaatgatattgtaaaggaatttgaagatagaggatttgtgcaggtggatgatggcagaaagattgtatttgtcccagggtgttccataccattaaccatagtaaaatcagatggaggttatacctatgatacatctgacctggctgctattaaacaaagactatttgaggaaaaagcagatatgattatctatgttgtggacaatggacaatctgtgcacttccagacaatatttgctgctgctcaaatgattggttggtatgaccctaaagtaactcgagtcttccatgctggatttggtgtggtgctaggggaagacaagaaaaagtttaaaacacgttcgggtgaaacagtgcgcctcatggatcttctgggagaaggactaaaacgatccatggacaagttgaaggaaaaagaaagagacaaggtcttaactgcagaggaattgaatgctgctcagacatccgttgcatatggctgcatcaaatatgctgacctttcccataaccggttgaatgactacatcttctcctttgacaaaatgctagatgacagaggaaatacagctgcttacttgttgtatgccttcactagaatcaggtctattgcacgtctggccaatattgatgaagaaatgctccaaaaagctgctcgagaaaccaagattcttttggatcatgagaaggaatggaaactaggccggtgcattttacggttccctgagattctgcaaaagattttagatgacttatttctccacactctctgtgattatatatatgagctggcaactgctttcacagagttctatgatagctgctactgtgtggagaaagatagacagactggaaaaatattgaaggtgaacatgtggcgtatgctgctatgtgaagcagtagctgctgtcatggccaaggggtttgatatcctgggaataaaacctgtccaaaggatgta

SEQ ID NO: 456613 - DNA, 1173 bp, Homo sapiens
aattgaggattccaagctccaacaagagttaaataaaatctatgatgcattggacgtctctttaatagagagaggggaatccttctatcaagataggatgaatgatattgtaaaggaatttgaagatagaggatttgtgcaggtggatgatggcagaaagattgtatttgtcccagggtgttccataccattaaccatagtaaaatcagatggaggttatacctatgatacatctgacctggctgctattaaacaaagactatttgaggaaaaagcagatatgattatctatgttgtggacaatggacaatctgtgcacttccagacaatatttgctgctgctcaaatgattggttggtatgaccctaaagtaactcgagtcttccatgctggatttggtgtggtgctaggggaagacaagaaaaagtttaaaacacgttcgggtgaaacagtgcgcctcatggatcttctgggagaaggactaaaacgatccatggacaagttgaaggaaaaagaaagagacaaggtcttaactgcagaggaattgaatgctgctcagacatccgttgcatatggctgcatcaaatatgctgacctttcccataaccggttgaatgactacatcttctcctttgacaaaatgctagatgacagaggaaatacagctgcttacttgttgtatgccttcactagaatcaggtctattgcacgtctggccaatattgatgaagaaatgctccaaaaagctgctcgagaaaccaagattcttttggatcatgagaaggaatggaaactaggccggtgcattttacggttccctgagattctgcaaaagattttagatgacttatttctccacactctctgtgattatatatatgagctggcaactgctttcacagagttctatgatagctgctactgtgtggagaaagatagacagactggaaaaatattgaaggtgaacatgtggcgtatgctgctatgtgaagcagtagctgctgtcatggccaaggggtttgatatcctgggaataaaacctgtccaaaggatgtaatccttcataggtttgaacactgtgtgtttttaccaaagtggccattggcactgtttgcttttttacaatcatgtggacacaagcataagtaaagaaaatttgtcaaccaggaaaaa

SEQ ID NO: 456614 - DNA, 918 bp, Homo sapiens
gacctcaagtgattcacccgcctcggcctcccaaagtgctcggattacaggcatgagccatcacgctcagcctaaagtgttcttttcagacttatttttctgcctacaagcatctttggaaatacgtcctcttttagtattgcaagttatcccagaatccctaaacctggccttaactgcacttgccgatactcttctagatgctctatgtttaaatacctagaaagtgtcacctgatcccctaaaagaattatatttccatttttagtattatgaaatgctttagatctggctattagttttgcctaatagtatatcgtataataaaatacttcattttataggaacttctttttaatcggtgataatttcgagtggagaatgagtgtgcctaaaaaaagggaacagtggtgattgcctgatgatttttttgttttttttaaggtctattgcacgtctggccaatattgatgaagaaatgctccaaaaagctgctcgagaaaccaagattcttttggatcatgagaaggaatggaaactaggccggtgcattttacggttccctgagattctgcaaaagattttagatgacttatttctccacactctctgtgattatatatatgagctggcaactgctttcacagagttctatgatagctgctactgtgtggagaaagatagacagactggaaaaatattgaaggtgaacatgtggcgtatgctgctatgtgaagcagtagctgctgtcatggccaaggggtttgatatcctgggaataaaacctgtccaaaggatgtaatccttcataggtttgaacactgtgtgtttttaccaaagtggccattggcactgtttgcttttttacaatcatgtggacacaagcataagtaaagaaaatttgtcaaccaggaaaaa

SEQ ID NO: 456615 - DNA, 783 bp, Homo sapiens
tgaccgtttccgcttccgtccacttggcgagtgagacgctgatgggaggatggacatactggtgtctgagtgctccgcgcggctgctgcagcaggaagaagagattaaatctctgactgctgaaattgaccggttgaaaaactgtggctgtttaggagcttctccaaatttggagcagttacaagaagaaaatttaaaattaaagtatcgactgaatattcttcgaaagagtcttcaggcagaaaggaacaaaccaactaaaaatatgattaacattattagccgcctacaagaggtctttggtcatgcaattaaggctgcatatccagatttggaaaatcctcctctgctagtgacaccaagtcagcaggccaagtttggggactatcagtgtaatagtgctatgggtatttctcagatgctcaaaaccaaggaacagaaagttaatccaagagaaattgctgaaaacattaccaaacacctcccagacaatgaatgtattgatgtatcagaacaattgaccagtcttctagtgaatggagttcaactacctgctctgggagagaataaaaaggtatatgtacactcttctattaatatattagtatcttagaactgcgtggaaccaagcatggtggtatgtgcctatagtctcagctacttgggaggctgaagcaggaggattgcttgagcctagaagttcaaggctgaggtgtgctgtgatcgcacctgtgaatagctactgcacttcaacctgggcagtatcatgagacttcatctcta

SEQ ID NO: 456616 - DNA, 434 bp, Homo sapiens
  misc_feature (400)..(400): n is a, c, g, or t
  misc_feature (421)..(421): n is a, c, g, or t
tgaccgtttccgcttccgtccacttggcgagtgagacgctgatgggaggatggacatactggtgtctgagtgctccgcgcggctgctgcagcaggaagaagagattaaatctctgactgctgaaattgaccggttgaaaaactgtggctgtttaggagcttctccaaatttggagcagttacaagaagaaaatttaaaattaaagtatcgactgaatattcttcgaaagagtcttcaggcagaaaggaacaattttccaaaccttttctggctgtactttaaaagtgccaaaaaggcaatgggtgtttatgacactaaagtcacatacaagctagtatgatacatacatcataggaaagcttatagtttgctcagtgacaaggcaaagggaagttttatnttttttcccgtttttgttccnttacccgaggacg

SEQ ID NO: 456617 - DNA, 372 bp, Homo sapiens
tttttaaataatacaaattaaagattactctggttacttactgtgaagaagctagacaaagaagggagactataacagtaagtgttaggccaggcacggtggctcacgtctgtaaacccagcactttgggaggccaaggaaggatggatcacgaggtcaggagtttgagaccagcctggcaacatggtgaaaccctgtctctactaaaaatacaaaaattagctgggtgtggtggtgcacacctgtaatcccacctacttgggaagctgaggcaggagaattgcttgaacctgggaggcagagatagcagtgagctgagatcgtgccactgcactccagcctgggcaacagagcaagactctctgtcaaaaa

SEQ ID NO: 456618 - DNA, 671 bp, Homo sapiens
ccttttttggtctattttctctctccattctaaaatgtgtctgccgtgagaggggagatcgtgtctgttttgttttctttgtgcccccagagcctagaatactgtctggcattttaaagtacacaataaatgtttgttgaataaatgaatggatttgttagttttgtgcccatttcacaaaggggcaaagtgaggcctttgagagccagaagctctaggtcagtgactgtcctagtctatccaagcacagagcagctctggttagtgtctgctcaattcctctcccctcgcccaaacgtccctgagttgcggcctcgctcctgaccgaaatccccgcgggttctcctcgcagtgtctactggatcccgccaggaggcagcagaggcgccagcacccagtccgacgggacagcggaccggagggggtttccgcttccgggagaggctgaccgtttccgcttccgtccacttggcgagtgagacgctgatgggaggatggacatactggtgtctgagtgctccgcgcggctgctgcagcaggtttggacgcaggagaccggcgggaaggcctgaaagagatggagcaggctctgactcctgcccaagcggcttcgggggcgggacagctaggcgaggaccatcctggtcctctcagagtggagcggcacggtc

SEQ ID NO: 456619 - DNA, 359 bp, Homo sapiens
actggcatgtaaatattagtggttcctaatggaatatagttcctctaatttaacttaaccatctttattatttaaaaaatgattatatattctctgattggtgttaggttaaatcatgtaggagactgggggacccagtttggcatgctcatcgctcacctgcaagacaaatttccagattatctaacagtttcacctcctattggggatcttcaggtcttttataaggtttgataccatttcttttatattatgtgtgtgtttaccattaatcataattatccattttccttaggaaacttaaaatggtttttaaagctactatggagttaagtgaaagttgctaacagccttagtaa

SEQ ID NO: 456620 - DNA, 174 bp, Homo sapiens
ttctagaaatacaggattagatctttttacacaccttactttttaaaatatatatatatacaggaatctaagaagaggtttgatactgaggaggaatttaagaagcgagcatatcagtgtgtagttctgctccagggtaaaaacccagatattacaaaagcttggaagcttatc

SEQ ID NO: 456621 - DNA, 401 bp, Homo sapiens
tacaaattcagtttctcatagacacattcttcattgtgcataacgcattttatattttcattattttgtttgtacattggcccatgtccttctgcctcagtgtcagtgtttattaaagtttattggtaaaagaataccattagatgttccctaccccagtcttatgcctatgagacaccagggcagaagcagcagtcagtaagctatgaaatactgttttgtttttcccaaaggtcttaactgcagaggaattgaatgctgctcagacatccgttgcatatggctgcatcaaatatgctgacctttcccataaccggttgaatgactacatcttctcctttgacaaaatgctagatgacagaggaaatacagctgcttacttgttgtatgccttcactaga

SEQ ID NO: 456622 - DNA, 2148 bp, Homo sapiens
tgaccgtttccgcttccgtccacttggcgagtgagacgctgatgggaggatggacatactggtgtctgagtgctccgcgcggctgctgcagcaggaagaagagattaaatctctgactgctgaaattgaccggttgaaaaactgtggctgtttaggagcttctccaaatttggagcagttacaagaagaaaatttaaaattaaagtatcgactgaatattcttcgaaagagtcttcaggcagaaaggaacaaaccaactaaaaatatgattaacattattagccgcctacaagaggtctttggtcatgcaattaaggctgcatatccagatttggaaaatcctcctctgctagtgacaccaagtcagcaggccaagtttggggactatcagtgtaatagtgctatgggtatttctcagatgctcaaaaccaaggaacagaaagttaatccaagagaaattgctgaaaacattaccaaacacctcccagacaatgaatgtattgaaaaagttgaaattgctggtcctggttttattaatgtccacttaagaaaggattttgtatcagaacaattgaccagtcttctagtgaatggagttcaactacctgctctgggagagaataaaaaggttatagttgacttttcctcccctaatatagctaaagagatgcatgtaggccacctgaggtcaactatcataggagagagtataagccgcctctttgaatttgcagggtatgacgtgctcaggttaaatcatgtaggagactgggggacccagtttggcatgctcatcgctcacctgcaagacaaatttccagattatctaacagtttcacctcctattggggatcttcaggtcttttataaggaatctaagaagaggtttgatactgaggaggaatttaagaagcgagcatatcagtgtgtagttctgctccagggtaaaaacccagatattacaaaagcttggaagcttatctgtgatgtctcccgccaagagttaaataaaatctatgatgcattggacgtctctttaatagagagaggggaatccttctatcaagataggatgaatgatattgtaaaggaatttgaagatagaggatttgtgcaggtggatgatggcagaaagattgtatttgtcccagggtgttccataccattaaccatagtaaaatcagatggaggttatacctatgatacatctgacctggctgctattaaacaaagactatttgaggaaaaagcagatatgattatctatgttgtggacaatggacaatctgtgcacttccagacaatatttgctgctgctcaaatgattggttggtatgaccctaaagtaactcgagtcttccatgctggatttggtgtggtgctaggggaagacaagaaaaagtttaaaacacgttcgggtgaaacagtgcgcctcatggatcttctgggagaaggactaaaacgatccatggacaagttgaaggaaaaagaaagagacaaggtcttaactgcagaggaattgaatgctgctcagacatccgttgcatatggctgcatcaaatatgctgacctttcccataaccggttgaatgactacatcttctcctttgacaaaatgctagatgacagaggaaatacagctgcttacttgttgtatgccttcactagaatcaggtctattgcacgtctggccaatattgatgaagaaatgctccaaaaagctgctcgagaaaccaagattcttttggatcatgagaaggaatggaaactaggccggtgcattttacggttccctgagattctgcaaaagattttagatgacttatttctccacactctctgtgattatatatatgagctggcaactgctttcacagagttctatgatagctgctactgtgtggagaaagatagacagactggaaaaatattgaaggtgaacatgtggcgtatgctgctatgtgaagcagtagctgctgtcatggccaaggggtttgatatcctgggaataaaacctgtccaaaggatgtaatccttcataggtttgaacactgtgtgtttttaccaaagtggccattggcactgtttgcttttttacaatcatgtggacacaagcataagtaaagaaaatttgtcaaccaggaaaaa

SEQ ID NO: 456623 - DNA, 899 bp, Homo sapiens
  misc_feature (29)..(29): n is a, c, g, or t
  misc_feature (32)..(33): n is a, c, g, or t
cagaggataagtgtaaaagggtgtaattngtnnatataggctaggtacgaggcgggtgtgaatcggccgaggggtcttaactgcagaggaattgaatgctgctcagacatccgttgcatatggctgcatcaaatatgctgacctttcccataaccggttgaatgactacatcttctcctttgacaaaatgctagatgacagaggaaatacagctgcttacttgttgtatgccttcactagaatcaggtctattgcacgtctggccaatattgatgaagaaatgctccaaaaagctgctcgagaaaccaagattcttttggatcatgagaaggaatggaaactaggccggtgcattttacggttccctgagattctgcaaaagattttagatgacttatttctccacactctctgtgattatatatatgagctggcaactgctttcacagagttctatgatagctgctactgtgtggagaaagatagacagactggaaaaatattgaaggtgaacatgtggcgtatgctgctatgtgaagcagtagctgctgtcatggccaaggggtttgatatcctgggaataaaacctgtccaaaggatgtaatccttcataggtttgaacactgtgtgtttttaccaaagtggccattggcactgtttgcttttttacaatcatgtggacacaagcataagtaaagaaaatttgtcaaccaggaaaaaaaaaaaaaaataaaaagctcggagaaatagtgcttctcctctctccggaaccggcccctgggcggttggcaagaaacaagggcccttagaagggcgcgcaaaggggcgccggagacaagggtggcccctttttctcaaagcgtggcttttttgaaacccggtttttccattagaactgg

SEQ ID NO: 456624 - DNA, 1212 bp, Homo sapiens
tgaccgtttccgcttccgtccacttggcgagtgagacgctgatgggaggatggacatactggtgtctgagtgctccgcgcggctgctgcagcaggaagaagagattaaatctctgactgctgaaattgaccggttgaaaaactgtggctgtttaggagcttctccaaatttggagcagttacaagaagaaaatttaaaattaaagtatcgactgaatattcttcgaaagagtcttcaggcagaaaggaacaaaccaactaaaaatatgattaacattattagccgcctacaagaggtctttggtcatgcaattaaggctgcatatccagatttggaaaatcctcctctgctagtgacaccaagtcagcaggccaagtttggggactatcagtgtaatagtgctatgggtatttctcaggtgatgtattgtcatgactcttggctgtttgatttttttaagtattattatcatcattgccatttacagaaataatactattacaagttgtatccttagtgaaaaggacatttgccacagtttgaaaaacttgagaaaggagttgggggggtatatgttttaacttttttaggcacaatttttaaggtttggttaaattttatatgtattctcaatatttaagggcaatcattggtactcttttgtttaggtatttccctcctgctgtgtccaggattgctgtgtggtggtgatgagtgctgggaggtgaaaaattaaaataagccatttaccagtcagcatcccaattaaatatttgatgtaactgtgatctttgagccaggcttatatattccattttcaagcagaggagttcccccattttaaaatagaggcattggtctgatgtgtttatgggttaactgcatctggcttgggtctttctgttttcctttctttgctgaattggaaggggttactctgaagagtccaggtcttacagtgtggtttatttctcaagtgtgaatattgcacaccttcatggcttgaaaattagaaatgtaaatatgctggaaccagacttcataactgtagactttgttatgtcatcattaaaaagttcgaggtgttgtaatcccagctactagggaggctgaggcaggagaattgcttgaacccaggggcggaggttacagtgagccgagatcacaccactgcactccagcctgggcaacagagcgagactccatctcaaa

SEQ ID NO: 456625 - DNA, 2248 bp, Homo sapiens
tgaccgtttccgcttccgtccacttggcgagtgagacgctgatgggaggatggacatactggtgtctgagtgctccgcgcggctgctgcagcaggaagaagagattaaatctctgactgctgaaattgaccggttgaaaaactgtggctgtttaggagcttctccaaatttggagcagttacaagaagaaaatttaaaattaaagtatcgactgaatattcttcgaaagagtcttcaggcagaaaggaacaaaccaactaaaaatatgattaacattattagccgcctacaagaggtctttggtcatgcaattaaggctgcatatccagatttggaaaatcctcctctgctagtgacaccaagtcagcaggccaagtttggggactatcagtgtaatagtgctatgggtatttctcagatgctcaaaaccaaggaacagaaagttaatccaagagaaattgctgaaaacattaccaaacacctcccagacaatgaatgtattgaaaaagttgaaattgctggtcctggttttattaatgtccacttaagaaaggattttgtatcagaacaattgaccagtcttctagtgaatggagttcaactacctgctctgggagagaataaaaaggttatagttgacttttcctcccctaatatagctaaagagatgcatgtaggccacctgaggtcaactatcataggagagagtataagccgcctctttgaatttgcagggtatgacgtgctcaggttaaatcatgtaggagactgggggacccagtttggcatgctcatcgctcacctgcaagacaaatttccagattatctaacagtttcacctcctattggggatcttcaggtcttttataaggtcaggtgcggtggctcgtgtccgtaatcccagcacttggagaggctgaggcaagccgattgcttgagttcaggagtttgagaccagcctgagcaacaaagaatctaagaagaggtttgatactgaggaggaatttaagaagcgagcatatcagtgtgtagttctgctccagggtaaaaacccagatattacaaaagcttggaagcttatctgtgatgtctcccgccaagagttaaataaaatctatgatgcattggacgtctctttaatagagagaggggaatccttctatcaagataggatgaatgatattgtaaaggaatttgaagatagaggatttgtgcaggtggatgatggcagaaagattgtatttgtcccagggtgttccataccattaaccatagtaaaatcagatggaggttatacctatgatacatctgacctggctgctattaaacaaagactatttgaggaaaaagcagatatgattatctatgttgtggacaatggacaatctgtgcacttccagacaatatttgctgctgctcaaatgattggttggtatgaccctaaagtaactcgagtcttccatgctggatttggtgtggtgctaggggaagacaagaaaaagtttaaaacacgttcgggtgaaacagtgcgcctcatggatcttctgggagaaggactaaaacgatccatggacaagttgaaggaaaaagaaagagacaaggtcttaactgcagaggaattgaatgctgctcagacatccgttgcatatggctgcatcaaatatgctgacctttcccataaccggttgaatgactacatcttctcctttgacaaaatgctagatgacagaggaaatacagctgcttacttgttgtatgccttcactagaatcaggtctattgcacgtctggccaatattgatgaagaaatgctccaaaaagctgctcgagaaaccaagattcttttggatcatgagaaggaatggaaactaggccggtgcattttacggttccctgagattctgcaaaagattttagatgacttatttctccacactctctgtgattatatatatgagctggcaactgctttcacagagttctatgatagctgctactgtgtggagaaagatagacagactggaaaaatattgaaggtgaacatgtggcgtatgctgctatgtgaagcagtagctgctgtcatggccaaggggtttgatatcctgggaataaaacctgtccaaaggatgtaatccttcataggtttgaacactgtgtgtttttaccaaagtggccattggcactgtttgcttttttacaatcatgtggacacaagcataagtaaagaaaatttgtcaaccaggaaaaa

SEQ ID NO: 456626 - DNA, 2477 bp, Homo sapiens
tgaccgtttccgcttccgtccacttggcgagtgagacgctgatgggaggatggacatactggtgtctgagtgctccgcgcggctgctgcagcaggaagaagagattaaatctctgactgctgaaattgaccggttgaaaaactgtggctgtttaggagcttctccaaatttggagcagttacaagaagaaaatttaaaattaaagtatcgactgaatattcttcgaaagagtcttcaggcagaaaggaacaaaccaactaaaaatatgattaacattattagccgcctacaagaggtctttggtcatgcaattaaggctgcatatccagatttggaaaatcctcctctgctagtgacaccaagtcagcaggccaagtttggggactatcagtgtaatagtgctatgggtatttctcagatgctcaaaaccaaggaacagaaagttaatccaagagaaattgctgaaaacattaccaaacacctcccagacaatgaatgtattgaaaaagttgaaattgctggtcctggttttattaatgtccacttaagaaaggattttgtatcagaacaattgaccagtcttctagtgaatggagttcaactacctgctctgggagagaataaaaaggttatagttgacttttcctcccctaatatagctaaagagatgcatgtaggccacctgaggtcaactatcataggagagagtataagccgcctctttgaatttgcagggtatgacgtgctcaggttaaatcatgtaggagactgggggacccagtttggcatgctcatcgctcacctgcaagacaaatttccagattatctaacagtttcacctcctattggggatcttcaggtcttttataaggaatctaagaagaggtttgatactgaggaggaatttaagaagcgagcatatcagtgtgtagttctgctccagggtaaaaacccagatattacaaaagcttggaagcttatctgtgatgtctcccgccaagagttaaataaaatctatgatgcattggacgtctctttaatagagagaggggaatccttctatcaagataggatgaatgatattgtaaaggaatttgaagatagaggatttgtgcaggtggatgatggcagaaagattgtatttgtcccagggtgttccataccattaaccatagtaaaatcagatggaggttatacctatgatacatctgacctggctgctattaaacaaagactatttgaggaaaaagcagatatgattatctatgttgtggacaatggacaatctgtgcacttccagacaatatttgctgctgctcaaatgattggttggtatgaccctaaagtaactcgagtcttccatgctggatttggtgtggtgctaggggaagacaagaaaaagtttaaaacacgttcgggtgaaacagtgcgcctcatggatcttctgggagaaggactaaaacgatccatggacaagttgaaggaaaaagaaagagacaaggtcttaactgcagaggaattgaatgctgctcagacatccgttgcatatggctgcatcaaatatgctgacctttcccataaccggttgaatgactacatcttctcctttgacaaaatgctagatgacagaggaaatacagctgcttacttgttgtatgccttcactagaatcaggtctattgcacgtctggccaatattgatgaagaaatgctccaaaaagctgctcgagaaaccaagattcttttggatcatgagaaggaatggaaactaggccggtgcattttacggttccctgagattctgcaaaagattttagatgacttatttctccacactctctgtgattatatatatgagctggcaactgctttcacagagttctatgatagctgctactgtgtggagaaagatagacagactggaaaaatattgaaggtgaacatgtggcgtatgctgctatgtgaagcagtagctgctgtcatggccaaggggtttgatatcctgggaataaaacctgtccaaaggatgtaatccttcataggtttgaacactgtgtgtttttaccaaagtggccattggcactgtttgcttttttacaatcatgtggacacaagcataagtaaagaaaatttgtcaaccaggaaaaaaaaaaaaaaacaaaaaaaaaatcttttgggcgccggccttggcgctggagaaaaaaggttttcagaaccactctcgtgttggggcgcgcggggcacccacgttagagtctaagcgccaccaccgttgcccccaagcgcgtggtccccgaaggaaacccgccggtcctggacctcagcggcgcgggttctctccccccaaataaaaaaagaccgcgggggaacaccggggcgtctccggaacacacctccaaagggcgttcgggagccccctaccgggcctcatccacacggggtcccaagcgaccccaatataaattgccccacccggc

SEQ ID NO: 456627 - DNA, 3257 bp, Homo sapiens
  misc_feature (29)..(29): n is a, c, g, or t
  misc_feature (32)..(33): n is a, c, g, or t
cagaggataagtgtaaaagggtgtaattngtnnatataggctaggtacgaggcgggtgtgaatcggccgagggcgctgatgggaggatggacatactggtgtctgagtgctccgcgcggctgctgcagcaggaagaagagattaaatctctgactgctgaaattgaccggttgaaaaactgtggctgtttaggagcttctccaaatttggagcagttacaagaagaaaatttaaaattaaagtatcgactgaatattcttcgaaagagtcttcaggcagaaaggaacaaaccaactaaaaatatgattaacattattagccgcctacaagaggtctttggtcatgcaattaaggctgcatatccagatttggaaaatcctcctctgctagtgacaccaagtcagcaggccaagtttggggactatcagtgtaatagtgctatgggtatttctcagatgctcaaaaccaaggaacagaaagttaatccaagagaaattgctgaaaacattaccaaacacctcccagacaatgaatgtattgaaaaagttgaaattgctggtcctggttttattaatgtccacttaagaaaggattttgtatcagaacaattgaccagtcttctagtgaatggagttcaactacctgctctgggagagaataaaaaggttatagttgacttttcctcccctaatatagctaaagagatgcatgtaggccacctgaggtcaactatcataggagagagtataagccgcctctttgaatttgcagggtatgacgtgctcaggtatgtgctcttgccttgcgtactattctctttccttattttcttgtttggaaaattctatagaacatggaatatctcactcaagaaagaacattcgactaaatcagtggttcatcagcttagttcttctttacaaccacccagtaagcttttaaaatatgtcctgagcctttcctctgaaccttttttactattttatttttttagactcttagtggaaccaaggacaaaactccttcattctacacatgtttcttgaggacctcttgtatgcaatgggtttatatcctagcagggagagaagtagtaaagaaacaggttgttttgggccttgtaagctgtgagaggcaattgagattttattctaagtgtactgggaagctattagagagttttagtttgtgaagcagggtgatcaaattaaagattagcctgggtaccatggctcacacctataattccagcactttggtaggccaaggtgggaggatcactagaggccaggagttctaggccagcttgggcaacatagcaagaacctgtctctattttttatatttttaaagaaataaaaatttttaaataatacaaattaaagattactaggcgtgagccattgcacccggcctcaacatatattttcaagaattttgttcattgatatttgggaaccattggtctaaattatattaagataatggttaaaatgttaaattttcataaaattgtgggaataaccaacattggcccagctgtcattgtctcaattagctacaaaataaacagattatagtccactgacagaaaacacattcattcagcaaattctggatgcctgccttgtgcagcctctagtacttgagtatgcagagctgaatgtaacagacatagttttcatctcttgtggagtttgcagaccagttgaagaaacaaccaagtaaacagatattactaaatggtgatgtactggcatgtaaatattagtggttcctaatggaatatagttcctctaatttaacttaaccatctttattatttaaaaaatgattatatattctctgattggtgttaggttaaatcatgtaggagactgggggacccagtttggcatgctcatcgctcacctgcaagacaaatttccagattatctaacagtttcacctcctattggggatcttcaggtcttttataaggaatctaagaagaggtttgatactgaggaggaatttaagaagcgagcatatcagtgtgtagttctgctccagggtaaaaacccagatattacaaaagcttggaagcttatctgtgatgtctcccgccaagagttaaataaaatctatgatgcattggacgtctctttaatagagagaggggaatccttctatcaagataggatgaatgatattgtaaaggaatttgaagatagaggatttgtgcaggtggatgatggcagaaagattgtatttgtcccagggtgttccataccattaaccatagtaaaatcagatggaggttatacctatgatacatctgacctggctgctattaaacaaagactatttgaggaaaaagcagatatgattatctatgttgtggacaatggacaatctgtgcacttccagacaatatttgctgctgctcaaatgattggttggtatgaccctaaagtaactcgagtcttccatgctggatttggtgtggtgctaggggaagacaagaaaaagtttaaaacacgttcgggtgaaacagtgcgcctcatggatcttctgggagaaggactaaaacgatccatggacaagttgaaggaaaaagaaagagacaaggtcttaactgcagaggaattgaatgctgctcagacatccgttgcatatggctgcatcaaatatgctgacctttcccataaccggttgaatgactacatcttctcctttgacaaaatgctagatgacagaggaaatacagctgcttacttgttgtatgccttcactagaatcaggtctattgcacgtctggccaatattgatgaagaaatgctccaaaaagctgctcgagaaaccaagattcttttggatcatgagaaggaatggaaactaggccggtgcattttacggttccctgagattctgcaaaagattttagatgacttatttctccacactctctgtgattatatatatgagctggcaactgctttcacagagttctatgatagctgctactgtgtggagaaagatagacagactggaaaaatattgaaggtgaacatgtggcgtatgctgctatgtgaagcagtagctgctgtcatggccaaggggtttgatatcctgggaataaaacctgtccaaaggatgtaatccttcataggtttgaacactgtgtgtttttaccaaagtggccattggcactgtttgcttttttacaatcatgtggacacaagcataagtaaagaaaatttgtcaaccaggaaaaa

SEQ ID NO: 456628 - DNA, 768 bp, Homo sapiens
tgaccgtttccgcttccgtccacttggcgagtgagacgctgatgggaggatggacatactggtgtctgagtgctccgcgcggctgctgcagcaggaagaagagattaaatctctgactgctgaaattgaccggttgaaaaactgtggctgtttaggagcttctccaaatttggagcagttacaagaagaaaatttaaaattaaagtatcgactgaatattcttcgaaagagtcttcaggcagaaaggaacaaaccaactaaaaatatgattaacattattagccgcctacaagaggtctttggtcatgcaattaaggctgcatatccagatttggaaaatcctcctctgctagtgacaccaagtcagcaggccaagtttggggactatcagtgtaatagtgctatgggtatttctcagatgctcaaaaccaaggaacagaaagttaatccaagagaaattgctgaaaacattaccaaacacctcccagacaatgaatgtattgaaaaagttgaaattgctggtcctggtatgacataatgttatccttcttaatagttgtattgaacatgagtcctttttgaagttaaaaaagaacacacattttaattacagggttaaactttgtatactgaacaagatggtgaaagcactgtggattgtgatataggaaattgaagttttaatctagactcagctaccacttttagctgccttatcttgaatgagttactttgcctctctgtgattcagtttttcatcagcaaaat

SEQ ID NO: 456629 - DNA, 3338 bp, Homo sapiens
  misc_feature (50)..(50): n is a, c, g, or t
  misc_feature (142)..(142): n is a, c, g, or t
  misc_feature (178)..(178): n is a, c, g, or t
tggatgtgtatctcaagatcctggcattcagactggggctctacaagtcncactatatttgcaagttgtagcagaactatattaaaaacatgccctgcctgtttcccctcgttggtcctcccattcagagaggggctttctngccttgtgctttaaatagtcctcagacggtaatgtngatagtagatgaacacaattcttgtgaatccatttgccttgtgcttgggagttctattcttagaccacaatcaccggaatagaaagcctccgaccccacatccgaactgaagccatgtgggcctggctaatggatttctttgggaagctgggacaaaggaccgggtctgcttctgtcattgactaggccaggtatggagcagtccattagaaaccagtctcctcccaattgtctggagtttatgagcctggcttacctgggatcattttcatgttatgatcctaattaaagttcagcctgtttactctgctccagtcaaggagttacagggggaatcaaggcagataagatgtttatgggtgaaccctgtttcattttcctcggatccacaattaaagaattaacagcacttgttatttattgagcagaaccgtgggcgggaggagggctttagtgcttgttttgctgcttctgtgagcccagggctgcgccagcagcatttcacttttaatccttagtattgttaggcctatacttccacctatagaggtggcaattgaggatcttgacttgcccaggggttcatgatcacgaaccttctactacttcataccttgaacaccatctcttctaatagatgggcaacaatatggtcatttctgtgaagatactggtgacttaaaagcattactaaatgtttattaaacacttgaatatagtaattatatatgtgagaatggattcacatctagggctcctgacagtatctgtcaagatgctggccccaaaccctgagtttgtcatgttatgtgggcatatttggttgcccaactctgaagccaaatgatgccagggagagagagcctccatgctgtgggggtgtttctaagagcagcctggtccttaattatcctactaaagacagtgtcctctgtgatctcagactcataacatccctgttaagataggagggggctgaaatcatttgttctccttcacattgaggggagactcaggcacagatgagagacagaggcagagaagttaaataattagtccaaggtcacatcaaatgatttccaactcagctgatgaatctgtctaggtctcggtctccaaatattgcagcttcccttacaatgtaatttgatctcaaacactttacgtgtcttatttttcttcctcctttttctattttggtaaataagatgttttttacacctactgccagattaatgttgggttttaatttagcccttcaagatgatcaatgacttaaccgaggaaactgctgccagaatgtagtttataatgtaccttttttcctatactcggttttctgcttctgtattttgtacattgtcagtctctgtgggttaagaactttgggactctcaagggtcatcttgacagaggagcttctgcagttgggaattgttacctttctcagagcagtgctattgggaaaaaaaaatctaagcatttttgttctcagcttcacagaggaagtgaagcacattcaagggtagcccattggcttctcgtataggaatagtatagatttggcttattttattccttgcttattataatattattattcataagcataccttttcagttaccctcatgatttactatctgtaagagcataagcttactgtttgtgtaatatttgtccctgtattttagatgggagttgctgaggtggtataaggtttggtaactgcatccggcctctcagggaaataaccaagttgttcagattcttagctgtattatgtgaagttgtttgtcagcttcattgcttactactgtgaaataagttataaagaggaacttttaataaaaataaatggattcactcaggggaggggtattcattgttggtgaaatatgtcgaggaccagatgctttttggtctcccaaagacctatcaaactgcagatcttttggctttgtaatatattcagttccacatttattcattcaagatttttgtgtcctcattatgtgccaagtactgggttggacactaggtgacagagatgaacaaatccctaatcttgggatttcacagtggatgttggaatttagtaccgtttagcttcattaggttctgcagtagtcccaagattttccaagatcatcctgtcctccagtgttctattgattcaacttcagaatatatcccagactctgtccctctttactcctcactgctgttgccctgggtccatctgccatcatctctcacctggattatctcagtagtttcccaactggtttccttgtttccattcttgcctccttctgtctactctcaatataacagctagaacaatccttttacaatggaattcagatcatgtttacccctctgttcaaattctccagtgactttccagtttttacatgatctggctcctactacctgtctcactgtgtttcctactactctcctgctctttctcctcttaataaacactgggctcatggtgtttcctttaacatgccaggcatgcttgaccctgtcctgtctcagggccctgctgttccctctgcctggaacattcttcccatagtgtctgcatggctcgctctctcactgctttggattgctgctcaaaagtcaccttatcaaaggcctttcccaaaggtttaaaaatcattctactataaagacacatgcatacatatgtttattgcagcactattcacaataacaaagacttggaaccaacccaaatgcccatcaatgatagactggataaagaaaatatggcacgtaagcaccatggaatactatgcagccataaaaaagaatgagttcatgtcctttgcagggacatggatgaagctggaaaccattattctcagcaaactaacacaggaacagaaaaccaaacaccgcatgttctcactcataagtgggagttgaacaatgagaacatacgggcacagtggggggaacatcacacaccagggcctgtcggggggtgagaggcaagggaagtgatagcattaagagaaatacctaatgtagattatgggttgatgggggcagcaaaccaccatggcacatgtgtacctatgtaacaaacctgcacattctgcacatatatcccagaacttaaagtataattaaagaaaaaaaaaa

SEQ ID NO: 456630 - DNA, 5944 bp, Homo sapiens
  misc_feature (3)..(3): n is a, c, g, or t
  misc_feature (4503)..(4503): n is a, c, g, or t
ggnagatttgaatacttcactgaggcgagccgggcgttgtgagcggactgctagaggcggctgtctgtttccgctctaaggaaactcagagcgtgtggaccccaaacaagtctgcgcaaaatttgtcgaggaggtttgccgcggcagaaaagttttcttcaaaaatggatggggtgtcttcagaggctaatgaagaaaatgacaatatagagagacctgttagaagacggcattcttcaatattgaaacccccaaggagtcctcttcaggacctcagaggtgggaatgaaacagttcaggaatccaatgctttgagaaataagaaaaactctcgtcgagtcagctttgcagatactataaaggtattccagacggagtctcatatgaaaatagtgagaaagtcagaaatggaagaaacagaagcaggagaaaatcttcttttgatacagaataagaaattagaagataattactgtgaaattactgggatgaacacattgctttctgctcccattcatacccagatgcaacagaaggagttttcaattatagaacatacccgtgaaaggaaacatgcaaatgaccagacagtcattttttcagatgaaaaccagatggacctgacatcaagtcacactgtaatgattaccaaaggccttttagataatcccataagtgaaaagtccaccaagatagataccacatcatttctagctaatttaaagcttcacaccgaggactcaagaatgaaaaaagaagtaaatttttccgtggatcaaaacacttcttcagaaaataaaatagatttcaatgacttcataaaaagattgaaaacaggaaaatgtagtgcttttcctgatgtgcctgataaagaaaattttgagatacctatttattccaaggaaccgaacagtgcctcttctacacatcaaatgcatgtatctcttaaggaagatgaaaataacagtaatattactaggctctttagagaaaaagatgatgggatgaatttcacccagtgtcatacagccaatattcagacattgattcccacatccagtgagaccaactcacgggaatctaaaggtaatgatattacaatttatggcaatgactttatggacttgacatttaaccacactttgcagatcttacctgcaacaggtaatttttctgaaatagaaaatcaaactcagaatgccatggatgtaacaacaggttatggaactaaagcttcaggaaataaaacagtttttaagagtaaacaaaatactgcttttcaagacctttccataaactctgcagacaaaatacatattaccagaagtcatattatgggggcagaaactcacatagtctcacagacttgtaatcaggatgccagaatattagccatgaccccagaatctatatattctaatccatctattcaaggttgtaagactgttttctattctagttgtaatgatgccatggaaatgaccaaatgtctctcaaatatgagagaggagaaaaatttgctaaagcatgacagtaattattctaaaatgtattgcaatccagatgctatgtcttctctcacagagaaaactatttattccggagaggagaacatggacattaccaagagtcatacagttgcaatagataatcaaatttttaaacaagatcaatcaaatgtgcaaatagcagctgcaccaacacccgaaaaagaaatgatgctccaaaatcttatgaccacatcagaagatgggaaaatgaatgtaaattgtaactcagttcctcatgtatctaaggaaagaatacagcagagcctgtcaaatcctttgtctatttcattgactgatagaaagactgaactcttatcaggtgaaaatacggatttgactgaaagtcacacaagtaacttaggaagtcaggttcctcttgcagcttataatctagcaccggagagtaccagtgaatctcactctcagagcaaaagctcttcagatgaatgtgaagaaattaccaaaagtcgtaatgaaccatttcagcgatcagacataatagccaaaaacagcttaaccgacacctggaacaaagacaaagattgggttttgaagattttgccctaccttgataaagattctcctcagtcagctgattgtaatcaggagatagcaacaagccataatatagtctactgtggtggagttcttgataaacaaataactaatagaaatacagtatcatgggaacaatctttgttttctaccacaaagccattattttcatcaggacagttctctatgaaaaatcatgatactgctataagtagtcatacagtgaaatctgtactaggccagaattctaaactggctgagccactgaggaaaagtttaagcaatcccacacctgactattgccatgacaagatgattatatgttcagaggaagagcaaaatatggatctaacaaagagccacactgtcgtcattggatttggtccttctgaactacaagaacttggtaaaactaatttagaacacactactggccagctaacaacaatgaacagacagatagctgtaaaagttgaaaaatgtggtaaaagtcccatagaaaaaagtggagtgcttaaatctaactgtattatggatgtgttagaggacgaaagtgtacagaaacctaaatttccaaaggaaaagcaaaatgtcaaaatttggggaaggaaaagtgttggtggaccaaaaattgataagactattgtattttcagaagacgataagaatgatatggatatcactaagagttatacaatagaaataaaccatagacctttattagagaaacgtgattgtcatttggtgccattggcaggaacttctgaaactattttatatacatgtgggcaggatgacatggagatcactagaagtcacacaactgccttagaatgtaaaactgtctcaccagatgaaataactactaggcctatggacaaaactgtagtgtttgtagataatcatgttgaactagaaatgacagagtcccatactgttttcattgactaccaagaaaaggaaagaacagacagacctaactttgaactatcccaaaggaaaagcctaggaacaccaacagtgatatgtactcctactgaggagagtgttttctttccaggaaatggtgaaagtgaccgtctagtagcaaatgacagccagctaacccctctggaggaatggtctaataataggggccctgtagaggtagctgataacatggaattgtctaaatcagccacttgcaaaaacatcaaagatgtacaaagtcctggatttctgaatgaacctctatcaagcaaaagtcagagaagaaaaagccttaagctaaaaaatgacaagaccattgtattttcagagaatcataaaaatgatatggatattacccagagttgtatggtggaaatagataacgaaagtgccctggaggataaagaggacttccatttggcaggggcttctaaaactattttgtattcatgtgggcaggatgacatggagatcactaggagtcacacaactgccttagaatgtaaaactctcctgccaaatgaaatagctattaggcccatggacaaaaccgtattgttcacagataattacagtgatctggaagtcaccgattcccatactgttttcattgactgtcaagccacagagaaaatacttgaagaaaaccctaaatttggaataggaaaaggaaaaaacttgggtgtttcctttcctaaggataatagctgtgttcaagaaatcgctgaaaaacaagcactggctgtaggaaacaaaatagttcttcacaccgagcaaaagcaacaactctttgctgctactaatagaactactaatgaaatcatcaaatttcatagtgctgctatggatgaaaaggtcataggggaagttgtagaccaggcctgtacattggaaaaagcgcaagttgaaagctgtcagttaaataatagagatagaagaaatgtggactttacaagtagtcatgcaactgctgtttgtggatccagtgataattattcctgtttaccaaatgttatttcctgtactgataatttggagggtagtgccatgctcttatgtgataaagatgaggaaaaagccaattattgcccagtgcaaaatgatcttgcttatgcaaatgattttgccagtgaatattacttggaatctgagggacagcctctctctgctccttgtcctttgttagagaaggaagaagttattcaaaccagtaccaaaggacagttagactgtgttataacactgcacaaagatcaagatctgattaaggatccacgaaatctattggctaatcaaactttagtatatagtcaagatctgggggagatgactaaacttaattcaaagcgagtatcttttaagcttccaaaggatcaaatgaaagtctatgttgatgacatttatgttattcctcagcctcatttctcanccgaccaacctccattacctaaaaaaggacagagtagtatcaataaagaagaagtaatactgtctaaagctggaaataagagtttaaatattatagaaaattcctctgcacccatatgtgaaaacaagcccaaaatactcaatagtgaggaatggtttgctgcagcctgtaaaaaagaactgaaggaaaatattcaaacaactaactataatacagctctagatttccacagtaactcagacgtaactaagcaagtcattcaaactcatgtcaatgctggagaagcaccagatcctgtaattacatctaatgttccatgttttcatagtatcaaaccaaatctgaataatttgaatggaaaaactggagagtttttagcctttcaaactgttcatctaccaccccttccagagcaattacttgaattaggaaataaggcacacaatgatatgcatatagtgcaagctacagaaatacataatattaacataatctccagcaatgctaaagatagtagagatgaggaaaataaaaagtctcataatggagctgaaaccacctctctaccgccaaagacagtttttaaagataaagtaaggagatgttctttgggaatctttttgcctagattgcccaacaagagaaattgtagtgtcactggtattgatgacctggaacagattccagcagacacaactgatataaatcacttagaaactcagccggtctctagcaaagattcaggcattggatctgttgcaggtaaactgaacctaagtccttctcaatatataaatgaggaaaatcttcctgtatatcctgatgagatcaattcttcagactctattaacatagaaactgaggaaaaggccttgattgagacataccaaaaagagatttcaccatatgaaaataaaatgggaaaaacttgcaatagccaaaaaagaacgtgggtacaagaagaagaagatattcataaggagaaaaaaatcagaaaaaatgagattaagtttagtgatacgacacaagatcgggaggtgagctctgtcttgaaccaaagaatgttcttgaattttgggttttgttttgttttcttaaattgtgggtattctcaaattttaatcttagtctcgggtaggcagaaaataattatttccacttagagggctggagaaatattcttatgtagaaccttcagaaattaattgactaacagctagacttcaaagcaatttaaagtgacaaatagtcacaaaaaaattaaatggaaaattgtacaaaaagtagccaaagttaaaattgtataatttcaaaaatttcaaaaggtatgtatactgtcacctctagtgatttgtcaatttggctttataataaagaatctctagggaggttatatatagcttgaaaagtcatcttcagtgttgttatatttggggagtaa

SEQ ID NO: 456631 - DNA, 519 bp, Homo sapiens
gtaagtgagccactaagcattgaaatgttttcataatttcactggattttttttcccactttttctagatgcttgaagaattctcactggtagtgcaccattgcagactccttggagaggagattgagtatttaaagagatggggaccaaattataacctaatgaacatagatattaataataatgagtaagtgtattagttcccaaggactgccatgacagagtactacaaattgggtaccttaacaggttctggaggctggaggtctgagattaaggtgtaagcgggtgttattctttctgagggctgttagaatctgtccatgccttctcccagtgtctggtggtttgctggcaatctttggcattccttggcttgtaaatgcataaccttgatctctcccttcatgttgacatggtgtctttcattgtgcatgtctgcatccacatttcccctttttataaggacactagtcatagtggattaggggcccaccttactctagtaggacttcatct

SEQ ID NO: 456632 - DNA, 8614 bp, Homo sapiens
  misc_feature (3)..(3): n is a, c, g, or t
  misc_feature (4503)..(4503): n is a, c, g, or t
ggnagatttgaatacttcactgaggcgagccgggcgttgtgagcggactgctagaggcggctgtctgtttccgctctaaggaaactcagagcgtgtggaccccaaacaagtctgcgcaaaatttgtcgaggaggtttgccgcggcagaaaagttttcttcaaaaatggatggggtgtcttcagaggctaatgaagaaaatgacaatatagagagacctgttagaagacggcattcttcaatattgaaacccccaaggagtcctcttcaggacctcagaggtgggaatgaaacagttcaggaatccaatgctttgagaaataagaaaaactctcgtcgagtcagctttgcagatactataaaggtattccagacggagtctcatatgaaaatagtgagaaagtcagaaatggaagaaacagaagcaggagaaaatcttcttttgatacagaataagaaattagaagataattactgtgaaattactgggatgaacacattgctttctgctcccattcatacccagatgcaacagaaggagttttcaattatagaacatacccgtgaaaggaaacatgcaaatgaccagacagtcattttttcagatgaaaaccagatggacctgacatcaagtcacactgtaatgattaccaaaggccttttagataatcccataagtgaaaagtccaccaagatagataccacatcatttctagctaatttaaagcttcacaccgaggactcaagaatgaaaaaagaagtaaatttttccgtggatcaaaacacttcttcagaaaataaaatagatttcaatgacttcataaaaagattgaaaacaggaaaatgtagtgcttttcctgatgtgcctgataaagaaaattttgagatacctatttattccaaggaaccgaacagtgcctcttctacacatcaaatgcatgtatctcttaaggaagatgaaaataacagtaatattactaggctctttagagaaaaagatgatgggatgaatttcacccagtgtcatacagccaatattcagacattgattcccacatccagtgagaccaactcacgggaatctaaaggtaatgatattacaatttatggcaatgactttatggacttgacatttaaccacactttgcagatcttacctgcaacaggtaatttttctgaaatagaaaatcaaactcagaatgccatggatgtaacaacaggttatggaactaaagcttcaggaaataaaacagtttttaagagtaaacaaaatactgcttttcaagacctttccataaactctgcagacaaaatacatattaccagaagtcatattatgggggcagaaactcacatagtctcacagacttgtaatcaggatgccagaatattagccatgaccccagaatctatatattctaatccatctattcaaggttgtaagactgttttctattctagttgtaatgatgccatggaaatgaccaaatgtctctcaaatatgagagaggagaaaaatttgctaaagcatgacagtaattattctaaaatgtattgcaatccagatgctatgtcttctctcacagagaaaactatttattccggagaggagaacatggacattaccaagagtcatacagttgcaatagataatcaaatttttaaacaagatcaatcaaatgtgcaaatagcagctgcaccaacacccgaaaaagaaatgatgctccaaaatcttatgaccacatcagaagatgggaaaatgaatgtaaattgtaactcagttcctcatgtatctaaggaaagaatacagcagagcctgtcaaatcctttgtctatttcattgactgatagaaagactgaactcttatcaggtgaaaatacggatttgactgaaagtcacacaagtaacttaggaagtcaggttcctcttgcagcttataatctagcaccggagagtaccagtgaatctcactctcagagcaaaagctcttcagatgaatgtgaagaaattaccaaaagtcgtaatgaaccatttcagcgatcagacataatagccaaaaacagcttaaccgacacctggaacaaagacaaagattgggttttgaagattttgccctaccttgataaagattctcctcagtcagctgattgtaatcaggagatagcaacaagccataatatagtctactgtggtggagttcttgataaacaaataactaatagaaatacagtatcatgggaacaatctttgttttctaccacaaagccattattttcatcaggacagttctctatgaaaaatcatgatactgctataagtagtcatacagtgaaatctgtactaggccagaattctaaactggctgagccactgaggaaaagtttaagcaatcccacacctgactattgccatgacaagatgattatatgttcagaggaagagcaaaatatggatctaacaaagagccacactgtcgtcattggatttggtccttctgaactacaagaacttggtaaaactaatttagaacacactactggccagctaacaacaatgaacagacagatagctgtaaaagttgaaaaatgtggtaaaagtcccatagaaaaaagtggagtgcttaaatctaactgtattatggatgtgttagaggacgaaagtgtacagaaacctaaatttccaaaggaaaagcaaaatgtcaaaatttggggaaggaaaagtgttggtggaccaaaaattgataagactattgtattttcagaagacgataagaatgatatggatatcactaagagttatacaatagaaataaaccatagacctttattagagaaacgtgattgtcatttggtgccattggcaggaacttctgaaactattttatatacatgtgggcaggatgacatggagatcactagaagtcacacaactgccttagaatgtaaaactgtctcaccagatgaaataactactaggcctatggacaaaactgtagtgtttgtagataatcatgttgaactagaaatgacagagtcccatactgttttcattgactaccaagaaaaggaaagaacagacagacctaactttgaactatcccaaaggaaaagcctaggaacaccaacagtgatatgtactcctactgaggagagtgttttctttccaggaaatggtgaaagtgaccgtctagtagcaaatgacagccagctaacccctctggaggaatggtctaataataggggccctgtagaggtagctgataacatggaattgtctaaatcagccacttgcaaaaacatcaaagatgtacaaagtcctggatttctgaatgaacctctatcaagcaaaagtcagagaagaaaaagccttaagctaaaaaatgacaagaccattgtattttcagagaatcataaaaatgatatggatattacccagagttgtatggtggaaatagataacgaaagtgccctggaggataaagaggacttccatttggcaggggcttctaaaactattttgtattcatgtgggcaggatgacatggagatcactaggagtcacacaactgccttagaatgtaaaactctcctgccaaatgaaatagctattaggcccatggacaaaaccgtattgttcacagataattacagtgatctggaagtcaccgattcccatactgttttcattgactgtcaagccacagagaaaatacttgaagaaaaccctaaatttggaataggaaaaggaaaaaacttgggtgtttcctttcctaaggataatagctgtgttcaagaaatcgctgaaaaacaagcactggctgtaggaaacaaaatagttcttcacaccgagcaaaagcaacaactctttgctgctactaatagaactactaatgaaatcatcaaatttcatagtgctgctatggatgaaaaggtcataggggaagttgtagaccaggcctgtacattggaaaaagcgcaagttgaaagctgtcagttaaataatagagatagaagaaatgtggactttacaagtagtcatgcaactgctgtttgtggatccagtgataattattcctgtttaccaaatgttatttcctgtactgataatttggagggtagtgccatgctcttatgtgataaagatgaggaaaaagccaattattgcccagtgcaaaatgatcttgcttatgcaaatgattttgccagtgaatattacttggaatctgagggacagcctctctctgctccttgtcctttgttagagaaggaagaagttattcaaaccagtaccaaaggacagttagactgtgttataacactgcacaaagatcaagatctgattaaggatccacgaaatctattggctaatcaaactttagtatatagtcaagatctgggggagatgactaaacttaattcaaagcgagtatcttttaagcttccaaaggatcaaatgaaagtctatgttgatgacatttatgttattcctcagcctcatttctcanccgaccaacctccattacctaaaaaaggacagagtagtatcaataaagaagaagtaatactgtctaaagctggaaataagagtttaaatattatagaaaattcctctgcacccatatgtgaaaacaagcccaaaatactcaatagtgaggaatggtttgctgcagcctgtaaaaaagaactgaaggaaaatattcaaacaactaactataatacagctctagatttccacagtaactcagacgtaactaagcaagtcattcaaactcatgtcaatgctggagaagcaccagatcctgtaattacatctaatgttccatgttttcatagtatcaaaccaaatctgaataatttgaatggaaaaactggagagtttttagcctttcaaactgttcatctaccaccccttccagagcaattacttgaattaggaaataaggcacacaatgatatgcatatagtgcaagctacagaaatacataatattaacataatctccagcaatgctaaagatagtagagatgaggaaaataaaaagtctcataatggagctgaaaccacctctctaccgccaaagacagtttttaaagataaagtaaggagatgttctttgggaatctttttgcctagattgcccaacaagagaaattgtagtgtcactggtattgatgacctggaacagattccagcagacacaactgatataaatcacttagaaactcagccggtctctagcaaagattcaggcattggatctgttgcaggtaaactgaacctaagtccttctcaatatataaatgaggaaaatcttcctgtatatcctgatgagatcaattcttcagactctattaacatagaaactgaggaaaaggccttgattgagacataccaaaaagagatttcaccatatgaaaataaaatgggaaaaacttgcaatagccaaaaaagaacgtgggtacaagaagaagaagatattcataaggagaaaaaaatcagaaaaaatgagattaagtttagtgatacgacacaagatcgggagatttttgatcaccatactgaagaggatatagataaaagtgctaacagtgtattgataaaaaacctgagcaggaccccatctagttgcagcagctctctggattcaatcaaggctgatgggacctctctggacttcagcacttaccgcagtagtcaaatggaatcacagtttctcagagatactatttgtgaagagagcttgagggagaaactccaagatgggagaataacaataagggagttctttatacttctccaggtccacatcttgatacagaaaccccgacagagcaatctcccaggcaattttactgtaaacacaccacctactccagaagacctgatgttaagtcaatatgtttaccgacccaagatacagatttatagagaagattgtgaggctcgtcgccaaaagattgaagaattaaagctttctgcatcgaaccaagataagctgttggttgatataaataagaacctgtgggaaaaaatgagacactgctctgacaaagagctgaaggcctttggaatttatcttaacaaaataaagtcatgttttaccaagatgactaaagtcttcactcaccaaggaaaagtggctctgtatggcaagctggtgcagtcagctcagaatgagagggagaaacttcaaataaagatagatgagatggataaaatacttaagaagatcgataactgcctcactgagatggaaacagaaactaagaatttggaggatgaagagaaaaacaatcctgtggaagaatgggattctgaaatgagagctgcagaaaaagaattggaacagctgaaaactgaagaagaggagcttcaaagaaatctcttagaactggaggtacaaaaagagcagacccttgctcaaatagactttatgcaaaaacaaagaaatagaactgaagagctactggatcagttgagcttgtctgagtgggatgtcgttgagtggagtgatgatcaagctgtattcacctttgtttatgacacgatacaactcaccatcacctttgaagagtcagttgttggtttccctttcctggacaagcgttataggaagattgttgatgtcaattttcaatctctgttagatgaggatcaagctcctccttcctcccttttagttcataagcttattttccagtacgttgaagaaaaggaatcctggaagaagacatgtacaacccagcatcagttacccaagatgcttgaagaattctcactggtagtgcaccattgcagactccttggagaggagattgagtatttaaagagatggggaccaaattataacctaatgaacatagatattaataataatgaattgagacttttattctctagctccgcagcatttgcaaagtttgaaataactttgtttctctcagcctattatccatctgtaccattaccttccaccattcagaatcacgttgggaacactagccaagatgatattgctaccattctatctaaagtgccactggagaacaactacctgaagaatgtagtcaagcaaatttaccaagatctgtttcaggactgccatttctaccactagacccttggaccaccattggaacaaccaagcagaatgtacttgatattatttcagggtcccattgctgttcagcctttgtttttacgtcattacaagctgagtaaaattccttctgatgatgttatagttaatctgtatgttttttatatctctgcagaatgatggtgatgaagtctggatggtaggcctcatagcctactatcaacttactcatctttgtaccaaaggtttaagtaataggacacttaggaaaaatgtctcctaactaaactagtgctttctgctttagtacaagccctaaggattaacttaagtataagaagtgttatcactgacaagaacattagccattttcccataactagatagagctatgattttttaggttgcctggcttctgcctagcagatatttctggagtagaaatgtatctgtctacaaactattatcctttttctccgttactaaaatgctattaagagaaagtagggctgggagccaccacacccagcaatgttttcttaataagtatagtttttctagggaaagttaattcatttttgtctagtacatatatgtaaatatattaatgttgtttttgtgtttgtgatgtagtaaggagatgtacatagaaattcattgaggtatatagatactcatctgtctaggcagttcccaattttctgaagaatgttttacagcaaaattttctattttcttttattaaatagtgacacgtcaaacaatgtcacatccaaaacactagtttcatcaatttctagcagtaataatagacttgctgtaagtattgttttctgatgccatacccttgtcatacatattattaaatgaccaatattatgtatgaagtagacaaaaaaatttactcaaacttcattcaaatcctaattgtgataatttttgttttatatttaattataaaccaaaatacatttgcatttttaagctaatttgtctcaaaattttgctttatatttttggatcaggttaaagtcctgtggatcccctgaatgttattgtccctcttgattggtttttacttctgagctatacgtcaaaagacacataagcttcaaaagtcaagacaaacctcatttgccataaaaatcaagatatagatgttctgttccgtaaactccttgaaaaacattttaaagtcatcaatatgatctgtttcccatgaaacttaagttagctttcttattggagttatttcttttctgtaagtctgaaaagtagagattttgttttacgcattttagtaacctgcaacaaccaactctaaaaaagatttggcttgtaatgacggtctctgcttttttgggtttggagtacacaattgtaatatttacttagttatttgtgtttttctttgttcaaggtattgactagtttcataaattttttgaaagtttttctttcattggttggaaagcagattacattttgcactattaaaataagtttattactttaaa

SEQ ID NO: 456633 - DNA, 8496 bp, Homo sapiens
  misc_feature (3)..(3): n is a, c, g, or t
  misc_feature (4503)..(4503): n is a, c, g, or t
ggnagatttgaatacttcactgaggcgagccgggcgttgtgagcggactgctagaggcggctgtctgtttccgctctaaggaaactcagagcgtgtggaccccaaacaagtctgcgcaaaatttgtcgaggaggtttgccgcggcagaaaagttttcttcaaaaatggatggggtgtcttcagaggctaatgaagaaaatgacaatatagagagacctgttagaagacggcattcttcaatattgaaacccccaaggagtcctcttcaggacctcagaggtgggaatgaaacagttcaggaatccaatgctttgagaaataagaaaaactctcgtcgagtcagctttgcagatactataaaggtattccagacggagtctcatatgaaaatagtgagaaagtcagaaatggaagaaacagaagcaggagaaaatcttcttttgatacagaataagaaattagaagataattactgtgaaattactgggatgaacacattgctttctgctcccattcatacccagatgcaacagaaggagttttcaattatagaacatacccgtgaaaggaaacatgcaaatgaccagacagtcattttttcagatgaaaaccagatggacctgacatcaagtcacactgtaatgattaccaaaggccttttagataatcccataagtgaaaagtccaccaagatagataccacatcatttctagctaatttaaagcttcacaccgaggactcaagaatgaaaaaagaagtaaatttttccgtggatcaaaacacttcttcagaaaataaaatagatttcaatgacttcataaaaagattgaaaacaggaaaatgtagtgcttttcctgatgtgcctgataaagaaaattttgagatacctatttattccaaggaaccgaacagtgcctcttctacacatcaaatgcatgtatctcttaaggaagatgaaaataacagtaatattactaggctctttagagaaaaagatgatgggatgaatttcacccagtgtcatacagccaatattcagacattgattcccacatccagtgagaccaactcacgggaatctaaaggtaatgatattacaatttatggcaatgactttatggacttgacatttaaccacactttgcagatcttacctgcaacaggtaatttttctgaaatagaaaatcaaactcagaatgccatggatgtaacaacaggttatggaactaaagcttcaggaaataaaacagtttttaagagtaaacaaaatactgcttttcaagacctttccataaactctgcagacaaaatacatattaccagaagtcatattatgggggcagaaactcacatagtctcacagacttgtaatcaggatgccagaatattagccatgaccccagaatctatatattctaatccatctattcaaggttgtaagactgttttctattctagttgtaatgatgccatggaaatgaccaaatgtctctcaaatatgagagaggagaaaaatttgctaaagcatgacagtaattattctaaaatgtattgcaatccagatgctatgtcttctctcacagagaaaactatttattccggagaggagaacatggacattaccaagagtcatacagttgcaatagataatcaaatttttaaacaagatcaatcaaatgtgcaaatagcagctgcaccaacacccgaaaaagaaatgatgctccaaaatcttatgaccacatcagaagatgggaaaatgaatgtaaattgtaactcagttcctcatgtatctaaggaaagaatacagcagagcctgtcaaatcctttgtctatttcattgactgatagaaagactgaactcttatcaggtgaaaatacggatttgactgaaagtcacacaagtaacttaggaagtcaggttcctcttgcagcttataatctagcaccggagagtaccagtgaatctcactctcagagcaaaagctcttcagatgaatgtgaagaaattaccaaaagtcgtaatgaaccatttcagcgatcagacataatagccaaaaacagcttaaccgacacctggaacaaagacaaagattgggttttgaagattttgccctaccttgataaagattctcctcagtcagctgattgtaatcaggagatagcaacaagccataatatagtctactgtggtggagttcttgataaacaaataactaatagaaatacagtatcatgggaacaatctttgttttctaccacaaagccattattttcatcaggacagttctctatgaaaaatcatgatactgctataagtagtcatacagtgaaatctgtactaggccagaattctaaactggctgagccactgaggaaaagtttaagcaatcccacacctgactattgccatgacaagatgattatatgttcagaggaagagcaaaatatggatctaacaaagagccacactgtcgtcattggatttggtccttctgaactacaagaacttggtaaaactaatttagaacacactactggccagctaacaacaatgaacagacagatagctgtaaaagttgaaaaatgtggtaaaagtcccatagaaaaaagtggagtgcttaaatctaactgtattatggatgtgttagaggacgaaagtgtacagaaacctaaatttccaaaggaaaagcaaaatgtcaaaatttggggaaggaaaagtgttggtggaccaaaaattgataagactattgtattttcagaagacgataagaatgatatggatatcactaagagttatacaatagaaataaaccatagacctttattagagaaacgtgattgtcatttggtgccattggcaggaacttctgaaactattttatatacatgtgggcaggatgacatggagatcactagaagtcacacaactgccttagaatgtaaaactgtctcaccagatgaaataactactaggcctatggacaaaactgtagtgtttgtagataatcatgttgaactagaaatgacagagtcccatactgttttcattgactaccaagaaaaggaaagaacagacagacctaactttgaactatcccaaaggaaaagcctaggaacaccaacagtgatatgtactcctactgaggagagtgttttctttccaggaaatggtgaaagtgaccgtctagtagcaaatgacagccagctaacccctctggaggaatggtctaataataggggccctgtagaggtagctgataacatggaattgtctaaatcagccacttgcaaaaacatcaaagatgtacaaagtcctggatttctgaatgaacctctatcaagcaaaagtcagagaagaaaaagccttaagctaaaaaatgacaagaccattgtattttcagagaatcataaaaatgatatggatattacccagagttgtatggtggaaatagataacgaaagtgccctggaggataaagaggacttccatttggcaggggcttctaaaactattttgtattcatgtgggcaggatgacatggagatcactaggagtcacacaactgccttagaatgtaaaactctcctgccaaatgaaatagctattaggcccatggacaaaaccgtattgttcacagataattacagtgatctggaagtcaccgattcccatactgttttcattgactgtcaagccacagagaaaatacttgaagaaaaccctaaatttggaataggaaaaggaaaaaacttgggtgtttcctttcctaaggataatagctgtgttcaagaaatcgctgaaaaacaagcactggctgtaggaaacaaaatagttcttcacaccgagcaaaagcaacaactctttgctgctactaatagaactactaatgaaatcatcaaatttcatagtgctgctatggatgaaaaggtcataggggaagttgtagaccaggcctgtacattggaaaaagcgcaagttgaaagctgtcagttaaataatagagatagaagaaatgtggactttacaagtagtcatgcaactgctgtttgtggatccagtgataattattcctgtttaccaaatgttatttcctgtactgataatttggagggtagtgccatgctcttatgtgataaagatgaggaaaaagccaattattgcccagtgcaaaatgatcttgcttatgcaaatgattttgccagtgaatattacttggaatctgagggacagcctctctctgctccttgtcctttgttagagaaggaagaagttattcaaaccagtaccaaaggacagttagactgtgttataacactgcacaaagatcaagatctgattaaggatccacgaaatctattggctaatcaaactttagtatatagtcaagatctgggggagatgactaaacttaattcaaagcgagtatcttttaagcttccaaaggatcaaatgaaagtctatgttgatgacatttatgttattcctcagcctcatttctcanccgaccaacctccattacctaaaaaaggacagagtagtatcaataaagaagaagtaatactgtctaaagctggaaataagagtttaaatattatagaaaattcctctgcacccatatgtgaaaacaagcccaaaatactcaatagtgaggaatggtttgctgcagcctgtaaaaaagaactgaaggaaaatattcaaacaactaactataatacagctctagatttccacagtaactcagacgtaactaagcaagtcattcaaactcatgtcaatgctggagaagcaccagatcctgtaattacatctaatgttccatgttttcatagtatcaaaccaaatctgaataatttgaatggaaaaactggagagtttttagcctttcaaactgttcatctaccaccccttccagagcaattacttgaattaggaaataaggcacacaatgatatgcatatagtgcaagctacagaaatacataatattaacataatctccagcaatgctaaagatagtagagatgaggaaaataaaaagtctcataatggagctgaaaccacctctctaccgccaaagacagtttttaaagataaagtaaggagatgttctttgggaatctttttgcctagattgcccaacaagagaaattgtagtgtcactggtattgatgacctggaacagattccagcagacacaactgatataaatcacttagaaactcagccggtctctagcaaagattcaggcattggatctgttgcaggtaaactgaacctaagtccttctcaatatataaatgaggaaaatcttcctgtatatcctgatgagatcaattcttcagactctattaacatagaaactgaggaaaaggccttgattgagacataccaaaaagagatttcaccatatgaaaataaaatgggaaaaacttgcaatagccaaaaaagaacgtgggtacaagaagaagaagatattcataaggagaaaaaaatcagaaaaaatgagattaagtttagtgatacgacacaagatcgggagatttttgatcaccatactgaagaggatatagataaaagtgctaacagtgtattgataaaaaacctgagcaggaccccatctagttgcagcagctctctggattcaatcaaggctgatgggacctctctggacttcagcacttaccgcagtagtcaaatggaatcacagtttctcagagatactatttgtgaagagagcttgagggagaaactccaagatgggagaataacaataagggagttctttatacttctccaggtccacatcttgatacagaaaccccgacagagcaatctcccaggcaattttactgtaaacacaccacctactccagaagacctgatgttaagtcaatatgtttaccgacccaagatacagatttatagagaagattgtgaggctcgtcgccaaaagattgaagaattaaagctttctgcatcgaaccaagataagctgttggttgatataaataagaacctgtgggaaaaaatgagacactgctctgacaaagagctgaaggcctttggaatttatcttaacaaaataaagtcatgttttaccaagatgactaaagtcttcactcaccaaggaaaagtggctctgtatggcaagctggtgcagtcagctcagaatgagagggagaaacttcaaataaagatagatgagatggataaaatacttaagaagatcgataactgcctcactgagatggaaacagaaactaagaatttggaggatgaagagaaaaacaatcctgtggaagaatgggattctgaaatgagagctgcagaaaaagaattggaacagctgaaaactgaagaagaggagcttcaaagaaatctcttagaactggaggtacaaaaagagcagacccttgctcaaatagactttatgcaaaaacaaagaaatagaactgaagagctactggatcagttgagcttgtctgagtgggatgtcgttgagtggagtgatgatcaagctgtattcacctttgtttatgacacgatacaactcaccatcacctttgaagagtcagttgttggtttccctttcctggacaagcgttataggaagattgttgatgtcaattttcaatctctgttagatgaggatcaagctcctccttcctcccttttagttcataagcttattttccagtacgttgaagaaaaggaatcctggaagaagacatgtacaacccagcatcagttacccaagatgcttgaagaattctcactggtagtgcaccattgcagactccttggagaggagattgagtatttaaagagatggggaccaaattataacctaatgaacatagatattaataataatgaattgagacttttattctctagctccgcagcatttgcaaagtttgaaataactttgtttctctcagcctattatccatctgtaccattaccttccaccattcagaatcacgttgggaacactagccaagatgatattgctaccattctatctaaagtgccactggagaacaactacctgaagaatgtagtcaagcaaatttaccaagatctgtttcaggactgccatttctaccactagacccttggaccaccattggaacaaccaagcagaatgtacttgatattatttcagggtcccattgctgttcagcctttgtttttacgtcattacaagctgagtaaaattccttctgatgatgttatagttaatctgtatgttttttatatctctgcagaatgatggtgatgaagtctggatggtaggcctcatagcctactatcaacttactcatctttgtaccaaaggtttaagtaataggacacttaggaaaaatgtctcctaactaaactagtgctttctgctttagtacaagccctaaggattaacttaagtataagaagtgttatcactgacaagaacattagccattttcccataactagatagagctatgattttttaggttgcctggcttctgcctagcagatatttctggagtagaaatgtatctgtctacaaactattatcctttttctccgttactaaaatgctattaagagaaagtagggctgggagccaccacacccagcaatgttttcttaataagtatagtttttctagggaaagttaattcatttttgtctagtacatatatgtaaatatattaatgttgtttttgtgtttgtgatgtagtaaggagatgtacatagaaattcattgaggtatatagatactcatctgtctaggcagttcccaattttctgaagaatgttttctgatgccatacccttgtcatacatattattaaatgaccaatattatgtatgaagtagacaaaaaaatttactcaaacttcattcaaatcctaattgtgataatttttgttttatatttaattataaaccaaaatacatttgcatttttaagctaatttgtctcaaaattttgctttatatttttggatcaggttaaagtcctgtggatcccctgaatgttattgtccctcttgattggtttttacttctgagctatacgtcaaaagacacataagcttcaaaagtcaagacaaacctcatttgccataaaaatcaagatatagatgttctgttccgtaaactccttgaaaaacattttaaagtcatcaatatgatctgtttcccatgaaacttaagttagctttcttattggagttatttcttttctgtaagtctgaaaagtagagattttgttttacgcattttagtaacctgcaacaaccaactctaaaaaagatttggcttgtaatgacggtctctgcttttttgggtttggagtacacaattgtaatatttacttagttatttgtgtttttctttgttcaaggtattgactagtttcataaattttttgaaagtttttctttcattggttggaaagcagattacattttgcactattaaaataagtttattactttaaa

SEQ ID NO: 456634 - DNA, 1160 bp, Homo sapiens
ccgagtagctgggactacaggtgcccaccaccatgccgggctaattttttgtctttttagtagaaatggggtttcacgatgttggccaggatggtctcgatctcctgacctcgtgatccgcctgcctcggcttcaaagtgctgggattacaggtgtgagccaccacacccagcaatgttttcttaataagtatagtttttctagggaaagttaattcatttttgtctagtacatatatgtaaatatattaatgttgtttttgtgtttgtgatgtagtaaggagatgtacatagaaattcattgaggtatatagatactcatctgtctaggcagttcccaattttctgaagaatgttttacagcaaaattttctattttcttttattaaatagtgacacgtcaaacaatgtcacatccaaaacactagtttcatcaatttctagcagtaataatagacttgctgtaagtattgttttctgatgccatacccttgtcatacatattattaaatgaccaatattatgtatgaagtagacaaaaaaatttactcaaacttcattcaaatcctaattgtgataatttttgttttatatttaattataaaccaaaatacatttgcatttttaagctaatttgtctcaaaattttgctttatatttttggatcaggttaaagtcctgtggatcccctgaatgttattgtccctcttgattggtttttacttctgagctatacgtcaaaagacacataagcttcaaaagtcaagacaaacctcatttgccataaaaatcaagatatagatgttctgttccgtaaactccttgaaaaacattttaaagtcatcaatatgatctgtttcccatgaaacttaagttagctttcttattggagttatttcttttctgtaagtctgaaaagtagagattttgttttacgcattttagtaacctgcaacaaccaactctaaaaaagatttggcttgtaatgacggtctctgcttttttgggtttggagtacacaattgtaatatttacttagttatttgtgtttttctttgttcaaggtattgactagtttcataaattttttgaaagtttttctttcattggttggaaagcagattacattttgcactattaaaataagtttattactttaaa

SEQ ID NO: 456635 - DNA, 6786 bp, Homo sapiens
  misc_feature (3)..(3): n is a, c, g, or t
  misc_feature (4503)..(4503): n is a, c, g, or t
ggnagatttgaatacttcactgaggcgagccgggcgttgtgagcggactgctagaggcggctgtctgtttccgctctaaggaaactcagagcgtgtggaccccaaacaagtctgcgcaaaatttgtcgaggaggtttgccgcggcagaaaagttttcttcaaaaatggatggggtgtcttcagaggctaatgaagaaaatgacaatatagagagacctgttagaagacggcattcttcaatattgaaacccccaaggagtcctcttcaggacctcagaggtgggaatgaaacagttcaggaatccaatgctttgagaaataagaaaaactctcgtcgagtcagctttgcagatactataaaggtattccagacggagtctcatatgaaaatagtgagaaagtcagaaatggaagaaacagaagcaggagaaaatcttcttttgatacagaataagaaattagaagataattactgtgaaattactgggatgaacacattgctttctgctcccattcatacccagatgcaacagaaggagttttcaattatagaacatacccgtgaaaggaaacatgcaaatgaccagacagtcattttttcagatgaaaaccagatggacctgacatcaagtcacactgtaatgattaccaaaggccttttagataatcccataagtgaaaagtccaccaagatagataccacatcatttctagctaatttaaagcttcacaccgaggactcaagaatgaaaaaagaagtaaatttttccgtggatcaaaacacttcttcagaaaataaaatagatttcaatgacttcataaaaagattgaaaacaggaaaatgtagtgcttttcctgatgtgcctgataaagaaaattttgagatacctatttattccaaggaaccgaacagtgcctcttctacacatcaaatgcatgtatctcttaaggaagatgaaaataacagtaatattactaggctctttagagaaaaagatgatgggatgaatttcacccagtgtcatacagccaatattcagacattgattcccacatccagtgagaccaactcacgggaatctaaaggtaatgatattacaatttatggcaatgactttatggacttgacatttaaccacactttgcagatcttacctgcaacaggtaatttttctgaaatagaaaatcaaactcagaatgccatggatgtaacaacaggttatggaactaaagcttcaggaaataaaacagtttttaagagtaaacaaaatactgcttttcaagacctttccataaactctgcagacaaaatacatattaccagaagtcatattatgggggcagaaactcacatagtctcacagacttgtaatcaggatgccagaatattagccatgaccccagaatctatatattctaatccatctattcaaggttgtaagactgttttctattctagttgtaatgatgccatggaaatgaccaaatgtctctcaaatatgagagaggagaaaaatttgctaaagcatgacagtaattattctaaaatgtattgcaatccagatgctatgtcttctctcacagagaaaactatttattccggagaggagaacatggacattaccaagagtcatacagttgcaatagataatcaaatttttaaacaagatcaatcaaatgtgcaaatagcagctgcaccaacacccgaaaaagaaatgatgctccaaaatcttatgaccacatcagaagatgggaaaatgaatgtaaattgtaactcagttcctcatgtatctaaggaaagaatacagcagagcctgtcaaatcctttgtctatttcattgactgatagaaagactgaactcttatcaggtgaaaatacggatttgactgaaagtcacacaagtaacttaggaagtcaggttcctcttgcagcttataatctagcaccggagagtaccagtgaatctcactctcagagcaaaagctcttcagatgaatgtgaagaaattaccaaaagtcgtaatgaaccatttcagcgatcagacataatagccaaaaacagcttaaccgacacctggaacaaagacaaagattgggttttgaagattttgccctaccttgataaagattctcctcagtcagctgattgtaatcaggagatagcaacaagccataatatagtctactgtggtggagttcttgataaacaaataactaatagaaatacagtatcatgggaacaatctttgttttctaccacaaagccattattttcatcaggacagttctctatgaaaaatcatgatactgctataagtagtcatacagtgaaatctgtactaggccagaattctaaactggctgagccactgaggaaaagtttaagcaatcccacacctgactattgccatgacaagatgattatatgttcagaggaagagcaaaatatggatctaacaaagagccacactgtcgtcattggatttggtccttctgaactacaagaacttggtaaaactaatttagaacacactactggccagctaacaacaatgaacagacagatagctgtaaaagttgaaaaatgtggtaaaagtcccatagaaaaaagtggagtgcttaaatctaactgtattatggatgtgttagaggacgaaagtgtacagaaacctaaatttccaaaggaaaagcaaaatgtcaaaatttggggaaggaaaagtgttggtggaccaaaaattgataagactattgtattttcagaagacgataagaatgatatggatatcactaagagttatacaatagaaataaaccatagacctttattagagaaacgtgattgtcatttggtgccattggcaggaacttctgaaactattttatatacatgtgggcaggatgacatggagatcactagaagtcacacaactgccttagaatgtaaaactgtctcaccagatgaaataactactaggcctatggacaaaactgtagtgtttgtagataatcatgttgaactagaaatgacagagtcccatactgttttcattgactaccaagaaaaggaaagaacagacagacctaactttgaactatcccaaaggaaaagcctaggaacaccaacagtgatatgtactcctactgaggagagtgttttctttccaggaaatggtgaaagtgaccgtctagtagcaaatgacagccagctaacccctctggaggaatggtctaataataggggccctgtagaggtagctgataacatggaattgtctaaatcagccacttgcaaaaacatcaaagatgtacaaagtcctggatttctgaatgaacctctatcaagcaaaagtcagagaagaaaaagccttaagctaaaaaatgacaagaccattgtattttcagagaatcataaaaatgatatggatattacccagagttgtatggtggaaatagataacgaaagtgccctggaggataaagaggacttccatttggcaggggcttctaaaactattttgtattcatgtgggcaggatgacatggagatcactaggagtcacacaactgccttagaatgtaaaactctcctgccaaatgaaatagctattaggcccatggacaaaaccgtattgttcacagataattacagtgatctggaagtcaccgattcccatactgttttcattgactgtcaagccacagagaaaatacttgaagaaaaccctaaatttggaataggaaaaggaaaaaacttgggtgtttcctttcctaaggataatagctgtgttcaagaaatcgctgaaaaacaagcactggctgtaggaaacaaaatagttcttcacaccgagcaaaagcaacaactctttgctgctactaatagaactactaatgaaatcatcaaatttcatagtgctgctatggatgaaaaggtcataggggaagttgtagaccaggcctgtacattggaaaaagcgcaagttgaaagctgtcagttaaataatagagatagaagaaatgtggactttacaagtagtcatgcaactgctgtttgtggatccagtgataattattcctgtttaccaaatgttatttcctgtactgataatttggagggtagtgccatgctcttatgtgataaagatgaggaaaaagccaattattgcccagtgcaaaatgatcttgcttatgcaaatgattttgccagtgaatattacttggaatctgagggacagcctctctctgctccttgtcctttgttagagaaggaagaagttattcaaaccagtaccaaaggacagttagactgtgttataacactgcacaaagatcaagatctgattaaggatccacgaaatctattggctaatcaaactttagtatatagtcaagatctgggggagatgactaaacttaattcaaagcgagtatcttttaagcttccaaaggatcaaatgaaagtctatgttgatgacatttatgttattcctcagcctcatttctcanccgaccaacctccattacctaaaaaaggacagagtagtatcaataaagaagaagtaatactgtctaaagctggaaataagagtttaaatattatagaaaattcctctgcacccatatgtgaaaacaagcccaaaatactcaatagtgaggaatggtttgctgcagcctgtaaaaaagaactgaaggaaaatattcaaacaactaactataatacagctctagatttccacagtaactcagacgtaactaagcaagtcattcaaactcatgtcaatgctggagaagcaccagatcctgtaattacatctaatgttccatgttttcatagtatcaaaccaaatctgaataatttgaatggaaaaactggagagtttttagcctttcaaactgttcatctaccaccccttccagagcaattacttgaattaggaaataaggcacacaatgatatgcatatagtgcaagctacagaaatacataatattaacataatctccagcaatgctaaagatagtagagatgaggaaaataaaaagtctcataatggagctgaaaccacctctctaccgccaaagacagtttttaaagataaagtaaggagatgttctttgggaatctttttgcctagattgcccaacaagagaaattgtagtgtcactggtattgatgacctggaacagattccagcagacacaactgatataaatcacttagaaactcagccggtctctagcaaagattcaggcattggatctgttgcaggtaaactgaacctaagtccttctcaatatataaatgaggaaaatcttcctgtatatcctgatgagatcaattcttcagactctattaacatagaaactgaggaaaaggccttgattgagacataccaaaaagagatttcaccatatgaaaataaaatgggaaaaacttgcaatagccaaaaaagaacgtgggtacaagaagaagaagatattcataaggagaaaaaaatcagaaaaaatgagattaagtttagtgatacgacacaagatcgggagatttttgatcaccatactgaagaggatatagataaaagtgctaacagtgtattgataaaaaacctgagcaggaccccatctagttgcagcagctctctggattcaatcaaggctgatgggacctctctggacttcagcacttaccgcagtagtcaaatggaatcacagtttctcagagatactatttgtgaagagagcttgagggagaaactccaagatgggagaataacaataagggagttctttatacttctccaggtccacatcttgatacagaaaccccgacagagcaatctcccaggcaattttactgtaaacacaccacctactccagaagacctgatgttaagtcaatatgtttaccgacccaagatacagatttatagagaagattgtgaggctcgtcgccaaaagattgaagaattaaagctttctgcatcgaaccaagataagctgttggttgatataaataagaacctgtgggaaaaaatgagacactgctctgacaaagagctgaaggcctttggaatttatcttaacaaaataaagtcatgttttaccaagatgactaaagtcttcactcaccaaggaaaagtggctctgtatggcaagctggtgcagtcagctcagaatgagagggagaaacttcaaataaagatagatgagatggataaaatacttaagaagatcgataactgcctcactgagatggaaacagaaactaagaatttggaggatgaagagaaaaacaatcctgtggaagaatgggattctgaaatgagagctgcagaaaaagaattggaacagctgaaaactgaagaagaggagcttcaaagaaatctcttagaactggaggtacaaaaagagcagacccttgctcaaatagactttatgcaaaaacaaagaaatagaactgaagagctactggatcagttgagcttgtctgagtgggatgtcgttgagtggagtgatgatcaagctgtattcacctttgtttatgacacgatacaactcaccatcacctttgaagagtcagttgttggtttccctttcctggacaagcgttataggaagattgttgatgtcaattttcaatctctgttagatgaggatcaagctcctccttcctcccttttagttcataagcttattttccagtacgttgaagaaaaggaatcctggaagaagacatgtacaacccagcatcagttacccaaggtaaagcccgattgaagtatttaaagga

SEQ ID NO: 456636 - DNA, 1707 bp, Homo sapiens
  misc_feature (3)..(3): n is a, c, g, or t
ggnagatttgaatacttcactgaggcgagccgggcgttgtgagcggactgctagaggcggctgtctgtttccgctctaaggaaactcagagcgtgtggaccccaaacaagtctgcgcaaaatttgtcgaggaggtttgccgcggcagaaaagttttcttcaaaaatggatggggtgtcttcagaggctaatgaagaaaatgacaatatagagagacctgttagaagacggcattcttcaatattgaaacccccaaggagtcctcttcaggacctcagaggtgggaatgaaacagttcaggaatccaatgctttgagaaataagaaaaactctcgtcgagtcagctttgcagatactataaaggtattccagacggagtctcatatgaaaatagtgagaaagtcagaaatggaagaaacagaagcaggagaaaatcttcttttgatacagaataagaaattagaagataattactgtgaaattactgggatgaacacattgctttctgctcccattcatacccagatgcaacagaaggagttttcaattatagaacatacccgtgaaaggaaacatgcaaatgaccagacagtcattttttcagatgaaaaccagatggacctgacatcaagtcacactgtaatgattaccaaaggccttttagataatcccataagtgaaaagtccaccaagatagataccacatcatttctagctaatttaaagcttcacaccgaggactcaagaatgaaaaaagaagtaaatttttccgtggatcaaaacacttcttcagaaaataaaatagatttcaatgacttcataaaaagattgaaaacaggaaaatgtagtgcttttcctgatgtgcctgataaagaaaattttgagatacctatttattccaaggaaccgaacagtgcctcttctacacatcaaatgcatgtatctcttaaggaagatgaaaataacagtaatattactaggctctttagagaaaaagatgatgggatgaatttcacccagtgtcatacagccaatattcagacattgattcccacatccagtgagaccaactcacgggaatctaaaggtaatgatattacaatttatggcaatgactttatggacttgacatttaaccacactttgcagatcttacctgcaacaggtaatttttctgaaatagaaaatcaaactcagaatgccatggatgtaacaacaggttatggaactaaagcttcaggaaataaaacagtttttaagagtaaacaaaatactgcttttcaagacctttccataaactctgcagacaaaatacatattaccagaagtcatattatgggggcagaaactcacatagtctcacagacttgtaatcaggatgccagaatattagccatgaccccagaatctatatattctaatccatctattcaaggttgtaagactgttttctattctagttgtaatgatgccatggaaatgaccaaatgtctctcaaatatgagagaggagaaaaatttgctaaagcatgacagtaattattctaaaatgtattgcaatccagatgctatgtcttctctcacagagaaaactatttattccggagaggagaacatggacattaccaagagtcatacagttgcaatagataatcaaatttttaaacaagatcaatcaaatgtgcaaatagcagctgcaccaacacccg

SEQ ID NO: 456637 - DNA, 8490 bp, Homo sapiens
  misc_feature (3)..(3): n is a, c, g, or t
  misc_feature (4503)..(4503): n is a, c, g, or t
ggnagatttgaatacttcactgaggcgagccgggcgttgtgagcggactgctagaggcggctgtctgtttccgctctaaggaaactcagagcgtgtggaccccaaacaagtctgcgcaaaatttgtcgaggaggtttgccgcggcagaaaagttttcttcaaaaatggatggggtgtcttcagaggctaatgaagaaaatgacaatatagagagacctgttagaagacggcattcttcaatattgaaacccccaaggagtcctcttcaggacctcagaggtgggaatgaaacagttcaggaatccaatgctttgagaaataagaaaaactctcgtcgagtcagctttgcagatactataaaggtattccagacggagtctcatatgaaaatagtgagaaagtcagaaatggaagaaacagaagcaggagaaaatcttcttttgatacagaataagaaattagaagataattactgtgaaattactgggatgaacacattgctttctgctcccattcatacccagatgcaacagaaggagttttcaattatagaacatacccgtgaaaggaaacatgcaaatgaccagacagtcattttttcagatgaaaaccagatggacctgacatcaagtcacactgtaatgattaccaaaggccttttagataatcccataagtgaaaagtccaccaagatagataccacatcatttctagctaatttaaagcttcacaccgaggactcaagaatgaaaaaagaagtaaatttttccgtggatcaaaacacttcttcagaaaataaaatagatttcaatgacttcataaaaagattgaaaacaggaaaatgtagtgcttttcctgatgtgcctgataaagaaaattttgagatacctatttattccaaggaaccgaacagtgcctcttctacacatcaaatgcatgtatctcttaaggaagatgaaaataacagtaatattactaggctctttagagaaaaagatgatgggatgaatttcacccagtgtcatacagccaatattcagacattgattcccacatccagtgagaccaactcacgggaatctaaaggtaatgatattacaatttatggcaatgactttatggacttgacatttaaccacactttgcagatcttacctgcaacaggtaatttttctgaaatagaaaatcaaactcagaatgccatggatgtaacaacaggttatggaactaaagcttcaggaaataaaacagtttttaagagtaaacaaaatactgcttttcaagacctttccataaactctgcagacaaaatacatattaccagaagtcatattatgggggcagaaactcacatagtctcacagacttgtaatcaggatgccagaatattagccatgaccccagaatctatatattctaatccatctattcaaggttgtaagactgttttctattctagttgtaatgatgccatggaaatgaccaaatgtctctcaaatatgagagaggagaaaaatttgctaaagcatgacagtaattattctaaaatgtattgcaatccagatgctatgtcttctctcacagagaaaactatttattccggagaggagaacatggacattaccaagagtcatacagttgcaatagataatcaaatttttaaacaagatcaatcaaatgtgcaaatagcagctgcaccaacacccgaaaaagaaatgatgctccaaaatcttatgaccacatcagaagatgggaaaatgaatgtaaattgtaactcagttcctcatgtatctaaggaaagaatacagcagagcctgtcaaatcctttgtctatttcattgactgatagaaagactgaactcttatcaggtgaaaatacggatttgactgaaagtcacacaagtaacttaggaagtcaggttcctcttgcagcttataatctagcaccggagagtaccagtgaatctcactctcagagcaaaagctcttcagatgaatgtgaagaaattaccaaaagtcgtaatgaaccatttcagcgatcagacataatagccaaaaacagcttaaccgacacctggaacaaagacaaagattgggttttgaagattttgccctaccttgataaagattctcctcagtcagctgattgtaatcaggagatagcaacaagccataatatagtctactgtggtggagttcttgataaacaaataactaatagaaatacagtatcatgggaacaatctttgttttctaccacaaagccattattttcatcaggacagttctctatgaaaaatcatgatactgctataagtagtcatacagtgaaatctgtactaggccagaattctaaactggctgagccactgaggaaaagtttaagcaatcccacacctgactattgccatgacaagatgattatatgttcagaggaagagcaaaatatggatctaacaaagagccacactgtcgtcattggatttggtccttctgaactacaagaacttggtaaaactaatttagaacacactactggccagctaacaacaatgaacagacagatagctgtaaaagttgaaaaatgtggtaaaagtcccatagaaaaaagtggagtgcttaaatctaactgtattatggatgtgttagaggacgaaagtgtacagaaacctaaatttccaaaggaaaagcaaaatgtcaaaatttggggaaggaaaagtgttggtggaccaaaaattgataagactattgtattttcagaagacgataagaatgatatggatatcactaagagttatacaatagaaataaaccatagacctttattagagaaacgtgattgtcatttggtgccattggcaggaacttctgaaactattttatatacatgtgggcaggatgacatggagatcactagaagtcacacaactgccttagaatgtaaaactgtctcaccagatgaaataactactaggcctatggacaaaactgtagtgtttgtagataatcatgttgaactagaaatgacagagtcccatactgttttcattgactaccaagaaaaggaaagaacagacagacctaactttgaactatcccaaaggaaaagcctaggaacaccaacagtgatatgtactcctactgaggagagtgttttctttccaggaaatggtgaaagtgaccgtctagtagcaaatgacagccagctaacccctctggaggaatggtctaataataggggccctgtagaggtagctgataacatggaattgtctaaatcagccacttgcaaaaacatcaaagatgtacaaagtcctggatttctgaatgaacctctatcaagcaaaagtcagagaagaaaaagccttaagctaaaaaatgacaagaccattgtattttcagagaatcataaaaatgatatggatattacccagagttgtatggtggaaatagataacgaaagtgccctggaggataaagaggacttccatttggcaggggcttctaaaactattttgtattcatgtgggcaggatgacatggagatcactaggagtcacacaactgccttagaatgtaaaactctcctgccaaatgaaatagctattaggcccatggacaaaaccgtattgttcacagataattacagtgatctggaagtcaccgattcccatactgttttcattgactgtcaagccacagagaaaatacttgaagaaaaccctaaatttggaataggaaaaggaaaaaacttgggtgtttcctttcctaaggataatagctgtgttcaagaaatcgctgaaaaacaagcactggctgtaggaaacaaaatagttcttcacaccgagcaaaagcaacaactctttgctgctactaatagaactactaatgaaatcatcaaatttcatagtgctgctatggatgaaaaggtcataggggaagttgtagaccaggcctgtacattggaaaaagcgcaagttgaaagctgtcagttaaataatagagatagaagaaatgtggactttacaagtagtcatgcaactgctgtttgtggatccagtgataattattcctgtttaccaaatgttatttcctgtactgataatttggagggtagtgccatgctcttatgtgataaagatgaggaaaaagccaattattgcccagtgcaaaatgatcttgcttatgcaaatgattttgccagtgaatattacttggaatctgagggacagcctctctctgctccttgtcctttgttagagaaggaagaagttattcaaaccagtaccaaaggacagttagactgtgttataacactgcacaaagatcaagatctgattaaggatccacgaaatctattggctaatcaaactttagtatatagtcaagatctgggggagatgactaaacttaattcaaagcgagtatcttttaagcttccaaaggatcaaatgaaagtctatgttgatgacatttatgttattcctcagcctcatttctcanccgaccaacctccattacctaaaaaaggacagagtagtatcaataaagaagaagtaatactgtctaaagctggaaataagagtttaaatattatagaaaattcctctgcacccatatgtgaaaacaagcccaaaatactcaatagtgaggaatggtttgctgcagcctgtaaaaaagaactgaaggaaaatattcaaacaactaactataatacagctctagatttccacagtaactcagacgtaactaagcaagtcattcaaactcatgtcaatgctggagaagcaccagatcctgtaattacatctaatgttccatgttttcatagtatcaaaccaaatctgaataatttgaatggaaaaactggagagtttttagcctttcaaactgttcatctaccaccccttccagagcaattacttgaattaggaaataaggcacacaatgatatgcatatagtgcaagctacagaaatacataatattaacataatctccagcaatgctaaagatagtagagatgaggaaaataaaaagtctcataatggagctgaaaccacctctctaccgccaaagacagtttttaaagataaagtaaggagatgttctttgggaatctttttgcctagattgcccaacaagagaaattgtagtgtcactggtattgatgacctggaacagattccagcagacacaactgatataaatcacttagaaactcagccggtctctagcaaagattcaggcattggatctgttgcaggtaaactgaacctaagtccttctcaatatataaatgaggaaaatcttcctgtatatcctgatgagatcaattcttcagactctattaacatagaaactgaggaaaaggccttgattgagacataccaaaaagagatttcaccatatgaaaataaaatgggaaaaacttgcaatagccaaaaaagaacgtgggtacaagaagaagaagatattcataaggagaaaaaaatcagaaaaaatgagattaagtttagtgatacgacacaagatcgggagatttttgatcaccatactgaagaggatatagataaaagtgctaacagtgtattgataaaaaacctgagcaggaccccatctagttgcagcagctctctggattcaatcaaggctgatgggacctctctggacttcagcacttaccgcagtagtcaaatggaatcacagtttctcagagatactatttgtgaagagagcttgagggagaaactccaagatgggagaataacaataagggagttctttatacttctccaggtccacatcttgatacagaaaccccgacagagcaatctcccaggcaattttactgtaaacacaccacctactccagaagacctgatgttaagtcaatatgtttaccgacccaagatacagatttatagagaagattgtgaggctcgtcgccaaaagattgaagaattaaagctttctgcatcgaaccaagataagctgttggttgatataaataagaacctgtgggaaaaaatgagacactgctctgacaaagagctgaaggcctttggaatttatcttaacaaaataaagtcatgttttaccaagatgactaaagtcttcactcaccaaggaaaagtggctctgtatggcaagctggtgcagtcagctcagaatgagagggagaaacttcaaataaagatagatgagatggataaaatacttaagaagatcgataactgcctcactgagatggaaacagaaactaagaatttggaggatgaagagaaaaacaatcctgtggaagaatgggattctgaaatgagagctgcagaaaaagaattggaacagctgaaaactgaagaagaggagcttcaaagaaatctcttagaactggaggtacaaaaagagcagacccttgctcaaatagactttatgcaaaaacaaagaaatagaactgaagagctactggatcagttgagcttgtctgagtgggatgtcgttgagtggagtgatgatcaagctgtattcacctttgtttatgacacgatacaactcaccatcacctttgaagagtcagttgttggtttccctttcctggacaagcgttataggaagattgttgatgtcaattttcaatctctgttagatgaggatcaagctcctccttcctcccttttagttcataagcttattttccagtacgttgaagaaaaggaatcctggaagaagacatgtacaacccagcatcagttacccaagatgcttgaagaattctcactggtagtgcaccattgcagactccttggagaggagattgagtatttaaagagatggggaccaaattataacctaatgaacatagatattaataataatgaattgagacttttattctctagctccgcagcatttgcaaagtttgaaataactttgtttctctcagcctattatccatctgtaccattaccttccaccattcagaatcacgttgggaacactagccaagatgatattgctaccattctatctaaagtgccactggagaacaactacctgaagaatgtagtcaagcaaatttaccaagatctgtttcaggactgccatttctaccactagacccttggaccaccattggaacaaccaagcagaatgtacttgatattatttcagggtcccattgctgttcagcctttgtttttacgtcattacaagctgagtaaaattccttctgatgatgttatagttaatctgtatgttttttatatctctgcagaatgatggtgatgaagtctggatggtaggcctcatagcctactatcaacttactcatctttgtaccaaaggtttaagtaataggacacttaggaaaaatgtctcctaactaaactagtgctttctgctttagtacaagccctaaggattaacttaagtataagaagtgttatcactgacaagaacattagccattttcccataactagatagaggagccaccacacccagcaatgttttcttaataagtatagtttttctagggaaagttaattcatttttgtctagtacatatatgtaaatatattaatgttgtttttgtgtttgtgatgtagtaaggagatgtacatagaaattcattgaggtatatagatactcatctgtctaggcagttcccaattttctgaagaatgttttacagcaaaattttctattttcttttattaaatagtgacacgtcaaacaatgtcacatccaaaacactagtttcatcaatttctagcagtaataatagacttgctgtaagtattgttttctgatgccatacccttgtcatacatattattaaatgaccaatattatgtatgaagtagacaaaaaaatttactcaaacttcattcaaatcctaattgtgataatttttgttttatatttaattataaaccaaaatacatttgcatttttaagctaatttgtctcaaaattttgctttatatttttggatcaggttaaagtcctgtggatcccctgaatgttattgtccctcttgattggtttttacttctgagctatacgtcaaaagacacataagcttcaaaagtcaagacaaacctcatttgccataaaaatcaagatatagatgttctgttccgtaaactccttgaaaaacattttaaagtcatcaatatgatctgtttcccatgaaacttaagttagctttcttattggagttatttcttttctgtaagtctgaaaagtagagattttgttttacgcattttagtaacctgcaacaaccaactctaaaaaagatttggcttgtaatgacggtctctgcttttttgggtttggagtacacaattgtaatatttacttagttatttgtgtttttctttgttcaaggtattgactagtttcataaattttttgaaagtttttctttcattggttggaaagcagattacattttgcactattaaaataagtttattactttaaa

SEQ ID NO: 456638 - DNA, 1945 bp, Homo sapiens
  misc_feature (1443)..(1443): n is a, c, g, or t
atttaaagaaacacaggacagacactgctttccctacagagaccatgctctgggaggctcactctcaggtcagagtgagaggaaggggcctctcactgtgctgcctcggctgttgagctcacacttctccctgcgcctgctcgctcctccatcctgcctcattgctggcccaaggggcctttaggagtggcccctggtgactgtgcaccccactcccctataccccaagaggagcagccagagctgcctgcgtctcttctgggagggagaggaggtcaggtttgggggggcataggaaaccccgcgcacaccctgcctccttaccactgcaatgcctgctcaggacagaattccagagctgcccccacaaaacagactcttagtccggagctgctgacaggcagggaggcccctgggcctcagccttttccatagcagccacagctggtcctgtctccacccctagcttccactctggggtctatagccaggtttgtatgtgggggattcatgtatgcggtacgagtgcccctgaagatagacaagaaaacccttcttctggcaaagcagagggcactggggacccctcaagagggaaacattgctgtgtcagtctctgaaccaaaccgagggtcccagtagctgtgattcccggctctgagttctccctcctcactccttgctctcctcacccattgcggtttgggctggttctgcctccacaatgaccaggctgatgatggccccggcgctcaaactgcccctggtggagcctctctctgaccaccctgtcttctttgcccttttcctccccaggtggtagtcaactctccagccaagttagtatcaaaggacagcatgtgtgtgcgcttgcgtgccagccccagcatgtgtctgcgtgtgtctggcgtggatagagtgtgcctgctggcatgtgtacatgtatgtgcatatgtatgagtggggtacacttgtacccctgggtgagcctgcatgtgtgaagctggagtagaagcatttgggggtgggagtgggggctccatccgatggttctaatttcattcccaatttcctgctgcagcagctgcttaagatgtgcctggggttggtgacggtggcgggcgcagggggagggggacacaggctgtgctgctgctgggcctgtgtgagcctgaagacctttctgtcctggcgacccctcagaagggctgcactggatcttgtctgcccggggagcgcacctatccattggagggaagagcctcctgtgggtagaggatggccagctactcagcaaactggacttgagggggcctgggcagctggagccctgctctgaggaagaagcacattccctgaagcgtctggaagatcagagccctgggccaccaagggggtggcctgcaggaagagccccttcacggagaaaccttgctcagaatncctgcgggtgccagtggagccgcttttcgcctttggggcattctggactcagcttgggctgctgctcccgacccctacccccagccccatgcctgcgcttcccctgctgtgtgtagtgggagatctctctgtgcctggcagcccctgcagaccctgggagggagctcaggctgagccaggcactgcaggggagctgggaaagccaagatgggcaaggaaacccttctatggccaggagtggtggctcatgcctgtaatcccaacactgtgagatgccaaggcagaaggatcagcttgaggtcaggagttcaagaccaacctgggcaacatcgtgagactctgtctttacagaaaaaaaaaaaatagtggcatatgcctgtggtcctagctacctcaggaggctgaggtgagaggatcacttgagcccaagaggttgagactggagtgagtggagatcacaccactgcactccaccatgggcgacaaagcgagaccctgtatc

SEQ ID NO: 456639 - DNA, 812 bp, Homo sapiens
cgacatggagaaaccctgtctctactaaaaatacaaaatcagccgggtgtggtggtacatgcctgtaatcccagctactggggaggctgaggcaggagaattgcttgaacctgggaggcggacgtggtggtgagccggagatcacgccattgcactccagcctgggcaacaagagcgaaactccatctcgaaaaacaaaacaaaagtattttttgggttccctttatttcgttactctgttgattgaataactgatgttttgataaattgtaaatgcctacagaaaagggggctcttgttcttcttcaattgagtgaacatttgcatgtcctctgtatgagatatgagtcgtggtagaagcttttgattataaaagtgaataaggtttggttacatctgcttttaatgttgagataggtgtgtcaatacaggaaaacttgaacacagataagaccatggccgttaacagttagaggggttgacatgtggagagctagaagagcacaggaagtaagacaattatggggattcgagtgtgcattgtggagatgggactgggtctcgatcttgaagagtggatggatgggctttttatggtggaacctgaggacttgacagtctattggaggaagtcatgtgggcaatgggtggtggtgggaaatgaaggtgactttgaagaatgacagagtcatatccctggagcatcagatgagggagagagggagggagagtgagtttggtatgctcagggagtgaaggggacacttgtggacatgagagtggggatccactagtttagagcggctagtagt

SEQ ID NO: 456640 - DNA, 239 bp, Homo sapiens
tcccttatacgctgttgttgagaatgcagttgggcacatgatgaaggggcccggaattccggggagagctagaagagcacaggaagtaagacaattatggggattcgagtgtgcattgtggagatgggactgggtctcgatcttgaagagtggatggatgggcttttcctggataagtggtggattagttttgagaccaagctgaggtgtctgtcccagaggtggtgtttgagtgcgtg

SEQ ID NO: 456641 - DNA, 1121 bp, Homo sapiens
atatggaaatgtatatttatatcaaatttaaatttttagaatgatggtgctactatattctaattgttaatttgataattgtaattgtaatttgttaatttgttctaataatattttcatgacattattcatttgctgcttggcttgatggcataacaagtatgggttatttaccctgaaaaggaaacagtatcacccttccagaatctctatttacagctacagaagatgcaacacacctgtttctggaccacttccagatcagatgtgatgcatgctttagatcatttactttgatctaggaattactgtctggcatttcgtggtgtagggtaggtgtctccagcactgtataggtgtctggaattgagataagaatcaatttcaatacaaaatacattttttgcttaaagcacgcaaggattctatgaattcaggtaaattcacagggtggaaaacaggaactaatgttatatattcctgtagttatcttcataatgaagcagaaagaaaaacaaaaaagttacaaaaataaatgaaaagaactgtattttctagaattgaaaaataattcttttagatgatagataagatgtttacatcaacctgcaaaaagtcaatgttgaagaggtctcattgtatctcacagaattttgatttgcctactcacccacaggagacatttctgggacagtagcaacataaggtccatcccaaaactttggctcattatcattaatatcctgcactttgatgatgaattctgattcaggctccaggggctttctggtttctatgtccacagcctgagcacgaagagtgtagaaaggtttttcttctctatctaggctccttattgcatgaatgtcccctgtggtttcatcaatggtaaaaacggtgccagcgccatctcctgagagggtgtatttcgcagtgccctctcccttgtctaagtcggaatggagctttagggaagagagggagagagagaggaagagaaagagaaggacaaagaaagaacaccattaaaaggaagttgccaaattaaaaagtcataatttgcaatacaattcctttaatcaaaaatgttaaataaaaatcttatggttctgttaaattgt

SEQ ID NO: 456642 - DNA, 775 bp, Homo sapiens
agagttctataaatgatggctgtagaaataggcactgtccaggcagttgttttgtggaagtagtgttgttattttctggtgttttccaagtcatctcagatggtgcgtgaaaatgagatgccaaagaaggcttaaaaaagataccctgcaccagcttcagaatgtaagcaaatctttcattccagcgcttaaaagttttgagaaagctaatctaaagttaaatgtttactagcatctctccgattatattttagaaactactgcacaaaaataaaacaaatttcttattttctctgggttgaaaagtgcacataaaatggaaaatgctttttataccactatttccagcagggattttattttcatttgtcatttgccagcctggggtatgttgggagaaggaacaattgatttttgaaaaggtgcatttgtgtgaaaaccaaaaattgtgttcaacaaatactactactaacccatatgtggatatatgtgttttatacatgagtaaaaaaaaaaaaaaaaacatacatatatgtatggcatatatatatatatatatatatatatatatatatatatatatgctatagaaatgccatcaagttaccagtttacttctaaatgtaactgcttaatataaaatatgcatctttttgtagtacctaattcttgcaattcagtgtatttcctggcgagaggcagagatgaacaaccctggacagttaccacatatggctcttatgaggtaatgaggatggttgtgatgagaagggta

SEQ ID NO: 456643 - DNA, 478 bp, Homo sapiens
caatgtttttctcagaggcaaaattaacatggttgacagtttaattgacatatttctttttcgttgtgtgcctttgccaattaaacaaattgcaccctattttgatgttcattttgttaattatttgtaaaactgtagactctgattttttttttttttaattttcaggtgtcagtttcttggtcgggaatgaaaatagtgccaacctgtgataccttcactctaattttactttctgaggaagttttctgtaatagttatttggtgataattattaatactggtgagttttaaaatttttgctttcagcaattttccatttttttcaacatacttatatcgcaatgaggcaaccaaatatgaatcctgagaatgaagatggaaaatgaatattttaatccaatatcgagttgttctttcaacatttttagttttagttttaatcgaaaatataaagttacataattgtgtgaggaat

SEQ ID NO: 456644 - DNA, 372 bp, Homo sapiens
ttaaaaaatatttgatatattcacatttcttaattgcagtatagacaaaatgacctacgaatcaagcattttgttccacggtctctactgttagctgtatgtctcagaaacagcttctttctcaagagagaacaagagggataatgctggatctaaaggcatcatctgaagaagacaaagatatcaacaatcgcaactatttggctttctgtccatcactgagacttttcataatcttcccttcataaataggatctcttgatcagaacagaaaagttgagtcttaaatttcctgtatttatttctgactgatactgagggaagtgcaaatttggttgctatgattaaactccttgattgttcttaatggga

SEQ ID NO: 456645 - DNA, 98 bp, Homo sapiens
ggtatattaaaaaaaagacctttggttattctggctgccaccaattgctttcttgtttcagctgaattttgaagtagctaatcatattttggcatttt

SEQ ID NO: 456646 - DNA, 1585 bp, Homo sapiens
ttgtgaccaactccacctacgcagcagacaaggtgctctgtatgtggatgtgatccgtgtgaacagctactactcttggtatcgcaactacggcacctgggagttgattcagctgcagctgaccgcccagtttgagaattggtgtaagacatcacaatcccattattcagagcgcgtatggagtggaaacgcttgtaaggcttcaccaggatccacctctgatgttcagtgaagaggaccggaaaagtctgctagagcagtaccatctgggtctggatcaaaaacgcagaaaatacgtggttggagagctcatctggaattttgccgatttcatgactaaccagtccaaggatgaaggaaaaactggacctcattatggatttacttttgggatacactcattattccagaggagggtaaaaggctgagaagcttaagatggagctggcttgaaatcctcttgtttatggcagtacatatcggttatgattcaaaaaatatagcccatttccaaaaacctgcaacaaagagatactttctcaggtgtcagtttcttggtcgggaatgaaaatagtgccaacctgtgataccttcactctaattttactttctgaggaagttttctgtaatagttatttggtgataattattaatactggtgagaaaatcaatgtaaaagaggagaaataacccacacaaccacatacaactaggaaatgatagatggatctgaaaaaaaggatatgcactcttaacaagttcaacacccaagtactattgcaagtaccagctgtatttcatggaaaaaaaaaaaagaataactcaaaaggcagaacgaagagcctagaggtcagagatgagaggcatgaataattattcacaggcgttgaatataatcaaatgacttgcaacatttaccactgggattttaaaatgtggtggaccaatcattcttttagtctgtgcattttcccatttttttcaacaggaatgtctagagacattattcctgttttgccactgtatttttggtgaatgtgtagtaagtaactggcctctttagtatcacaaagctggatgaagaaaatgtggtacatatacaccatgaaatactatgccgccacaaaaaggaaatgagatcatgtcctctgcagggacatggatgaagctggaagccattatccttagcaaagtaacgcaggaacagaaaaccaaacaccacatgttgtctcttagaagtgggagctgaacgtatagacaaaatgacctacgaatcaagcattttgttccacggtctctactgttagctgtatgtctcagaaacagcttctttctcaagagagaacaagagggataatgctggatctaaaggcatcatctgaagaagacaaagatatcaacaatcgcaactatttggctttctgtccatcactgagacttttcataatcttcccttcataaataggatctcttgatcagaacagaaaagttgagtcttaaatttcctgtatttatttctgactgatactgagggaagtgcaaatttggttgctatgattaaactccttgattgttcttaatggga

SEQ ID NO: 456647 - DNA, 1030 bp, Homo sapiens
tgactgcacttccccagggattgtggcaaatggtaaatatatattttctccttgctacttgcaataaccctgctcataaagtgttactattattcacttgcaggtgagaaaatcaatgtaaaagaggagaaataacccacacaaccacatacaactaggaaatgatagatggatctgaaaaaaaggatatgcactcttaacaagttcaacacccaagtactattgcaagtaccagctgtatttcatggaaaaaaaaaaaagaataactcaaaaggcagaacgaagagcctagaggtcagagatgagaggcatgaataattattcacaggcgttgaatataatcaaatgacttgcaacatttaccactgggattttaaaatgtggtggaccaatcattcttttagtctgtgcattttcccatttttttcaacaggaatgtctagagacattattcctgttttgccactgtatttttggtgaatgtgtagtaagtaactggcctctttagtatcacaaagctggatgaagaaaatgtggtacatatacaccatgaaatactatgccgccacaaaaaggaaatgagatcatgtcctctgcagggacatggatgaagctggaagccattatccttagcaaagtaacgcaggaacagaaaaccaaacaccacatgttgtctcttagaagtgggagctgaacgtatagacaaaatgacctacgaatcaagcattttgttccacggtctctactgttagctgtatgtctcagaaacagcttctttctcaagagagaacaagagggataatgctggatctaaaggcatcatctgaagaagacaaagatatcaacaatcgcaactatttggctttctgtccatcactgagacttttcataatcttcccttcataaataggatctcttgatcagaacagaaaagttgagtcttaaatttcctgtatttatttctgactgatactgagggaagtgcaaatttggttgctatgattaaactccttgattgttcttaatggga

SEQ ID NO: 456648 - DNA, 1136 bp, Homo sapiens
ctgcccacacagccataacatcctatggccctgaaaatagttctgccaagctgcgtgcagtggacacttcacggctggcacaggagagatcacaaggccttgctcaatttcatcaaaagtgttaaagcgactcagcagattgtgaagcacaagtggaagctgataattggtgtttcttacaaatcaacggcttgtctccacacatcaaggtgagaaaatcaatgtaaaagaggagaaataacccacacaaccacatacaactaggaaatgatagatggatctgaaaaaaaggatatgcactcttaacaagttcaacacccaagtactattgcaagtaccagctgtatttcatggaaaaaaaaaaaagaataactcaaaaggcagaacgaagagcctagaggtcagagatgagaggcatgaataattattcacaggcgttgaatataatcaaatgacttgcaacatttaccactgggattttaaaatgtggtggaccaatcattcttttagtctgtgcattttcccatttttttcaacaggaatgtctagagacattattcctgttttgccactgtatttttggtgaatgtgtagtaagtaactggcctctttagtatcacaaagctggatgaagaaaatgtggtacatatacaccatgaaatactatgccgccacaaaaaggaaatgagatcatgtcctctgcagggacatggatgaagctggaagccattatccttagcaaagtaacgcaggaacagaaaaccaaacaccacatgttgtctcttagaagtgggagctgaacgtatagacaaaatgacctacgaatcaagcattttgttccacggtctctactgttagctgtatgtctcagaaacagcttctttctcaagagagaacaagagggataatgctggatctaaaggcatcatctgaagaagacaaagatatcaacaatcgcaactatttggctttctgtccatcactgagacttttcataatcttcccttcataaataggatctcttgatcagaacagaaaagttgagtcttaaatttcctgtatttatttctgactgatactgagggaagtgcaaatttggttgctatgattaaactccttgattgttcttaatggga

SEQ ID NO: 456649 - DNA, 1170 bp, Homo sapiens
ttgtgaccaactccacctacgcagcagacaaggtgctctgtatgtggatgtgatccgtgtgaacagctactactcttggtatcgcaactacggcacctgggagttgattcagctgcagctgaccgcccagtttgagaattggtgtaagacatcacaatcccattattcagagcgcgtatggagtggaaacgcttgtaaggcttcaccaggatccacctctgatgttcagtgaagaggaccggaaaagtctgctagagcagtaccatctgggtctggatcaaaaacgcagaaaatacgtggttggagagctcatctggaattttgccgatttcatgactaaccagtgtgtcagtttcttggtcgggaatgaaaatagtgccaacctgtgataccttcactctaattttactttctgaggaagttttctgtaatagttatttggtgataattattaatactggtgagaaaatcaatgtaaaagaggagaaataacccacacaaccacatacaactaggaaatgatagatggatctgaaaaaaaggatatgcactcttaacaagttcaacacccaagtactattgcaagtaccagctgtatttcatggaaaaaaaaaaaagaataactcaaaaggcagaacgaagagcctagaggtcagagatgagaggcatgaataattattcacaggcgttgaatataatcaaatgacttgcaacatttaccactgggattttaaaatgtggtggaccaatcattcttttagtctgtgcattttcccatttttttcaacaggaatgtctagagacattattcctgttttgccactgtatttttggtgaatgtgtagtaagtaactggcctctttagtatcacaaagctggatgaagaaaatgtggtacatatacaccatgaaatactatgccgccacaaaaaggaaatgagatcatgtcctctgcagggacatggatgaagctggaagccattatccttagcaaagtaacgcaggaacagaaaaccaaacaccacatgttgtctcttagaagtgggagctgaacgtacctaattcttgcaattcagtgtatttcctggcgagaggcagagatgaacaaccctggacagttaccacatatggctcttatgaggtaatgaggatggttgtgatgagaagggta

SEQ ID NO: 456650 - DNA, 380 bp, Homo sapiens
ggtatattaaaaaaaagacctttggttattctggctgccaccaattgctttcttgtttcagctgaattttgaagtagctaatcatattttggcattttcttgtcatcaaagcatttcgtgaaattatcccattacaatgtttttctcagaggcaaaattaacatggttgacagtttaattgacatatttctttttcgttgtgtgcctttgccaattaaacaaattgcaccctattttgatgttcattttgttaattatttgtaaaactgtagactctgattttttttttttttaattttcaggtgtcagtttcttggtcgggaatgaaaatagtgccaacctgtgataccttcactctaattttactttctgaggaagtt

SEQ ID NO: 456651 - DNA, 1387 bp, Homo sapiens
ttgtgaccaactccacctacgcagcagacaaggtgctctgtatgtggatgtgatccgtgtgaacagctactactcttggtatcgcaactacggcacctgggagttgattcagctgcagctgaccgcccagtttgagaattggtgtaagacatcacaatcccattattcagagcgcgtatggagtggaaacgcttgtaaggcttcaccaggatccacctctgatgttcagtgaagaggaccggaaaagtctgctagagcagtaccatctgggtctggatcaaaaacgcagaaaatacgtggttggagagctcatctggaattttgccgatttcatgactaaccagtgtgtcagtttcttggtcgggaatgaaaatagtgccaacctgtgataccttcactctaattttactttctgaggaagttttctgtaatagttatttggtgataattattaatactggtgagaaaatcaatgtaaaagaggagaaataacccacacaaccacatacaactaggaaatgatagatggatctgaaaaaaaggatatgcactcttaacaagttcaacacccaagtactattgcaagtaccagctgtatttcatggaaaaaaaaaaaagaataactcaaaaggcagaacgaagagcctagaggtcagagatgagaggcatgaataattattcacaggcgttgaatataatcaaatgacttgcaacatttaccactgggattttaaaatgtggtggaccaatcattcttttagtctgtgcattttcccatttttttcaacaggaatgtctagagacattattcctgttttgccactgtatttttggtgaatgtgtagtaagtaactggcctctttagtatcacaaagctggatgaagaaaatgtggtacatatacaccatgaaatactatgccgccacaaaaaggaaatgagatcatgtcctctgcagggacatggatgaagctggaagccattatccttagcaaagtaacgcaggaacagaaaaccaaacaccacatgttgtctcttagaagtgggagctgaacgtatagacaaaatgacctacgaatcaagcattttgttccacggtctctactgttagctgtatgtctcagaaacagcttctttctcaagagagaacaagagggataatgctggatctaaaggcatcatctgaagaagacaaagatatcaacaatcgcaactatttggctttctgtccatcactgagacttttcataatcttcccttcataaataggatctcttgatcagaacagaaaagttgagtcttaaatttcctgtatttatttctgactgatactgagggaagtgcaaatttggttgctatgattaaactccttgattgttcttaatggga

SEQ ID NO: 456652 - DNA, 1611 bp, Homo sapiens
ttgtgaccaactccacctacgcagcagacaaggtgctctgtatgtggatgtgatccgtgtgaacagctactactcttggtatcgcaactacggcacctgggagttgattcagctgcagctgaccgcccagtttgagaattggtgtaagacatcacaatcccattattcagagcgcgtatggagtggaaacgcttgtaaggcttcaccaggatccacctctgatgttcagtgaagaggaccggaaaagtctgctagagcagtaccatctgggtctggatcaaaaacgcagaaaatacgtggttggagagctcatctggaattttgccgatttcatgactaaccagtccaaggatgaaggaaaaactggacctcattatggatttacttttgggatacactcattattccagaggagggtaaaaggctgagaagcttaagtaataaataaaataattttcgaccagatggagctggcttgaaatcctcttgtttatggcagtacatatcggttatgattcaaaaaatatagcccatttccaaaaacctgcaacaaagagatactttctcaggtgtcagtttcttggtcgggaatgaaaatagtgccaacctgtgataccttcactctaattttactttctgaggaagttttctgtaatagttatttggtgataattattaatactggtgagaaaatcaatgtaaaagaggagaaataacccacacaaccacatacaactaggaaatgatagatggatctgaaaaaaaggatatgcactcttaacaagttcaacacccaagtactattgcaagtaccagctgtatttcatggaaaaaaaaaaaagaataactcaaaaggcagaacgaagagcctagaggtcagagatgagaggcatgaataattattcacaggcgttgaatataatcaaatgacttgcaacatttaccactgggattttaaaatgtggtggaccaatcattcttttagtctgtgcattttcccatttttttcaacaggaatgtctagagacattattcctgttttgccactgtatttttggtgaatgtgtagtaagtaactggcctctttagtatcacaaagctggatgaagaaaatgtggtacatatacaccatgaaatactatgccgccacaaaaaggaaatgagatcatgtcctctgcagggacatggatgaagctggaagccattatccttagcaaagtaacgcaggaacagaaaaccaaacaccacatgttgtctcttagaagtgggagctgaacgtatagacaaaatgacctacgaatcaagcattttgttccacggtctctactgttagctgtatgtctcagaaacagcttctttctcaagagagaacaagagggataatgctggatctaaaggcatcatctgaagaagacaaagatatcaacaatcgcaactatttggctttctgtccatcactgagacttttcataatcttcccttcataaataggatctcttgatcagaacagaaaagttgagtcttaaatttcctgtatttatttctgactgatactgagggaagtgcaaatttggttgctatgattaaactccttgattgttcttaatggga

SEQ ID NO: 456653 - DNA, 1327 bp, Homo sapiens
ttgtgaccaactccacctacgcagcagacaaggtgctctgtatgtggatgtgatccgtgtgaacagctactactcttggtatcgcaactacggcacctgggagttgattcagctgcagctgaccgcccagtttgagaattggtgtaagacatcacaatcccattattcagagcgcgtatggagtggaaacgcttgtaaggcttcaccaggatccacctctgatgttcagtgaagaggaccggaaaagtctgctagagcagtaccatctgggtctggatcaaaaacgcagaaaatacgtggttggagagctcatctggaattttgccgatttcatgactaaccagtgtgtcagtttcttggtcgggaatgaaaatagtgccaacctgtgataccttcactctaattttactttctgaggaagttttctgtaatagttatttggtgataattattaatactggtgagaaaatcaatgtaaaagaggagaaataacccacacaaccacatacaactaggaaatgatagatggatctgaaaaaaaggatatgcactcttaacaagttcaacacccaagtactattgcaagtaccagctgtatttcatggaaaaaaaaaaaagaataactcaaaaggcagaacgaagagcctagaggtcagagatgagaggcatgaataattattcacaggcgttgaatataatcaaatgacttgcaacatttaccactgggattttaaaatgtggtggaccaatcattcttttagtctgtgcattttcccatttttttcaacaggaatgtctagagacattattcctgttttgccactgtatttttggtgaatgtgtagtaagtaactggcctctttagtatcacaaagctggatgaagaaaatgtggtacatatacaccatgaaatactatgccgccacaaaaaggaaatgagatcatgtcctctgcagggacatggatgaagctggaagccattatccttagcaaagtaacgcaggaacagaaaaccaaacaccacatgttgtctcttagaagtgggagctgaacggctccttattgcatgaatgtcccctgtggtttcatcaatggtaaaaacggtgccagcgccatctcctgagagggtgtatttcgcagtgccctctcccttgtctaagtcggaatggagctttagggaagagagggagagagagaggaagagaaagagaaggacaaagaaagaacaccattaaaaggaagttgccaaattaaaaagtcataatttgcaatacaattcctttaatcaaaaatgttaaataaaaatcttatggttctgttaaattgt

SEQ ID NO: 456654 - DNA, 3680 bp, Homo sapiens
aaaataattgtaatatgctaacaccaattgtatcttaaaaagaggtactggaaattccatcttgcattcttccgttttttcctgttatagaaaaacgcactccctgatactcagtagaggatcaacttatttctagttaatcagcatgaacgtttccagcagaatagatgctttggtgtagcacttgcctgggagtcatggttagcattccgcattttttagagagctgaattcagcagcctaggaaacattaggaagaacaccttcaaacagggaacaacgtcttgggggaagagagtcactgcctccgctagggatcccgagggggtacaaaagcaacaacaacaaaaactcgtggagagtaggctccacgacatgcgcatgcgacgaactcccgcactcagcggggcaggtttcgtccttcatcttctcagtcggcaggacctgcttctcgctgaggatgagtgaggacagccgcagctcggcggggacggcccgttagcctagagcgccggcacccgagtcccgccgccggagccgcgcctggagccgcggtgggggaggggcagcggcggcccgcgctgcgtcgagcttcccagaattcccagcggccgcggggaaagtttacgggatgtaggcggcggcggcggtagtggtagcggttattcggcggcccgcggcggaccatggccctggcccggcgtcgctgggctttcctcacggcgtccccgagcagcgtcgcagagcgggccgacttccgggaaggaactgaccagcgactgagcggcggccggcgcgcttagcgccctgaacatgcggcagtccctgcgggcgaccccgggctccggacaggcggcggcggaggcggcggctcgggagggaaggaggcggcggcgccggcggaggtggcggcggagacggccggcgcccggcgcggagccctagggaggcagttcagcgcggcctcgggcctcgtcgagaaggatgctgtcccgaaagaaaaccaaaaacgaagtgtccaagccggccgaggtgcaggggaagtacgtgaagaaggagacgtcgcctctgcttcggaatcttatgccttcattcatccggcatggtccaacaattccaagacgaactgatatctgtcttccagattcaagccctaatgccttttcaacttctggagatgtagtttcaagaaaccagagtttccttagaactccaattcaaagaacacctcatgaaataatgagaagagaaagcaacagattatctgcaccttcttatcttgccagaagtctagcagatgtccctagagagtatggttcttctcagtcatttgtaacggaagttagttttgctgttgaaaatggagactctggttcccgatattattattcagacaatttttttgatggtcagagaaagcggccacttggagatcgtgcacatgaagactacagatattatgaatacaaccatgatctcttccaaagaatgccacagaatcaggggaggcatgcttcaggtattgggagagttgctgctacatctttaggaaatttgactaaccatggttctgaagatttaccccttcctcctggctggtctgtggactggacaatgagagggagaaaatattatatagatcataacacaaatacaactcactggagccatcctcttgagcgagaaggacttcctcctggatgggaacgagttgagtcatccgaatttggaacctattatgtagatcacacaaataagaaggcccaatacaggcatccctgtgctcctagtgtacctcggtatgatcaaccacctcctgtcacataccagccacagcaaactgaaagaaatcagtcccttctggtacctgcaaatccatatcatactgcagaaattcctgactggcttcaggtttacgcacgagcccctgtgaaatatgaccacattctgaagtgggaactcttccagctggctgacctggatacataccagggaatgctaaagttgctcttcatgaaagaattggagcagattgttaaaatgtatgaagcatacagacaagcccttcttacagagttggaaaaccgaaagcagagacagcagtggtatgcccaacaacatggaaaaaatttttgagctgattttttaaaaatttaagttttgtaagagctttaaaatattttcacagataaaaaattgcaaacaagtactctggttaataaatgctgcttcctttgtggaaattataaaattctaactttacatgtattttgttattagaaattttcttttattgaatgagaaaaattagtctatcattttaagagccaatatggcaaacactttcaaatactgtatattaggaaactgttttggtattcttgatggaaaaaaatgcagcggaaatgtcattatgaacagatgttaaataggaaattattacttgttaacttcttacagcagtagtaccttctttaaaaaaaaaaaagaatctgcggtatttttttaaaaaaaaagtttactgctgtagtgtgaaatattgtctggaaagggatggtttaaatattaccatgatgtagttgaaatataaaataggatttggaaccttattgtgataaatatttatatatgatgtatgtttgtctcccctctccaaagtaaggaacccagctgggcgtggtggctcactcctgtaatcccagcattttgggaggccgaggtgggtggaccgcttgagtccacgagtttaagaccagcctgggcaacatggtgaagccccatctctacaaaaaatacaaaaaaattagccgggtatgatggtgtgtgcctctagtcccagctacttgggaggctgaggtcagaggatggcttgagcccaagaggcagaggttgcagggtcaagatcgcaccacttgcactgcagcctgagagagagagagccagaccttgtctcaaaaaataaaaaataaaaaaataaaaacaaaataaggaatccttttaaagcatgttgagaaagtattttttggtatgaatgggtgacgggccttttaatctttcaggaatacatataagcaggaatacttagcctgtattgggaaggtgcgtgaaactcaaagttgctaacatcatcttccttattttcagccagtgctgttactgcatttagcatggctctgacgaggcagtggagagttcctgacagcatagcatactgccttctgacagactgggttaagctaccaaaaatgacaaccagggattcaaaaaaaatttttggtcattaaatcgaatgtatattattactttttaattttctaagtatttatcacaggactttaacaccatatatttccctcccagtttttctccccttttggtttaatagttaaaacatttttcataattagtgctgtacatttgattgcaaacaaattggtgatacttctaaactataactataaatctctagaattctgtgaatttcaacattatttgaagtagttcttcagttatatttacatgtgttgtaaatatgtaaatatacttttagcttaggaagtcttccagaatacaaactactcccagttagatatcagtgagtttgaataactgaagaaatgttgacaatgttaagtgtttgattttatataacaagcttattaaatatatttttgtggaaa

SEQ ID NO: 456655 - DNA, 1256 bp, Homo sapiens
  misc_feature (138)..(138): n is a, c, g, or t
gtattgctatcatcccgtgccacattttcctcgcgccacatatggcgcggttgctccccctatagccggctaagttttattgtgcctggggcttatattctcgttggattgtgggttcgcctgagatggtgccccccncgcaaacgtgttggggtgtcctttccacacaatgtatccccccactatgcctgttgttccccacgcacggctttttgttaacgcgcgccgcctttcttctgttattatactgctcctctttatggggccccctttgttacacgaaagacctggtgattcttaaatttggggccccccccggggggattcttttgcgccccccccccttttgttttttttttttttttttttttttttttttttttgtttttttttttgtttttgtttttgttttttactttttgagttggaatctcactctctcgctcaggctggaatgcagtggtggcacgatcttggctcactgcaacctcctcccaggttcaagctattctcttgcctcagcctccccagtggctgggactacaggtgcctgccaccacacctggctaattttttgtatttttagtagagatggggcctcaccatgttagccaggctggtctcgaactcctgacctaacgtgatccgcccacctcagtctcccaaagtgctgggattacaggcgtgagccaccgcgcctggccttgattttcttatggcattacgtctgtatggtaccatcttcagatctgtgaatgtatattggtgcaacatagtattgttttccattatattctgattctaaggcattcaatttaattctaattctcttatattttttcttaagctttgatttacaaagttgaaatttgcttttgcttttttaatgaacttgcttactgaattttgcataaaataacttcttattgacttgtaaatagtaaatggtatttgattcgaggacataatccaattatatgccacagtagaaactgaggaaagaattatctctatagttgttcaagatcagctttgcttcctgaagataatgacctaaatgattccagagtggtaatttttcttagtgtaacagatgattccttcgtggatgcctagagtcttttctgagatatgtagtgttgcacatgtgcggtaggagaaatgaacactaatttacaggtcaggcctgaggtctgccaagaaagaatacatactggcctgggccctgcttaaagtggtatgtattactgtcagtc

SEQ ID NO: 456656 - DNA, 3623 bp, Homo sapiens
aaaataattgtaatatgctaacaccaattgtatcttaaaaagaggtactggaaattccatcttgcattcttccgttttttcctgttatagaaaaacgcactccctgatactcagtagaggatcaacttatttctagttaatcagcatgaacgtttccagcagaatagatgctttggtgtagcacttgcctgggagtcatggttagcattccgcattttttagagagctgaattcagcagcctaggaaacattaggaagaacaccttcaaacagggaacaacgtcttgggggaagagagtcactgcctccgctagggatcccgagggggtacaaaagcaacaacaacaaaaactcgtggagagtaggctccacgacatgcgcatgcgacgaactcccgcactcagcggggcaggtttcgtccttcatcttctcagtcggcaggacctgcttctcgctgaggatgagtgaggacagccgcagctcggcggggacggcccgttagcctagagcgccggcacccgagtcccgccgccggagccgcgcctggagccgcggtgggggaggggcagcggcggcccgcgctgcgtcgagcttcccagaattcccagcggccgcggggaaagtttacgggatgtaggcggcggcggcggtagtggtagcggttattcggcggcccgcggcggaccatggccctggcccggcgtcgctgggctttcctcacggcgtccccgagcagcgtcgcagagcgggccgacttccgggaaggaactgaccagcgactgagcggcggccggcgcgcttagcgccctgaacatgcggcagtccctgcgggcgaccccgggctccggacaggcggcggcggaggcggcggctcgggagggaaggaggcggcggcgccggcggaggtggcggcggagacggccggcgcccggcgcggagccctagggaggcagttcagcgcggcctcgggcctcgtcgagaaggatgctgtcccgaaagaaaaccaaaaacgaagtgtccaagccggccgaggtgcaggggaagtacgtgaagaaggagacgtcgcctctgcttcggaatcttatgccttcattcatccggcatggtccaacaattccaagacgaactgatatctgtcttccagattcaagccctaatgccttttcaacttctggagatgtagtttcaagaaaccagagtttccttagaactccaattcaaagaacacctcatgaaataatgagaagagaaagcaacagattatctgcaccttcttatcttgccagaagtctagcagatgtccctagagagtatggttcttctcagtcatttgtaacggaagttagttttgctgttgaaaatggagactctggttcccgatattattattcagacaatttttttgatggtcagagaaagcggccacttggagatcgtgcacatgaagactacagatattatgaatacaaccatgatctcttccaaagaatgccacagaatcaggggaggcatgcttcaggtattgggagagttgctgctacatctttaggaaatttgactaaccatggttctgaagatttaccccttcctcctggctggtctgtggactggacaatgagagggagaaaatattatatagatcataacacaaatacaactcactggagccatcctcttgagcgagaaggacttcctcctggatgggaacgagttgagtcatccgaatttggaacctattatgtagatcacacaaataagaaggcccaatacaggcatccctgtgctcctagtgtacctcggtatgatcaaccacctcctgtcacataccagccacagcaaactgaaagaaatcagtcccttctggtacctgcaaatccatatcatactgcagaaattcctgactggcttcaggtttacgcacgagcccctgtgaaatatgaccacattctgaagtgggaactcttccagctggctgacctggatacataccagggaatgctaaagttgctcttcatgaaagaattggagcagattgttaaaatgtatgaagcatacagacaagcccttcttacagagttggaaaaccgaaagcagagacagcagtggtatgcccaacaacatggaaaaaatttttgagctgattttttaaaaatttaagttttgtaagagctttaaaatattttcacagataaaaaattgcaaacaagtactctggttaataaatgctgcttcctttgtggaaattataaaattctaactttacatgtattttgttattagaaattttcttttattgaatgagaaaaattagtctatcattttaagagccaatatggcaaacactttcaaatactgtatattaggaaactgttttggtattcttgatggaaaaaaatgcagcggaaatgtcattatgaacagatgttaaataggaaattattacttgttaacttcttacagcagtagtaccttctttaaaaaaaaaaaagaatctgcggtatttttttaaaaaaaaagtttactgctgtagtgtgaaatattgtctggaaagggatggtttaaatattaccatgatgtagttgaaatataaaataggatttggaaccttattgtgataaatatttatatatgatgtatgtttgtctcccctctccaaagtaaggaacccagctgggcgtggtggctcactcctgtaatcccagcattttgggaggccgaggtgggtggaccgcttgagtccacgagtttaagaccagcctgggcaacatggtgaagccccatctctacaaaaaatacaaaaaaattagccgggtatgatggtgtgtgcctctagtcccagctacttgggaggctgaggtcagaggatggcttgagcccaagaggcagaggttgcagggtcaagatcgcaccacttgcactgcagcctgagagagagagagccagaccttgtctcaaaaaataaaaaataaaaaaataaaaacaaaataaggaatccttttaaagcatgttgagaaagtattttttggtatgaatgggtgacgggccttttaatctttcaggaatacatataagcaggaatacttagcctgtattgggaaggtgcgtgaaactcaaagttgctaacatcatcttccttattttcagccagtgctgttactgcatttagcatggctctgacgaggcagtggagagttcctgacagcatagcatactgccttctgacagactgggttaagctaccaaaaatgacaaccagggattctatttatcacaggactttaacaccatatatttccctcccagtttttctccccttttggtttaatagttaaaacatttttcataattagtgctgtacatttgattgcaaacaaattggtgatacttctaaactataactataaatctctagaattctgtgaatttcaacattatttgaagtagttcttcagttatatttacatgtgttgtaaatatgtaaatatacttttagcttaggaagtcttccagaatacaaactactcccagttagatatcagtgagtttgaataactgaagaaatgttgacaatgttaagtgtttgattttatataacaagcttattaaatatatttttgtggaaa

SEQ ID NO: 456657 - DNA, 3605 bp, Homo sapiens
aaaataattgtaatatgctaacaccaattgtatcttaaaaagaggtactggaaattccatcttgcattcttccgttttttcctgttatagaaaaacgcactccctgatactcagtagaggatcaacttatttctagttaatcagcatgaacgtttccagcagaatagatgctttggtgtagcacttgcctgggagtcatggttagcattccgcattttttagagagctgaattcagcagcctaggaaacattaggaagaacaccttcaaacagggaacaacgtcttgggggaagagagtcactgcctccgctagggatcccgagggggtacaaaagcaacaacaacaaaaactcgtggagagtaggctccacgacatgcgcatgcgacgaactcccgcactcagcggggcaggtttcgtccttcatcttctcagtcggcaggacctgcttctcgctgaggatgagtgaggacagccgcagctcggcggggacggcccgttagcctagagcgccggcacccgagtcccgccgccggagccgcgcctggagccgcggtgggggaggggcagcggcggcccgcgctgcgtcgagcttcccagaattcccagcggccgcggggaaagtttacgggatgtaggcggcggcggcggtagtggtagcggttattcggcggcccgcggcggaccatggccctggcccggcgtcgctgggctttcctcacggcgtccccgagcagcgtcgcagagcgggccgacttccgggaaggaactgaccagcgactgagcggcggccggcgcgcttagcgccctgaacatgcggcagtccctgcgggcgaccccgggctccggacaggcggcggcggaggcggcggctcgggagggaaggaggcggcggcgccggcggaggtggcggcggagacggccggcgcccggcgcggagccctagggaggcagttcagcgcggcctcgggcctcgtcgagaaggatgctgtcccgaaagaaaaccaaaaacgaagtgtccaagccggccgaggtgcaggggaagtacgtgaagaaggagacgtcgcctctgcttcggaatgcgtcgagatgtgcgtcatgtttgcaaacattgcgggtgtctctcgactgtgctgcaagttgtgcgaactctggggcagaattccttagtcctgctgccggatgcagacttgagaagatcttatgccttcattcatccggcatggtccaacaattccaagacgaactgatatctgtcttccagattcaagccctaatgccttttcaacttgactctggttcccgatattattattcagacaatttttttgatggtcagagaaagcggccacttggagatcgtgcacatgaagactacagatattatgaatacaaccatgatctcttccaaagaatgccacagaatcaggggaggcatgcttcaggtattgggagagttgctgctacatctttaggaaatttgactaaccatggttctgaagatttaccccttcctcctggctggtctgtggactggacaatgagagggagaaaatattatatagatcataacacaaatacaactcactggagccatcctcttgagcgagaaggacttcctcctggatgggaacgagttgagtcatccgaatttggaacctattatgtagatcacacaaataagaaggcccaatacaggcatccctgtgctcctagtgtacctcggtatgatcaaccacctcctgtcacataccagccacagcaaactgaaagaaatcagtcccttctggtacctgcaaatccatatcatactgcagaaattcctgactggcttcaggtttacgcacgagcccctgtgaaatatgaccacattctgaagtgggaactcttccagctggctgacctggatacataccagggaatgctaaagttgctcttcatgaaagaattggagcagattgttaaaatgtatgaagcatacagacaagcccttcttacagagttggaaaaccgaaagcagagacagcagtggtatgcccaacaacatggaaaaaatttttgagctgattttttaaaaatttaagttttgtaagagctttaaaatattttcacagataaaaaattgcaaacaagtactctggttaataaatgctgcttcctttgtggaaattataaaattctaactttacatgtattttgttattagaaattttcttttattgaatgagaaaaattagtctatcattttaagagccaatatggcaaacactttcaaatactgtatattaggaaactgttttggtattcttgatggaaaaaaatgcagcggaaatgtcattatgaacagatgttaaataggaaattattacttgttaacttcttacagcagtagtaccttctttaaaaaaaaaaaagaatctgcggtatttttttaaaaaaaaagtttactgctgtagtgtgaaatattgtctggaaagggatggtttaaatattaccatgatgtagttgaaatataaaataggatttggaaccttattgtgataaatatttatatatgatgtatgtttgtctcccctctccaaagtaaggaacccagctgggcgtggtggctcactcctgtaatcccagcattttgggaggccgaggtgggtggaccgcttgagtccacgagtttaagaccagcctgggcaacatggtgaagccccatctctacaaaaaatacaaaaaaattagccgggtatgatggtgtgtgcctctagtcccagctacttgggaggctgaggtcagaggatggcttgagcccaagaggcagaggttgcagggtcaagatcgcaccacttgcactgcagcctgagagagagagagccagaccttgtctcaaaaaataaaaaataaaaaaataaaaacaaaataaggaatccttttaaagcatgttgagaaagtattttttggtatgaatgggtgacgggccttttaatctttcaggaatacatataagcaggaatacttagcctgtattgggaaggtgcgtgaaactcaaagttgctaacatcatcttccttattttcagccagtgctgttactgcatttagcatggctctgacgaggcagtggagagttcctgacagcatagcatactgccttctgacagactgggttaagctaccaaaaatgacaaccagggattcaaaaaaaatttttggtcattaaatcgaatgtatattattactttttaattttctaagtatttatcacaggactttaacaccatatatttccctcccagtttttctccccttttggtttaatagttaaaacatttttcataattagtgctgtacatttgattgcaaacaaattggtgatacttctaaactataactataaatctctagaattctgtgaatttcaacattatttgaagtagttcttcagttatatttacatgtgttgtaaatatgtaaatatacttttagcttaggaagtcttccagaatacaaactactcccagttagatatcagtgagtttgaataactgaagaaatgttgacaatgttaagtgtttgattttatataacaagcttattaaatatatttttgtggaaa

SEQ ID NO: 456658 - DNA, 3632 bp, Homo sapiens
aaaataattgtaatatgctaacaccaattgtatcttaaaaagaggtactggaaattccatcttgcattcttccgttttttcctgttatagaaaaacgcactccctgatactcagtagaggatcaacttatttctagttaatcagcatgaacgtttccagcagaatagatgctttggtgtagcacttgcctgggagtcatggttagcattccgcattttttagagagctgaattcagcagcctaggaaacattaggaagaacaccttcaaacagggaacaacgtcttgggggaagagagtcactgcctccgctagggatcccgagggggtacaaaagcaacaacaacaaaaactcgtggagagtaggctccacgacatgcgcatgcgacgaactcccgcactcagcggggcaggtttcgtccttcatcttctcagtcggcaggacctgcttctcgctgaggatgagtgaggacagccgcagctcggcggggacggcccgttagcctagagcgccggcacccgagtcccgccgccggagccgcgcctggagccgcggtgggggaggggcagcggcggcccgcgctgcgtcgagcttcccagaattcccagcggccgcggggaaagtttacgggatgtaggcggcggcggcggtagtggtagcggttattcggcggcccgcggcggaccatggccctggcccggcgtcgctgggctttcctcacggcgtccccgagcagcgtcgcagagcgggccgacttccgggaaggaactgaccagcgactgagcggcggccggcgcgcttagcgccctgaacatgcggcagtccctgcgggcgaccccgggctccggacaggcggcggcggaggcggcggctcgggagggaaggaggcggcggcgccggcggaggtggcggcggagacggccggcgcccggcgcggagccctagggaggcagttcagcgcggcctcgggcctcgtcgagaaggatgctgtcccgaaagaaaaccaaaaacgaagtgtccaagccggccgaggtgcaggggaagtacgtgaagaaggagacgtcgcctctgcttcggaatcttatgccttcattcatccggcatggtccaacaattccaagacgaactgatatctgtcttccagattcaagccctaatgccttttcaacttctggagatgtagtttcaagaaaccagagtttccttagaactccaattcaaagaacacctcatgaaataatgagaagagaaagcaacagattatctgcaccttcttatcttgccagaagtctagcagatgtccctagagagtatggttcttctcagtcatttgtaacggaagttagttttgctgttgaaaatggaagaaagcggccacttggagatcgtgcacatgaagactacagatattatgaatacaaccatgatctcttccaaagaatgccacagaatcaggggaggcatgcttcaggtattgggagagttgctgctacatctttaggaaatttgactaaccatggttctgaagatttaccccttcctcctggctggtctgtggactggacaatgagagggagaaaatattatatagatcataacacaaatacaactcactggagccatcctcttgagcgagaaggacttcctcctggatgggaacgagttgagtcatccgaatttggaacctattatgtagatcacacaaataagaaggcccaatacaggcatccctgtgctcctagtgtacctcggtatgatcaaccacctcctgtcacataccagccacagcaaactgaaagaaatcagtcccttctggtacctgcaaatccatatcatactgcagaaattcctgactggcttcaggtttacgcacgagcccctgtgaaatatgaccacattctgaagtgggaactcttccagctggctgacctggatacataccagggaatgctaaagttgctcttcatgaaagaattggagcagattgttaaaatgtatgaagcatacagacaagcccttcttacagagttggaaaaccgaaagcagagacagcagtggtatgcccaacaacatggaaaaaatttttgagctgattttttaaaaatttaagttttgtaagagctttaaaatattttcacagataaaaaattgcaaacaagtactctggttaataaatgctgcttcctttgtggaaattataaaattctaactttacatgtattttgttattagaaattttcttttattgaatgagaaaaattagtctatcattttaagagccaatatggcaaacactttcaaatactgtatattaggaaactgttttggtattcttgatggaaaaaaatgcagcggaaatgtcattatgaacagatgttaaataggaaattattacttgttaacttcttacagcagtagtaccttctttaaaaaaaaaaaagaatctgcggtatttttttaaaaaaaaagtttactgctgtagtgtgaaatattgtctggaaagggatggtttaaatattaccatgatgtagttgaaatataaaataggatttggaaccttattgtgataaatatttatatatgatgtatgtttgtctcccctctccaaagtaaggaacccagctgggcgtggtggctcactcctgtaatcccagcattttgggaggccgaggtgggtggaccgcttgagtccacgagtttaagaccagcctgggcaacatggtgaagccccatctctacaaaaaatacaaaaaaattagccgggtatgatggtgtgtgcctctagtcccagctacttgggaggctgaggtcagaggatggcttgagcccaagaggcagaggttgcagggtcaagatcgcaccacttgcactgcagcctgagagagagagagccagaccttgtctcaaaaaataaaaaataaaaaaataaaaacaaaataaggaatccttttaaagcatgttgagaaagtattttttggtatgaatgggtgacgggccttttaatctttcaggaatacatataagcaggaatacttagcctgtattgggaaggtgcgtgaaactcaaagttgctaacatcatcttccttattttcagccagtgctgttactgcatttagcatggctctgacgaggcagtggagagttcctgacagcatagcatactgccttctgacagactgggttaagctaccaaaaatgacaaccagggattcaaaaaaaatttttggtcattaaatcgaatgtatattattactttttaattttctaagtatttatcacaggactttaacaccatatatttccctcccagtttttctccccttttggtttaatagttaaaacatttttcataattagtgctgtacatttgattgcaaacaaattggtgatacttctaaactataactataaatctctagaattctgtgaatttcaacattatttgaagtagttcttcagttatatttacatgtgttgtaaatatgtaaatatacttttagcttaggaagtcttccagaatacaaactactcccagttagatatcagtgagtttgaataactgaagaaatgttgacaatgttaagtgtttgattttatataacaagcttattaaatatatttttgtggaaa

SEQ ID NO: 456659 - DNA, 2338 bp, Homo sapiens
aaaataattgtaatatgctaacaccaattgtatcttaaaaagaggtactggaaattccatcttgcattcttccgttttttcctgttatagaaaaacgcactccctgatactcagtagaggatcaacttatttctagttaatcagcatgaacgtttccagcagaatagatgctttggtgtagcacttgcctgggagtcatggttagcattccgcattttttagagagctgaattcagcagcctaggaaacattaggaagaacaccttcaaacagggaacaacgtcttgggggaagagagtcactgcctccgctagggatcccgagggggtacaaaagcaacaacaacaaaaactcgtggagagtaggctccacgacatgcgcatgcgacgaactcccgcactcagcggggcaggtttcgtccttcatcttctcagtcggcaggacctgcttctcgctgaggatgagtgaggacagccgcagctcggcggggacggcccgttagcctagagcgccggcacccgagtcccgccgccggagccgcgcctggagccgcggtgggggaggggcagcggcggcccgcgctgcgtcgagcttcccagaattcccagcggccgcggggaaagtttacgggatgtaggcggcggcggcggtagtggtagcggttattcggcggcccgcggcggaccatggccctggcccggcgtcgctgggctttcctcacggcgtccccgagcagcgtcgcagagcgggccgacttccgggaaggaactgaccagcgactgagcggcggccggcgcgcttagcgccctgaacatgcggcagtccctgcgggcgaccccgggctccggacaggcggcggcggaggcggcggctcgggagggaaggaggcggcggcgccggcggaggtggcggcggagacggccggcgcccggcgcggagccctagggaggcagttcagcgcggcctcgggcctcgtcgagaaggatgctgtcccgaaagaaaaccaaaaacgaagtgtccaagccggccgaggtgcaggggaagtacgtgaagaaggagacgtcgcctctgcttcggaatcttatgccttcattcatccggcatggtccaacaattccaagacgaactgatatctgtcttccagattcaagccctaatgccttttcaacttctggagatgtagtttcaagaaaccagagtttccttagaactccaattcaaagaacacctcatgaaataatgagaagagaaagcaacagattatctgcaccttcttatcttgccagaagtctagcagatgtccctagagagtatggttcttctcagtcatttgtaacggaagttagttttgctgttgaaaatggagactctggttcccgatattattattcagacaatttttttgatggtcagagaaagcggccacttggagatcgtgcacatgaagactacagatattatgaatacaaccatgatctcttccaaagaatgccacagaatcaggggaggcatgcttcagaggatggcttgagcccaagaggcagaggttgcagggtcaagatcgcaccacttgcactgcagcctgagagagagagagccagaccttgtctcaaaaaataaaaaataaaaaaataaaaacaaaataaggaatccttttaaagcatgttgagaaagtattttttggtatgaatgggtgacgggccttttaatctttcaggaatacatataagcaggaatacttagcctgtattgggaaggtgcgtgaaactcaaagttgctaacatcatcttccttattttcagccagtgctgttactgcatttagcatggctctgacgaggcagtggagagttcctgacagcatagcatactgccttctgacagactgggttaagctaccaaaaatgacaaccagggattcaaaaaaaatttttggtcattaaatcgaatgtatattattactttttaattttctaagtatttatcacaggactttaacaccatatatttccctcccagtttttctccccttttggtttaatagttaaaacatttttcataattagtgctgtacatttgattgcaaacaaattggtgatacttctaaactataactataaatctctagaattctgtgaatttcaacattatttgaagtagttcttcagttatatttacatgtgttgtaaatatgtaaatatacttttagcttaggaagtcttccagaatacaaactactcccagttagatatcagtgagtttgaataactgaagaaatgttgacaatgttaagtgtttgattttatataacaagcttattaaatatatttttgtggaaa

SEQ ID NO: 456660 - DNA, 1612 bp, Homo sapiens
aaaataattgtaatatgctaacaccaattgtatcttaaaaagaggtactggaaattccatcttgcattcttccgttttttcctgttatagaaaaacgcactccctgatactcagtagaggatcaacttatttctagttaatcagcatgaacgtttccagcagaatagatgctttggtgtagcacttgcctgggagtcatggttagcattccgcattttttagagagctgaattcagcagcctaggaaacattaggaagaacaccttcaaacagggaacaacgtcttgggggaagagagtcactgcctccgctagggatcccgagggggtacaaaagcaacaacaacaaaaactcgtggagagtaggctccacgacatgcgcatgcgacgaactcccgcactcagcggggcaggtttcgtccttcatcttctcagtcggcaggacctgcttctcgctgaggatgagtgaggacagccgcagctcggcggggacggcccgttagcctagagcgccggcacccgagtcccgccgccggagccgcgcctggagccgcggtgggggaggggcagcggcggcccgcgctgcgtcgagcttcccagaattcccagcggccgcggggaaagtttacgggatgtaggcggcggcggcggtagtggtagcggttattcggcggcccgcggcggaccatggccctggcccggcgtcgctgggctttcctcacggcgtccccgagcagcgtcgcagagcgggccgacttccgggaaggaactgaccagcgactgagcggcggccggcgcgcttagcgccctgaacatgcggcagtccctgcgggcgaccccgggctccggacaggcggcggcggaggcggcggctcgggagggaaggaggcggcggcgccggcggaggtggcggcggagacggccggcgcccggcgcggagccctagggaggcagttcagcgcggcctcgggcctcgtcgagaaggatgctgtcccgaaagaaaaccaaaaacgaagtgtccaagccggccgaggtacaggcgtgagccaccgcgcctggccttgattttcttatggcattacgtctgtatggtaccatcttcagatctgtgaatgtatattggtgcaacatagtattgttttccattatattctgattctaaggcattcaatttaattctaattctcttatattttttcttaagctttgatttacaaagttgaaatttgcttttgcttttttaatgaacttgcttactgaattttgcataaaataacttcttattgacttgtaaatagtaaatggtatttgattcgaggacataatccaattatatgccacagtagaaactgaggaaagaattatctctatagttgttcaagatcagctttgcttcctgaagataatgacctaaatgattccagagtggtaatttttcttagtgtaacagatgattccttcgtggatgcctagagtcttttctgagatatgtagtgttgcacatgtgcggtaggagaaatgaacactaatttacaggtcaggcctgaggtctgccaagaaagaatacatactggcctgggccctgcttaaagtggtatgtattactgtcagtc

SEQ ID NO: 456661 - DNA, 1539 bp, Homo sapiens
aaaataattgtaatatgctaacaccaattgtatcttaaaaagaggtactggaaattccatcttgcattcttccgttttttcctgttatagaaaaacgcactccctgatactcagtagaggatcaacttatttctagttaatcagcatgaacgtttccagcagaatagatgctttggtgtagcacttgcctgggagtcatggttagcattccgcattttttagagagctgaattcagcagcctaggaaacattaggaagaacaccttcaaacagggaacaacgtcttgggggaagagagtcactgcctccgctagggatcccgagggggtacaaaagcaacaacaacaaaaactcgtggagagtaggctccacgacatgcgcatgcgacgaactcccgcactcagcggggcaggtttcgtccttcatcttctcagtcggcaggacctgcttctcgctgaggatgagtgaggacagccgcagctcggcggggacggcccgttagcctagagcgccggcacccgagtcccgccgccggagccgcgcctggagccgcggtgggggaggggcagcggcggcccgcgctgcgtcgagcttcccagaattcccagcggccgcggggaaagtttacgggatgtaggcggcggcggcggtagtggtagcggttattcggcggcccgcggcggaccatggccctggcccggcgtcgctgggctttcctcacggcgtccccgagcagcgtcgcagagcgggccgacttccgggaaggaactgaccagcgactgagaggcagttcagcgcggcctcgggcctcgtcgagaaggatgctgtcccgaaagaaaaccaaaaacgaagtgtccaagccggccgaggtgcaggggaagtacgtgaagaaggagacgtcgcctctgcttcggaatcttatgccttcattcatccggcatggtccaacaattccaagacgaactgatatctgtcttccagattcaagccctaatgccttttcaacttctggagatgtagtttcaagaaaccagagtttccttagaactccaattcaaagaacacctcatgaaataatgagaagagaaagcaacagattatctgcaccttcttatcttgccagaagtctagcagatgtccctagagagtatggttcttctcagtcatttgtaacggaagttagttttgctgttgaaaatggagactctggttcccgatattattattcagacaatttttttgatggtcagagaaagcggccacttggagatcgtgcacatgaagactacagatattatgaatacaaccatgatctcttccaaagaatgccacagaatcaggggaggcatgcttcagtcaggtagcttaacattataaataatatagtagtttatatttattgacatgtcaattaaaaagatgttcttttctagattttcttgggacacgaacaaatactactagcgaaatgtttttccactttgctcatcctgcttaagcctgtgtgcaaatagttgttaatctacactgaatggaaga

SEQ ID NO: 456662 - DNA, 3984 bp, Homo sapiens
aaaataattgtaatatgctaacaccaattgtatcttaaaaagaggtactggaaattccatcttgcattcttccgttttttcctgttatagaaaaacgcactccctgatactcagtagaggatcaacttatttctagttaatcagcatgaacgtttccagcagaatagatgctttggtgtagcacttgcctgggagtcatggttagcattccgcattttttagagagctgaattcagcagcctaggaaacattaggaagaacaccttcaaacagggaacaacgtcttgggggaagagagtcactgcctccgctagggatcccgagggggtacaaaagcaacaacaacaaaaactcgtggagagtaggctccacgacatgcgcatgcgacgaactcccgcactcagcggggcaggtttcgtccttcatcttctcagtcggcaggacctgcttctcgctgaggatgagtgaggacagccgcagctcggcggggacggcccgttagcctagagcgccggcacccgagtcccgccgccggagccgcgcctggagccgcggtgggggaggggcagcggcggcccgcgctgcgtcgagcttcccagaattcccagcggccgcggggaaagtttacgggatgtaggcggcggcggcggtagtggtagcggttattcggcggcccgcggcggaccatggccctggcccggcgtcgctgggctttcctcacggcgtccccgagcagcgtcgcagagcgggccgacttccgggaaggaactgaccagcgactgagcggcggccggcgcgcttagcgccctgaacatgcggcagtccctgcgggcgaccccgggctccggacaggcggcggcggaggcggcggctcgggagggaaggaggcggcggcgccggcggaggtggcggcggagacggccggcgcccggcgcggagccctagggaggcagttcagcgcggcctcgggcctcgtcgagaaggatgctgtcccgaaagaaaaccaaaaacgaagtgtccaagccggccgaggtgcaggggaagtacgtgaagaaggagacgtcgcctctgcttcggaatcttatgccttcattcatccggcatggtccaacaattccaagacgaactgatatctgtcttccagattcaagccctaatgccttttcaacttctggagatgtagtttcaagaaaccagagtttccttagaactccaattcaaagaacacctcatgaaataatgagaagagaaagcaacagattatctgcaccttcttatcttgccagaagtctagcagatgtccctagagagtatggttcttctcagtcatttgtaacggaagttagttttgctgttgaaaatggagactctggttcccgatattattattcagacaatttttttgatggtcagagaaagcggccacttggagatcgtgcacatgaagactacagatattatgaatacaaccatgatctcttccaaagaatgccacagaatcaggggaggcatgcttcaggtattgggagagttgctgctacatctttaggaaatttgactaaccatggttctgaagatttaccccttcctcctggctggtctgtggactggacaatgagagggagaaaatattatatagatcataacacaaatacaactcactggagccatcctcttgagcgagaaggacttcctcctggatgggaacgagttgagtcatccgaatttggaacctattatgtagatcacacaaataagaaggcccaatacaggcatccctgtgctcctagtgtacctcggtatgatcaaccacctcctgtcacataccagccacagcaaactgaaagaaatcagtcccttctggtacctgcaaatccatatcatactgcagaaattcctgactggcttcaggtttacgcacgagcccctgtgaaatatgaccacattctgaagtgggaactcttccagctggctgacctggatacataccagggaatgctaaagttgctcttcatgaaagaattggagcagattgttaaaatgtatgaagcatacagacaagcccttcttacagagttggaaaaccgaaagcagagacagcagtggtatgcccaacaacatggaaaaaatttttgagctgattttttaaaaatttaagttttgtaagagctttaaaatattttcacagataaaaaattgcaaacaagtactctggttaataaatgctgcttcctttgtggaaattataaaattctaactttacatgtattttgttattagaaattttcttttattgaatgagaaaaattagtctatcattttaagagccaatatggcaaacactttcaaatactgtatattaggaaactgttttggtattcttgatggaaaaaaatgcagcggaaatgtcattatgaacagatgttaaataggaaattattacttgttaacttcttacagcagtagtaccttctttaaaaaaaaaaaagaatctgcggtatttttttaaaaaaaaagtttactgctgtagtgtgaaatattgtctggaaagggatggtttaaatattaccatgatgtagttgaaatataaaataggatttggaaccttattgtgataaatatttatatatgatgtatgtttgtctcccctctccaaagtaaggaacccagctgggcgtggtggctcactcctgtaatcccagcattttgggaggccgaggtgggtggaccgcttgagtccacgagtttaagaccagcctgggcaacatggtgaagccccatctctacaaaaaatacaaaaaaattagccgggtatgatggtgtgtgcctctagtcccagctacttgggaggctgaggtcagaggatggcttgagcccaagaggcagaggttgcagggtcaagatcgcaccacttgcactgcagcctgagagagagagagccagaccttgtctcaaaaaataaaaaataaaaaaataaaaacaaaataaggaatccttttaaagcatgttgagaaagtattttttggtatgaatgggtgacgggccttttaatctttcaggaatacatataagcaggaatacttagcctgtattgggaaggtgcgtgaaactcaaagttgctaacatcatcttccttattttcagccagtgctgttactgcatttagcatggctctgacgaggcagtggagagttcctgacagcatagcatactgccttctgacagactgggttaagctaccaaaaatgacaaccagggattcaaaaaaaatttttggtcattaaatcgaatgtatattattactttttaattttctaagtatttatcacaggactttaacaccatatatttccctcccagtttttctccccttttggtttaatagttaaaacatttttcataattagtgctgtacatttgattgcaaacaaattggtgatacttctaaactataactataaatctctagaattctgtgaatttcaacattatttgaagtagttcttcagttatatttacatgtgttgtaaatatgtaaatatacttttagcttaggaagtcttccagaatacaaactactcccagttagatatcagtgagtttgaataactgaagaaatgttgacaatgttaagtgtttgattttatataacaagcttattaaatatatttttgtggaaacaaaaaaaaatggtttttgagtccatgttttagacatagtgctgtatttcatttttctgttcagtggccatctaatagtttatgctgtacagcataacctcattgtgatgagatatttggaggtggggatcaatcagagggggaaatagaatgatcagtactgcggcggataggcctaggattgtgggggcaacgaatgaagcgaacaggttttcgttcattttggttctcagggtttgttataattttatattttaatgggcttaggtgcgggaggtaagtggtagttcgtgtaaaatatata

SEQ ID NO: 456663 - DNA, 3517 bp, Homo sapiens
aaaataattgtaatatgctaacaccaattgtatcttaaaaagaggtactggaaattccatcttgcattcttccgttttttcctgttatagaaaaacgcactccctgatactcagtagaggatcaacttatttctagttaatcagcatgaacgtttccagcagaatagatgctttggtgtagcacttgcctgggagtcatggttagcattccgcattttttagagagctgaattcagcagcctaggaaacattaggaagaacaccttcaaacagggaacaacgtcttgggggaagagagtcactgcctccgctagggatcccgagggggtacaaaagcaacaacaacaaaaactcgtggagagtaggctccacgacatgcgcatgcgacgaactcccgcactcagcggggcaggtttcgtccttcatcttctcagtcggcaggacctgcttctcgctgaggatgagtgaggacagccgcagctcggcggggacggcccgttagcctagagcgccggcacccgagtcccgccgccggagccgcgcctggagccgcggtgggggaggggcagcggcggcccgcgctgcgtcgagcttcccagaattcccagcggccgcggggaaagtttacgggatgtaggcggcggcggcggtagtggtagcggttattcggcggcccgcggcggaccatggccctggcccggcgtcgctgggctttcctcacggcgtccccgagcagcgtcgcagagcgggccgacttccgggaaggaactgaccagcgactgagaggcagttcagcgcggcctcgggcctcgtcgagaaggatgctgtcccgaaagaaaaccaaaaacgaagtgtccaagccggccgaggtgcaggggaagtacgtgaagaaggagacgtcgcctctgcttcggaatcttatgccttcattcatccggcatggtccaacaattccaagacgaactgatatctgtcttccagattcaagccctaatgccttttcaacttctggagatgtagtttcaagaaaccagagtttccttagaactccaattcaaagaacacctcatgaaataatgagaagagaaagcaacagattatctgcaccttcttatcttgccagaagtctagcagatgtccctagagagtatggttcttctcagtcatttgtaacggaagttagttttgctgttgaaaatggagactctggttcccgatattattattcagacaatttttttgatggtcagagaaagcggccacttggagatcgtgcacatgaagactacagatattatgaatacaaccatgatctcttccaaagaatgccacagaatcaggggaggcatgcttcaggtattgggagagttgctgctacatctttaggaaatttgactaaccatggttctgaagatttaccccttcctcctggctggtctgtggactggacaatgagagggagaaaatattatatagatcataacacaaatacaactcactggagccatcctcttgagcgagaaggacttcctcctggatgggaacgagttgagtcatccgaatttggaacctattatgtagatcacacaaataagaaggcccaatacaggcatccctgtgctcctagtgtacctcggtatgatcaaccacctcctgtcacataccagccacagcaaactgaaagaaatcagtcccttctggtacctgcaaatccatatcatactgcagaaattcctgactggcttcaggtttacgcacgagcccctgtgaaatatgaccacattctgaagtgggaactcttccagctggctgacctggatacataccagggaatgctaaagttgctcttcatgaaagaattggagcagattgttaaaatgtatgaagcatacagacaagcccttcttacagagttggaaaaccgaaagcagagacagcagtggtatgcccaacaacatggaaaaaatttttgagctgattttttaaaaatttaagttttgtaagagctttaaaatattttcacagataaaaaattgcaaacaagtactctggttaataaatgctgcttcctttgtggaaattataaaattctaactttacatgtattttgttattagaaattttcttttattgaatgagaaaaattagtctatcattttaagagccaatatggcaaacactttcaaatactgtatattaggaaactgttttggtattcttgatggaaaaaaatgcagcggaaatgtcattatgaacagatgttaaataggaaattattacttgttaacttcttacagcagtagtaccttctttaaaaaaaaaaaagaatctgcggtatttttttaaaaaaaaagtttactgctgtagtgtgaaatattgtctggaaagggatggtttaaatattaccatgatgtagttgaaatataaaataggatttggaaccttattgtgataaatatttatatatgatgtatgtttgtctcccctctccaaagtaaggaacccagctgggcgtggtggctcactcctgtaatcccagcattttgggaggccgaggtgggtggaccgcttgagtccacgagtttaagaccagcctgggcaacatggtgaagccccatctctacaaaaaatacaaaaaaattagccgggtatgatggtgtgtgcctctagtcccagctacttgggaggctgaggtcagaggatggcttgagcccaagaggcagaggttgcagggtcaagatcgcaccacttgcactgcagcctgagagagagagagccagaccttgtctcaaaaaataaaaaataaaaaaataaaaacaaaataaggaatccttttaaagcatgttgagaaagtattttttggtatgaatgggtgacgggccttttaatctttcaggaatacatataagcaggaatacttagcctgtattgggaaggtgcgtgaaactcaaagttgctaacatcatcttccttattttcagccagtgctgttactgcatttagcatggctctgacgaggcagtggagagttcctgacagcatagcatactgccttctgacagactgggttaagctaccaaaaatgacaaccagggattcaaaaaaaatttttggtcattaaatcgaatgtatattattactttttaattttctaagtatttatcacaggactttaacaccatatatttccctcccagtttttctccccttttggtttaatagttaaaacatttttcataattagtgctgtacatttgattgcaaacaaattggtgatacttctaaactataactataaatctctagaattctgtgaatttcaacattatttgaagtagttcttcagttatatttacatgtgttgtaaatatgtaaatatacttttagcttaggaagtcttccagaatacaaactactcccagttagatatcagtgagtttgaataactgaagaaatgttgacaatgttaagtgtttgattttatataacaagcttattaaatatatttttgtggaaa

SEQ ID NO: 456664 - DNA, 2246 bp, Homo sapiens
aaaataattgtaatatgctaacaccaattgtatcttaaaaagaggtactggaaattccatcttgcattcttccgttttttcctgttatagaaaaacgcactccctgatactcagtagaggatcaacttatttctagttaatcagcatgaacgtttccagcagaatagatgctttggtgtagcacttgcctgggagtcatggttagcattccgcattttttagagagctgaattcagcagcctaggaaacattaggaagaacaccttcaaacagggaacaacgtcttgggggaagagagtcactgcctccgctagggatcccgagggggtacaaaagcaacaacaacaaaaactcgtggagagtaggctccacgacatgcgcatgcgacgaactcccgcactcagcggggcaggtttcgtccttcatcttctcagtcggcaggacctgcttctcgctgaggatgagtgaggacagccgcagctcggcggggacggcccgttagcctagagcgccggcacccgagtcccgccgccggagccgcgcctggagccgcggtgggggaggggcagcggcggcccgcgctgcgtcgagcttcccagaattcccagcggccgcggggaaagtttacgggatgtaggcggcggcggcggtagtggtagcggttattcggcggcccgcggcggaccatggccctggcccggcgtcgctgggctttcctcacggcgtccccgagcagcgtcgcagagcgggccgacttccgggaaggaactgaccagcgactgagcggcggccggcgcgcttagcgccctgaacatgcggcagtccctgcgggcgaccccgggctccggacaggcggcggcggaggcggcggctcgggagggaaggaggcggcggcgccggcggaggtggcggcggagacggccggcgcccggcgcggagccctagggaggcagttcagcgcggcctcgggcctcgtcgagaaggatgctgtcccgaaagaaaaccaaaaacgaagtgtccaagccggccgaggtgcaggggaagtacgtgaagaaggagacgtcgcctctgcttcggaatcttatgccttcattcatccggcatggtccaacaattccaagacgaactgatatctgtcttccagattcaagccctaatgccttttcaacttctggagatgtagtttcaagaaaccagagtttccttagaactccaattcaaagaacacctcatgaaataatgagaagagaaagcaacagattatctgcaccttcttatcttgccagaagtctagcagatgtccctagagagtatggttcttctcagtcatttgtaacggaagttagttttgctgttgaaaatggagactctggttcccgatattattattcagacaatttttttgatggtcagagaaagcggccacttggagatcgtgcacatgaagactacagatattatgaatacaaccatgatctcttccaaagaatgccacagaatcaggggaggcatgcttcaggtattgggagagttgctgctacatctttaggaaatttgactaaccatggttctgaagatttaccccttcctcctggctggtctgtggactggacaatgagagggagaaaatattatatagatcataacacaaatacaactcactggagccatcctcttgagcgagaaggacttcctcctggatgggaacgagttgagtcatccgaatttggaacctattatgtagatcacacaaataagaaggcccaatacaggcatccctgtgctcctagtgtacctcggtatgatcaaccacctcctgtcacataccagccacagcaaactgaaagaaatcagtcccttctggtacctgcaaatccatatcatactgcagaaattcctgactggcttcaggtttacgcacgagcccctgtgaaatatgaccacattctgaagtgggaactcttccagctggctgacctggatacataccagggaatgctaaagttgctcttcatgaaagaattggagcagattgttaaaatgtatgaagcatacagacaagcccttcttacagagttggaaaaccgaaagcagagacagcagtggtatgcccaacaacatggaaaaaatttttgagctgattttttaaaaatttaagttttgtaagagctttaaaatattttcacagataaaaaattgcaaacaagtactctggttaataaatgctgcttcctttgtggaaatta

SEQ ID NO: 456665 - DNA, 1702 bp, Homo sapiens
aaaataattgtaatatgctaacaccaattgtatcttaaaaagaggtactggaaattccatcttgcattcttccgttttttcctgttatagaaaaacgcactccctgatactcagtagaggatcaacttatttctagttaatcagcatgaacgtttccagcagaatagatgctttggtgtagcacttgcctgggagtcatggttagcattccgcattttttagagagctgaattcagcagcctaggaaacattaggaagaacaccttcaaacagggaacaacgtcttgggggaagagagtcactgcctccgctagggatcccgagggggtacaaaagcaacaacaacaaaaactcgtggagagtaggctccacgacatgcgcatgcgacgaactcccgcactcagcggggcaggtttcgtccttcatcttctcagtcggcaggacctgcttctcgctgaggatgagtgaggacagccgcagctcggcggggacggcccgttagcctagagcgccggcacccgagtcccgccgccggagccgcgcctggagccgcggtgggggaggggcagcggcggcccgcgctgcgtcgagcttcccagaattcccagcggccgcggggaaagtttacgggatgtaggcggcggcggcggtagtggtagcggttattcggcggcccgcggcggaccatggccctggcccggcgtcgctgggctttcctcacggcgtccccgagcagcgtcgcagagcgggccgacttccgggaaggaactgaccagcgactgagcggcggccggcgcgcttagcgccctgaacatgcggcagtccctgcgggcgaccccgggctccggacaggcggcggcggaggcggcggctcgggagggaaggaggcggcggcgccggcggaggtggcggcggagacggccggcgcccggcgcggagccctagggaggcagttcagcgcggcctcgggcctcgtcgagaaggatgctgtcccgaaagaaaaccaaaaacgaagtgtccaagccggccgaggtgcaggggaagtacgtgaagaaggagacgtcgcctctgcttcggaatcttatgccttcattcatccggcatggtccaacaattccaagacgaactgatatctgtcttccagattcaagccctaatgccttttcaacttctggagatgtagtttcaagaaaccagagtttccttagaactccaattcaaagaacacctcatgaaataatgagaagagaaagcaacagattatctgcaccttcttatcttgccagaagtctagcagatgtccctagagagtatggttcttctcagtcatttgtaacggaagttagttttgctgttgaaaatggagactctggttcccgatattattattcagacaatttttttgatggtcagagaaagcggccacttggagatcgtgcacatgaagactacagatattatgaatacaaccatgatctcttccaaagaatgccacagaatcaggggaggcatgcttcagtcaggtagcttaacattataaataatatagtagtttatatttattgacatgtcaattaaaaagatgttcttttctagattttcttgggacacgaacaaatactactagcgaaatgtttttccactttgctcatcctgcttaagcctgtgtgcaaatagttgttaatctacactgaatggaaga

SEQ ID NO: 456666 - DNA, 5662 bp, Homo sapiens
  misc_feature (3456)..(3456): n is a, c, g, or t
  misc_feature (3510)..(3510): n is a, c, g, or t
gatccggaagtcggagcctagctgcgcgagagtttctgctcgctcaaccgagttgtcgtgttgccctcgcttctcagatccccgccggaagtgaagagagcaagcagatttgaacctatctgctttcaagctggtcatcatgatgaaacttagacacaaaaataaaaagccaggtgaaggttccaagggccacaagaagataagttggccctaccctcagcctgcaaagcaaaatgggaagaaagcaacctccaaagtgccctctgcacctcattttgttcaccccaatgatcatgccaatcgagaggctgaattaaagaagaagtgggttgaggagatgagggagaagcagcaagccgcccgggagcaagaaagacaaaaacgcaggaccattgagagctactgtcaggatgtcctaagacgccaggaggagtttgagcataaggaggaagttttgcaggaattaaatatgtttcctcagctggatgacgaggccacgaggaaggcttattacaaggagttccgtaaggtggtggaatactctgatgtgattctggaagtcctggatgccagagacccattaggctgccgctgcttccaaatggaggaggctgtcctgcgagcacaaggcaacaagaagctggtcctggtcttgaacaagattgacctggtccccaaggaggttgtggagaaatggctggattaccttcggaatgagttgccaaccgtggctttcaaggccagtacccagcatcaggtcaaaaacctgaatcgttgcagtgtgccagtagatcaggcctctgagtcactgctgaaaagcaaagcctgctttggagctgaaaacctcatgagggttctggggaactattgccgccttggtgaagtgcgcacccacattcgtgtgggtgttgtgggtcttcccaatgttgggaagagcagcctgatcaatagcctgaagcgcagccgcgcatgcagcgtgggagctgttcctggaattaccaaattcatgcaggaggtctacctggacaagttcatccggctcttggatgctccaggcattgtcccagggcccaactcagaggtgggcaccatcctgcgtaactgcgtccacgtgcagaagctggcagaccctgtgaccccagtggagaccatcctgcagcgctgcaacctggaggagatttccaactattatggcgtctctgggttccagaccactgagcactttctgacggcagtggcccaccgtttggggaagaagaagaagggaggcttatatagtcaggaacaggcggccaaagctgtcctagctgactgggtgagcgggaagatcagcttctatataccaccaccagccactcacactctgcccacccatctcagtgctgagatcgttaaggaaatgaccgaggtctttgacatcgaggatactgagcaggccaatgaagacaccatggaatgcttggccaccggagaatctgatgagctgttgggtgacacggacccacttgaaatggagatcaagttgctccattctccgatgacgaaaatagcagatgccattgaaaataaaaccaccgtgtataagattggagatctcactgggtattgcaccaatccgaaccgtcatcagatggggtgggctaaacgcaatgtggaccaccgccctaagagcaacagtatggtggatgtctgctcagtggaccgccgctcagtgctgcagaggatcatggagacggaccccctgcaacagggccaggctctggcatctgccctgaaaaataagaagaagatgcagaaacgtgcagataaaatcgccagcaagctgtctgattccatgatgtctgctctcgacctctctggcaatgctgatgatggtgttggtgactaatcgactgatctcacttcccttccgctccaagcaccagttccggtggtacgggggaataccagtgaaatagtttggttctccctgaagcatctgcatattgaaagaacgctttccccactgtgtgtcttctccccctcctccagtaaaaacagtcccggctgggtgctgtggctcacgtctgtaatcccagcactttgggaggccgaggtgggcggatcacctgaggtcgggagttcgagaccagcctggccaacatggtgaagccccgtctctactaaaaatacaaaaaaatttagccgtgcttggtggcacctgtaatcccagctacttgggaggctgaggcaggagaatcgcctgaacctgggagactaaggcaggagaatcgcctggacctgggaggcagaggttgcagtgagcccagacggcaccattgcactctagcctgggcaacaacacgaaactccgtccccaaaaaaaaaaaaaaaaaaatcccaaggggctgcagctgccaaacccaataccctctatttaacccctactctgttttacaagagaaataaaagaagtatcagcagagctcaggtgctaacacctgttgagggctgacctacaaaactctgcctacaaaactctcttagacaggtgaatatgccactagaagttaggttgctggtagacctgggggtccctgcgggagggtgatggtttctttaccaccccacaggagatttcagtggcaaggcatgcctgcagtgggctttgggccatgcatcttccaagtccataggtcttcacctgggtggcagtgagaaaaagtagaaagtaatgagcctcctgtgtctctggaaggttctagggatagggtagagggaagaagagaacaaacaagcctggcttgtgctgaagtgtggtaggcactaccctgtttgcgtgaagagaaaacaaagcacctgttagtagggaggctttagggggaagccccgtcttgggggcatttctgggcagattgtgaattggaggaatctctttaactgaagtactctggctggaccctgcccttgtgtgaccatgtctcctattgcaccagcatttgaattccatggctcaagagggttctggtaccatttattcacagactgtatcctcgagagagctgctatatatgggagtgtaccagccaactccttttccagtgtctgtaagtcacctcattaaagtataattagctgtctcctctgggagatcctaccccatcagacaagggcagtgagcccaagcagtgccagaggccctcagaaagggattagggtagatgattgcaactgaaacacaatcttctttctttgccagggtattttgggggttttgccccaaaatataccctgggcatagcattactgcagtcttggatgtctaccccaaacttccacaccatccttcgacccacagctgcacctttatttatttattttgctctgttgcccaggctggagtgcaatggcgtgatctcggctcactgcaacctctgcctcccgggttcaggtgatcctcctgccttagcctcccangtagctgggattacaggcacctgccaccacgcctggctagtttttgtatttttngtagagacgatgtttcaccatgttgaccaggctggtctcgaactcttgacctcaggtgatccgctcgcttcggcctcccaaagtgctgggattataggcgtgagccactgtgcccagcctcacagctgcatcttaaccttacctttgcctctgcctctcaagctggtacctcctaatttacatcctaagagtggaaccatgtgacaaggactggagtgccattggctgtggactgttcaggcagggaagtacaagaccactcttgtattcaggggcaaccaaaggagagaattacgtacttgttgagtacaaactgcaccaagccctggagacccattaccaccgttaaccctcaatacagctctgctagtaagggattcgtctccccaaatgaaaaaaaaaagtaatctcagaatgttggccgagcatggtggctcacacctgtagtcccagttatgcaggaggctgaggcaggagaatcgcttgatctcaggaggcggaggttgcagtgagtcgacatcacaccactgcactccagcctgggggacagagtgagacttcgtctcggaaaaaaaaaaaaaaagttgacaggatggccagacccaagtgggcgtattaagtggtggtgctaggattggaacccaagcgtgattaaaaccctatgcaggccctttcctctatattgtactgcctccttaacaaaggaagattgattaagcccctactttgtgccagtctctgttatcaagtccgttaaatgcatttaacgttaaattttttcttttttggtttaaaaaactctagtttcttaaactactagtttttagtgtcttgctaaaactatgtgctcttgaataggctacaacttatttcacactatctcattgaactctcctggtatgtgatagtgttataatgaaaaattgcataccaggacagctaagtctattttgcaaccatacagcgtttcataatttagcatttaaaatacagacagtccccgacttttggtggtttgatgtgggatttttggtggaaaagcagtatacattcagaatgcacctctacttatgatggggctacttcctggtaaacccattgtaatgtgcaaattacgggtttatcaggaggtgaccccatcggtaatggagaagtgctgggaggtaaatattagaaatggaagtatctaaatgagtaagaaacagcatgggagcataatttggccaaaatcaaacagaactaaagtagtcatgtcggtaagaatttgggactgcaggccagttacgatagctctcacctgtaatcccagcattttgggaggccgaggcaggcggatcacttgaggtcaggagttcaagaccagcctaaacaatatggcgaaacctcatctctaccaaaaaaatacaaagattagctgggcatggtgtctcatgcctgtagtcccagctacctatggggctgaggcaggaggatctcttgagcccaggaggtcgatgctgcattgagccgagattgtgccactgcactccagcgtgggcaacagagtgagactgtctcagggggaaaaaaaaagaggaaaacaaaaaagacgttgggagtgcagtttctctacctacagcatatctcaaaggttttttttaaaaaagtattttcttaactttttaccttcatttttcaaaacaattagggtacaatttacatatagtaaagttcactctttatagttttagttatgtgagtttgtacaaacatatacaggagtgaaccactaccacaatcgaaatatagttgcatcacccccctaaaactctccaggcccttttgtagtcaactcctacccccgaccctcagattctgctaaccactgatttgttttctgcccctatagttttgctttagtatgactgtcatatcaatagaatcatacaatgagtaggcttattttatgccttcaggttttaaaaattataaacatttacattacagtaaaattcactctggtatacagttctataaagctctgataaatgtgtagagttgtgtaaccaccaatgcaaccaaggtacagaacagtcctcttagcctctccctaccaaatttattcctgctactttgtagtcaaaaccagtcccctacacccaaaccctggcag

SEQ ID NO: 456667 - DNA, 4969 bp, Homo sapiens
  misc_feature (3456)..(3456): n is a, c, g, or t
  misc_feature (3510)..(3510): n is a, c, g, or t
  misc_feature (4769)..(4769): n is a, c, g, or t
  misc_feature (4861)..(4861): n is a, c, g, or t
gatccggaagtcggagcctagctgcgcgagagtttctgctcgctcaaccgagttgtcgtgttgccctcgcttctcagatccccgccggaagtgaagagagcaagcagatttgaacctatctgctttcaagctggtcatcatgatgaaacttagacacaaaaataaaaagccaggtgaaggttccaagggccacaagaagataagttggccctaccctcagcctgcaaagcaaaatgggaagaaagcaacctccaaagtgccctctgcacctcattttgttcaccccaatgatcatgccaatcgagaggctgaattaaagaagaagtgggttgaggagatgagggagaagcagcaagccgcccgggagcaagaaagacaaaaacgcaggaccattgagagctactgtcaggatgtcctaagacgccaggaggagtttgagcataaggaggaagttttgcaggaattaaatatgtttcctcagctggatgacgaggccacgaggaaggcttattacaaggagttccgtaaggtggtggaatactctgatgtgattctggaagtcctggatgccagagacccattaggctgccgctgcttccaaatggaggaggctgtcctgcgagcacaaggcaacaagaagctggtcctggtcttgaacaagattgacctggtccccaaggaggttgtggagaaatggctggattaccttcggaatgagttgccaaccgtggctttcaaggccagtacccagcatcaggtcaaaaacctgaatcgttgcagtgtgccagtagatcaggcctctgagtcactgctgaaaagcaaagcctgctttggagctgaaaacctcatgagggttctggggaactattgccgccttggtgaagtgcgcacccacattcgtgtgggtgttgtgggtcttcccaatgttgggaagagcagcctgatcaatagcctgaagcgcagccgcgcatgcagcgtgggagctgttcctggaattaccaaattcatgcaggaggtctacctggacaagttcatccggctcttggatgctccaggcattgtcccagggcccaactcagaggtgggcaccatcctgcgtaactgcgtccacgtgcagaagctggcagaccctgtgaccccagtggagaccatcctgcagcgctgcaacctggaggagatttccaactattatggcgtctctgggttccagaccactgagcactttctgacggcagtggcccaccgtttggggaagaagaagaagggaggcttatatagtcaggaacaggcggccaaagctgtcctagctgactgggtgagcgggaagatcagcttctatataccaccaccagccactcacactctgcccacccatctcagtgctgagatcgttaaggaaatgaccgaggtctttgacatcgaggatactgagcaggccaatgaagacaccatggaatgcttggccaccggagaatctgatgagctgttgggtgacacggacccacttgaaatggagatcaagttgctccattctccgatgacgaaaatagcagatgccattgaaaataaaaccaccgtgtataagattggagatctcactgggtattgcaccaatccgaaccgtcatcagatggggtgggctaaacgcaatgtggaccaccgccctaagagcaacagtatggtggatgtctgctcagtggaccgccgctcagtgctgcagaggatcatggagacggaccccctgcaacagggccaggctctggcatctgccctgaaaaataagaagaagatgcagaaacgtgcagataaaatcgccagcaagctgtctgattccatgatgtctgctctcgacctctctggcaatgctgatgatggtgttggtgactaatcgactgatctcacttcccttccgctccaagcaccagttccggtggtacgggggaataccagtgaaatagtttggttctccctgaagcatctgcatattgaaagaacgctttccccactgtgtgtcttctccccctcctccagtaaaaacagtcccggctgggtgctgtggctcacgtctgtaatcccagcactttgggaggccgaggtgggcggatcacctgaggtcgggagttcgagaccagcctggccaacatggtgaagccccgtctctactaaaaatacaaaaaaatttagccgtgcttggtggcacctgtaatcccagctacttgggaggctgaggcaggagaatcgcctgaacctgggagactaaggcaggagaatcgcctggacctgggaggcagaggttgcagtgagcccagacggcaccattgcactctagcctgggcaacaacacgaaactccgtccccaaaaaaaaaaaaaaaaaaatcccaaggggctgcagctgccaaacccaataccctctatttaacccctactctgttttacaagagaaataaaagaagtatcagcagagctcaggtgctaacacctgttgagggctgacctacaaaactctgcctacaaaactctcttagacaggtgaatatgccactagaagttaggttgctggtagacctgggggtccctgcgggagggtgatggtttctttaccaccccacaggagatttcagtggcaaggcatgcctgcagtgggctttgggccatgcatcttccaagtccataggtcttcacctgggtggcagtgagaaaaagtagaaagtaatgagcctcctgtgtctctggaaggttctagggatagggtagagggaagaagagaacaaacaagcctggcttgtgctgaagtgtggtaggcactaccctgtttgcgtgaagagaaaacaaagcacctgttagtagggaggctttagggggaagccccgtcttgggggcatttctgggcagattgtgaattggaggaatctctttaactgaagtactctggctggaccctgcccttgtgtgaccatgtctcctattgcaccagcatttgaattccatggctcaagagggttctggtaccatttattcacagactgtatcctcgagagagctgctatatatgggagtgtaccagccaactccttttccagtgtctgtaagtcacctcattaaagtataattagctgtctcctctgggagatcctaccccatcagacaagggcagtgagcccaagcagtgccagaggccctcagaaagggattagggtagatgattgcaactgaaacacaatcttctttctttgccagggtattttgggggttttgccccaaaatataccctgggcatagcattactgcagtcttggatgtctaccccaaacttccacaccatccttcgacccacagctgcacctttatttatttattttgctctgttgcccaggctggagtgcaatggcgtgatctcggctcactgcaacctctgcctcccgggttcaggtgatcctcctgccttagcctcccangtagctgggattacaggcacctgccaccacgcctggctagtttttgtatttttngtagagacgatgtttcaccatgttgaccaggctggtctcgaactcttgacctcaggtgatccgctcgcttcggcctcccaaagtgctgggattataggcgtgagccactgtgcccagcctcacagctgcatcttaaccttacctttgcctctgcctctcaagctggtacctcctaatttacatcctaagagtggaaccatgtgacaaggactggagtgccattggctgtggactgttcaggcagggaagtacaagaccactcttgtattcaggggcaaccaaaggagagaattacgtacttgttgagtacaaactgcaccaagccctggagacccattaccaccgttaaccctcaatacagctctgctagtaagggattcgtctccccaaatgaaaaaaaaaagtaatctcagaatgttggccgagcatggtggctcacacctgtagtcccagttatgcaggaggctgaggcaggagaatcgcttgatctcaggaggcggaggttgcagtgagtcgacatcacaccactgcactccagcctgggggacagagtgagacttcgtctcggaaaaaaaaaaaaaaagttgacaggatggccagacccaagtgggcgtattaagtggtggtgctaggattggaacccaagcgtgattaaaaccctatgcaggccctttcctctatattgtactgcctccttaacaaaggaagattgattaagcccctactttgtgccagtctctgttatcaagtccgttaaatgcatttaacgttaaattttttcttttttggtttaaaaaactctagtttcttaaactactagtttttagtgtcttgctaaaactatgtgctcttgaataggctacaacttatttcacactatctcattgaactctcctggtatgtgatagtgttataatgaaaaattgcataccaggacagctaagtctattttgcaaccatacagcgtttcataatttagcatttaaaatacagacagtccccgacttttggtggtttgatgtgggatttttggtggaaaagcagtatacattcagaatgcacctctacttatgatggggctacttcctggtaaacccattgtaatgtgcaaattacgggtttatcaggaggtgaccccatcggtaatggagaagtgctgggattataggcgtgagccactgtgcccagcctcacagctgcatcttaaccttacctttgcctctgcctctcaagctggtacctcctaatttacatcctangagtggaaccatgtgacaaggactggagtgccattggctgtggactgttcaggcagggaagtacaagaccactcttgtattcaggggcaacnaaaggagagaattacgtacttgttgagtacaaactgcaccaagccctggagacccattaccaccgttaaccctcaatacagctctgctagtaagggattcgtctcccc

SEQ ID NO: 456668 - DNA, 5445 bp, Homo sapiens
  misc_feature (3456)..(3456): n is a, c, g, or t
  misc_feature (3510)..(3510): n is a, c, g, or t
gatccggaagtcggagcctagctgcgcgagagtttctgctcgctcaaccgagttgtcgtgttgccctcgcttctcagatccccgccggaagtgaagagagcaagcagatttgaacctatctgctttcaagctggtcatcatgatgaaacttagacacaaaaataaaaagccaggtgaaggttccaagggccacaagaagataagttggccctaccctcagcctgcaaagcaaaatgggaagaaagcaacctccaaagtgccctctgcacctcattttgttcaccccaatgatcatgccaatcgagaggctgaattaaagaagaagtgggttgaggagatgagggagaagcagcaagccgcccgggagcaagaaagacaaaaacgcaggaccattgagagctactgtcaggatgtcctaagacgccaggaggagtttgagcataaggaggaagttttgcaggaattaaatatgtttcctcagctggatgacgaggccacgaggaaggcttattacaaggagttccgtaaggtggtggaatactctgatgtgattctggaagtcctggatgccagagacccattaggctgccgctgcttccaaatggaggaggctgtcctgcgagcacaaggcaacaagaagctggtcctggtcttgaacaagattgacctggtccccaaggaggttgtggagaaatggctggattaccttcggaatgagttgccaaccgtggctttcaaggccagtacccagcatcaggtcaaaaacctgaatcgttgcagtgtgccagtagatcaggcctctgagtcactgctgaaaagcaaagcctgctttggagctgaaaacctcatgagggttctggggaactattgccgccttggtgaagtgcgcacccacattcgtgtgggtgttgtgggtcttcccaatgttgggaagagcagcctgatcaatagcctgaagcgcagccgcgcatgcagcgtgggagctgttcctggaattaccaaattcatgcaggaggtctacctggacaagttcatccggctcttggatgctccaggcattgtcccagggcccaactcagaggtgggcaccatcctgcgtaactgcgtccacgtgcagaagctggcagaccctgtgaccccagtggagaccatcctgcagcgctgcaacctggaggagatttccaactattatggcgtctctgggttccagaccactgagcactttctgacggcagtggcccaccgtttggggaagaagaagaagggaggcttatatagtcaggaacaggcggccaaagctgtcctagctgactgggtgagcgggaagatcagcttctatataccaccaccagccactcacactctgcccacccatctcagtgctgagatcgttaaggaaatgaccgaggtctttgacatcgaggatactgagcaggccaatgaagacaccatggaatgcttggccaccggagaatctgatgagctgttgggtgacacggacccacttgaaatggagatcaagttgctccattctccgatgacgaaaatagcagatgccattgaaaataaaaccaccgtgtataagattggagatctcactgggtattgcaccaatccgaaccgtcatcagatggggtgggctaaacgcaatgtggaccaccgccctaagagcaacagtatggtggatgtctgctcagtggaccgccgctcagtgctgcagaggatcatggagacggaccccctgcaacagggccaggctctggcatctgccctgaaaaataagaagaagatgcagaaacgtgcagataaaatcgccagcaagctgtctgattccatgatgtctgctctcgacctctctggcaatgctgatgatggtgttggtgactaatcgactgatctcacttcccttccgctccaagcaccagttccggtggtacgggggaataccagtgaaatagtttggttctccctgaagcatctgcatattgaaagaacgctttccccactgtgtgtcttctccccctcctccagtaaaaacagtcccggctgggtgctgtggctcacgtctgtaatcccagcactttgggaggccgaggtgggcggatcacctgaggtcgggagttcgagaccagcctggccaacatggtgaagccccgtctctactaaaaatacaaaaaaatttagccgtgcttggtggcacctgtaatcccagctacttgggaggctgaggcaggagaatcgcctgaacctgggagactaaggcaggagaatcgcctggacctgggaggcagaggttgcagtgagcccagacggcaccattgcactctagcctgggcaacaacacgaaactccgtccccaaaaaaaaaaaaaaaaaaatcccaaggggctgcagctgccaaacccaataccctctatttaacccctactctgttttacaagagaaataaaagaagtatcagcagagctcaggtgctaacacctgttgagggctgacctacaaaactctgcctacaaaactctcttagacaggtgaatatgccactagaagttaggttgctggtagacctgggggtccctgcgggagggtgatggtttctttaccaccccacaggagatttcagtggcaaggcatgcctgcagtgggctttgggccatgcatcttccaagtccataggtcttcacctgggtggcagtgagaaaaagtagaaagtaatgagcctcctgtgtctctggaaggttctagggatagggtagagggaagaagagaacaaacaagcctggcttgtgctgaagtgtggtaggcactaccctgtttgcgtgaagagaaaacaaagcacctgttagtagggaggctttagggggaagccccgtcttgggggcatttctgggcagattgtgaattggaggaatctctttaactgaagtactctggctggaccctgcccttgtgtgaccatgtctcctattgcaccagcatttgaattccatggctcaagagggttctggtaccatttattcacagactgtatcctcgagagagctgctatatatgggagtgtaccagccaactccttttccagtgtctgtaagtcacctcattaaagtataattagctgtctcctctgggagatcctaccccatcagacaagggcagtgagcccaagcagtgccagaggccctcagaaagggattagggtagatgattgcaactgaaacacaatcttctttctttgccagggtattttgggggttttgccccaaaatataccctgggcatagcattactgcagtcttggatgtctaccccaaacttccacaccatccttcgacccacagctgcacctttatttatttattttgctctgttgcccaggctggagtgcaatggcgtgatctcggctcactgcaacctctgcctcccgggttcaggtgatcctcctgccttagcctcccangtagctgggattacaggcacctgccaccacgcctggctagtttttgtatttttngtagagacgatgtttcaccatgttgaccaggctggtctcgaactcttgacctcaggtgatccgctcgcttcggcctcccaaagtgctgggattataggcgtgagccactgtgcccagcctcacagctgcatcttaaccttacctttgcctctgcctctcaagctggtacctcctaatttacatcctaagagtggaaccatgtgacaaggactggagtgccattggctgtggactgttcaggcagggaagtacaagaccactcttgtattcaggggcaaccaaaggagagaattacgtacttgttgagtacaaacactccagcctgggggacagagtgagacttcgtctcggaaaaaaaaaaaaaaagttgacaggatggccagacccaagtgggcgtattaagtggtggtgctaggattggaacccaagcgtgattaaaaccctatgcaggccctttcctctatattgtactgcctccttaacaaaggaagattgattaagcccctactttgtgccagtctctgttatcaagtccgttaaatgcatttaacgttaaattttttcttttttggtttaaaaaactctagtttcttaaactactagtttttagtgtcttgctaaaactatgtgctcttgaataggctacaacttatttcacactatctcattgaactctcctggtatgtgatagtgttataatgaaaaattgcataccaggacagctaagtctattttgcaaccatacagcgtttcataatttagcatttaaaatacagacagtccccgacttttggtggtttgatgtgggatttttggtggaaaagcagtatacattcagaatgcacctctacttatgatggggctacttcctggtaaacccattgtaatgtgcaaattacgggtttatcaggaggtgaccccatcggtaatggagaagtgctgggaggtaaatattagaaatggaagtatctaaatgagtaagaaacagcatgggagcataatttggccaaaatcaaacagaactaaagtagtcatgtcggtaagaatttgggactgcaggccagttacgatagctctcacctgtaatcccagcattttgggaggccgaggcaggcggatcacttgaggtcaggagttcaagaccagcctaaacaatatggcgaaacctcatctctaccaaaaaaatacaaagattagctgggcatggtgtctcatgcctgtagtcccagctacctatggggctgaggcaggaggatctcttgagcccaggaggtcgatgctgcattgagccgagattgtgccactgcactccagcgtgggcaacagagtgagactgtctcagggggaaaaaaaaagaggaaaacaaaaaagacgttgggagtgcagtttctctacctacagcatatctcaaaggttttttttaaaaaagtattttcttaactttttaccttcatttttcaaaacaattagggtacaatttacatatagtaaagttcactctttatagttttagttatgtgagtttgtacaaacatatacaggagtgaaccactaccacaatcgaaatatagttgcatcacccccctaaaactctccaggcccttttgtagtcaactcctacccccgaccctcagattctgctaaccactgatttgttttctgcccctatagttttgctttagtatgactgtcatatcaatagaatcatacaatgagtaggcttattttatgccttcaggttttaaaaattataaacatttacattacagtaaaattcactctggtatacagttctataaagctctgataaatgtgtagagttgtgtaaccaccaatgcaaccaaggtacagaacagtcctcttagcctctccctaccaaatttattcctgctactttgtagtcaaaaccagtcccctacacccaaaccctggcag

SEQ ID NO: 456669 - DNA, 5747 bp, Homo sapiens
  misc_feature (3541)..(3541): n is a, c, g, or t
  misc_feature (3595)..(3595): n is a, c, g, or t
ccccccgccccccccccccccccccaacataggcagtagaggccgggttaatcggcagagggtagtaagaaacttctctcctcttttctcacaatgtgcgctcacctagacggccgggcagttaggatcgtctattggatgtgaaaccagagatgcccgccaacctggaatagagaggaagagagcaagcagatttgaacctatctgctttcaagctggtcatcatgatgaaacttagacacaaaaataaaaagccaggtgaaggttccaagggccacaagaagataagttggccctaccctcagcctgcaaagcaaaatgggaagaaagcaacctccaaagtgccctctgcacctcattttgttcaccccaatgatcatgccaatcgagaggctgaattaaagaagaagtgggttgaggagatgagggagaagcagcaagccgcccgggagcaagaaagacaaaaacgcaggaccattgagagctactgtcaggatgtcctaagacgccaggaggagtttgagcataaggaggaagttttgcaggaattaaatatgtttcctcagctggatgacgaggccacgaggaaggcttattacaaggagttccgtaaggtggtggaatactctgatgtgattctggaagtcctggatgccagagacccattaggctgccgctgcttccaaatggaggaggctgtcctgcgagcacaaggcaacaagaagctggtcctggtcttgaacaagattgacctggtccccaaggaggttgtggagaaatggctggattaccttcggaatgagttgccaaccgtggctttcaaggccagtacccagcatcaggtcaaaaacctgaatcgttgcagtgtgccagtagatcaggcctctgagtcactgctgaaaagcaaagcctgctttggagctgaaaacctcatgagggttctggggaactattgccgccttggtgaagtgcgcacccacattcgtgtgggtgttgtgggtcttcccaatgttgggaagagcagcctgatcaatagcctgaagcgcagccgcgcatgcagcgtgggagctgttcctggaattaccaaattcatgcaggaggtctacctggacaagttcatccggctcttggatgctccaggcattgtcccagggcccaactcagaggtgggcaccatcctgcgtaactgcgtccacgtgcagaagctggcagaccctgtgaccccagtggagaccatcctgcagcgctgcaacctggaggagatttccaactattatggcgtctctgggttccagaccactgagcactttctgacggcagtggcccaccgtttggggaagaagaagaagggaggcttatatagtcaggaacaggcggccaaagctgtcctagctgactgggtgagcgggaagatcagcttctatataccaccaccagccactcacactctgcccacccatctcagtgctgagatcgttaaggaaatgaccgaggtctttgacatcgaggatactgagcaggccaatgaagacaccatggaatgcttggccaccggagaatctgatgagctgttgggtgacacggacccacttgaaatggagatcaagttgctccattctccgatgacgaaaatagcagatgccattgaaaataaaaccaccgtgtataagattggagatctcactgggtattgcaccaatccgaaccgtcatcagatggggtgggctaaacgcaatgtggaccaccgccctaagagcaacagtatggtggatgtctgctcagtggaccgccgctcagtgctgcagaggatcatggagacggaccccctgcaacagggccaggctctggcatctgccctgaaaaataagaagaagatgcagaaacgtgcagataaaatcgccagcaagctgtctgattccatgatgtctgctctcgacctctctggcaatgctgatgatggtgttggtgactaatcgactgatctcacttcccttccgctccaagcaccagttccggtggtacgggggaataccagtgaaatagtttggttctccctgaagcatctgcatattgaaagaacgctttccccactgtgtgtcttctccccctcctccagtaaaaacagtcccggctgggtgctgtggctcacgtctgtaatcccagcactttgggaggccgaggtgggcggatcacctgaggtcgggagttcgagaccagcctggccaacatggtgaagccccgtctctactaaaaatacaaaaaaatttagccgtgcttggtggcacctgtaatcccagctacttgggaggctgaggcaggagaatcgcctgaacctgggagactaaggcaggagaatcgcctggacctgggaggcagaggttgcagtgagcccagacggcaccattgcactctagcctgggcaacaacacgaaactccgtccccaaaaaaaaaaaaaaaaaaatcccaaggggctgcagctgccaaacccaataccctctatttaacccctactctgttttacaagagaaataaaagaagtatcagcagagctcaggtgctaacacctgttgagggctgacctacaaaactctgcctacaaaactctcttagacaggtgaatatgccactagaagttaggttgctggtagacctgggggtccctgcgggagggtgatggtttctttaccaccccacaggagatttcagtggcaaggcatgcctgcagtgggctttgggccatgcatcttccaagtccataggtcttcacctgggtggcagtgagaaaaagtagaaagtaatgagcctcctgtgtctctggaaggttctagggatagggtagagggaagaagagaacaaacaagcctggcttgtgctgaagtgtggtaggcactaccctgtttgcgtgaagagaaaacaaagcacctgttagtagggaggctttagggggaagccccgtcttgggggcatttctgggcagattgtgaattggaggaatctctttaactgaagtactctggctggaccctgcccttgtgtgaccatgtctcctattgcaccagcatttgaattccatggctcaagagggttctggtaccatttattcacagactgtatcctcgagagagctgctatatatgggagtgtaccagccaactccttttccagtgtctgtaagtcacctcattaaagtataattagctgtctcctctgggagatcctaccccatcagacaagggcagtgagcccaagcagtgccagaggccctcagaaagggattagggtagatgattgcaactgaaacacaatcttctttctttgccagggtattttgggggttttgccccaaaatataccctgggcatagcattactgcagtcttggatgtctaccccaaacttccacaccatccttcgacccacagctgcacctttatttatttattttgctctgttgcccaggctggagtgcaatggcgtgatctcggctcactgcaacctctgcctcccgggttcaggtgatcctcctgccttagcctcccangtagctgggattacaggcacctgccaccacgcctggctagtttttgtatttttngtagagacgatgtttcaccatgttgaccaggctggtctcgaactcttgacctcaggtgatccgctcgcttcggcctcccaaagtgctgggattataggcgtgagccactgtgcccagcctcacagctgcatcttaaccttacctttgcctctgcctctcaagctggtacctcctaatttacatcctaagagtggaaccatgtgacaaggactggagtgccattggctgtggactgttcaggcagggaagtacaagaccactcttgtattcaggggcaaccaaaggagagaattacgtacttgttgagtacaaactgcaccaagccctggagacccattaccaccgttaaccctcaatacagctctgctagtaagggattcgtctccccaaatgaaaaaaaaaagtaatctcagaatgttggccgagcatggtggctcacacctgtagtcccagttatgcaggaggctgaggcaggagaatcgcttgatctcaggaggcggaggttgcagtgagtcgacatcacaccactgcactccagcctgggggacagagtgagacttcgtctcggaaaaaaaaaaaaaaagttgacaggatggccagacccaagtgggcgtattaagtggtggtgctaggattggaacccaagcgtgattaaaaccctatgcaggccctttcctctatattgtactgcctccttaacaaaggaagattgattaagcccctactttgtgccagtctctgttatcaagtccgttaaatgcatttaacgttaaattttttcttttttggtttaaaaaactctagtttcttaaactactagtttttagtgtcttgctaaaactatgtgctcttgaataggctacaacttatttcacactatctcattgaactctcctggtatgtgatagtgttataatgaaaaattgcataccaggacagctaagtctattttgcaaccatacagcgtttcataatttagcatttaaaatacagacagtccccgacttttggtggtttgatgtgggatttttggtggaaaagcagtatacattcagaatgcacctctacttatgatggggctacttcctggtaaacccattgtaatgtgcaaattacgggtttatcaggaggtgaccccatcggtaatggagaagtgctgggaggtaaatattagaaatggaagtatctaaatgagtaagaaacagcatgggagcataatttggccaaaatcaaacagaactaaagtagtcatgtcggtaagaatttgggactgcaggccagttacgatagctctcacctgtaatcccagcattttgggaggccgaggcaggcggatcacttgaggtcaggagttcaagaccagcctaaacaatatggcgaaacctcatctctaccaaaaaaatacaaagattagctgggcatggtgtctcatgcctgtagtcccagctacctatggggctgaggcaggaggatctcttgagcccaggaggtcgatgctgcattgagccgagattgtgccactgcactccagcgtgggcaacagagtgagactgtctcagggggaaaaaaaaagaggaaaacaaaaaagacgttgggagtgcagtttctctacctacagcatatctcaaaggttttttttaaaaaagtattttcttaactttttaccttcatttttcaaaacaattagggtacaatttacatatagtaaagttcactctttatagttttagttatgtgagtttgtacaaacatatacaggagtgaaccactaccacaatcgaaatatagttgcatcacccccctaaaactctccaggcccttttgtagtcaactcctacccccgaccctcagattctgctaaccactgatttgttttctgcccctatagttttgctttagtatgactgtcatatcaatagaatcatacaatgagtaggcttattttatgccttcaggttttaaaaattataaacatttacattacagtaaaattcactctggtatacagttctataaagctctgataaatgtgtagagttgtgtaaccaccaatgcaaccaaggtacagaacagtcctcttagcctctccctaccaaatttattcctgctactttgtagtcaaaaccagtcccctacacccaaaccctggcag

SEQ ID NO: 456670 - DNA, 4674 bp, Homo sapiens
  misc_feature (3456)..(3456): n is a, c, g, or t
  misc_feature (3510)..(3510): n is a, c, g, or t
gatccggaagtcggagcctagctgcgcgagagtttctgctcgctcaaccgagttgtcgtgttgccctcgcttctcagatccccgccggaagtgaagagagcaagcagatttgaacctatctgctttcaagctggtcatcatgatgaaacttagacacaaaaataaaaagccaggtgaaggttccaagggccacaagaagataagttggccctaccctcagcctgcaaagcaaaatgggaagaaagcaacctccaaagtgccctctgcacctcattttgttcaccccaatgatcatgccaatcgagaggctgaattaaagaagaagtgggttgaggagatgagggagaagcagcaagccgcccgggagcaagaaagacaaaaacgcaggaccattgagagctactgtcaggatgtcctaagacgccaggaggagtttgagcataaggaggaagttttgcaggaattaaatatgtttcctcagctggatgacgaggccacgaggaaggcttattacaaggagttccgtaaggtggtggaatactctgatgtgattctggaagtcctggatgccagagacccattaggctgccgctgcttccaaatggaggaggctgtcctgcgagcacaaggcaacaagaagctggtcctggtcttgaacaagattgacctggtccccaaggaggttgtggagaaatggctggattaccttcggaatgagttgccaaccgtggctttcaaggccagtacccagcatcaggtcaaaaacctgaatcgttgcagtgtgccagtagatcaggcctctgagtcactgctgaaaagcaaagcctgctttggagctgaaaacctcatgagggttctggggaactattgccgccttggtgaagtgcgcacccacattcgtgtgggtgttgtgggtcttcccaatgttgggaagagcagcctgatcaatagcctgaagcgcagccgcgcatgcagcgtgggagctgttcctggaattaccaaattcatgcaggaggtctacctggacaagttcatccggctcttggatgctccaggcattgtcccagggcccaactcagaggtgggcaccatcctgcgtaactgcgtccacgtgcagaagctggcagaccctgtgaccccagtggagaccatcctgcagcgctgcaacctggaggagatttccaactattatggcgtctctgggttccagaccactgagcactttctgacggcagtggcccaccgtttggggaagaagaagaagggaggcttatatagtcaggaacaggcggccaaagctgtcctagctgactgggtgagcgggaagatcagcttctatataccaccaccagccactcacactctgcccacccatctcagtgctgagatcgttaaggaaatgaccgaggtctttgacatcgaggatactgagcaggccaatgaagacaccatggaatgcttggccaccggagaatctgatgagctgttgggtgacacggacccacttgaaatggagatcaagttgctccattctccgatgacgaaaatagcagatgccattgaaaataaaaccaccgtgtataagattggagatctcactgggtattgcaccaatccgaaccgtcatcagatggggtgggctaaacgcaatgtggaccaccgccctaagagcaacagtatggtggatgtctgctcagtggaccgccgctcagtgctgcagaggatcatggagacggaccccctgcaacagggccaggctctggcatctgccctgaaaaataagaagaagatgcagaaacgtgcagataaaatcgccagcaagctgtctgattccatgatgtctgctctcgacctctctggcaatgctgatgatggtgttggtgactaatcgactgatctcacttcccttccgctccaagcaccagttccggtggtacgggggaataccagtgaaatagtttggttctccctgaagcatctgcatattgaaagaacgctttccccactgtgtgtcttctccccctcctccagtaaaaacagtcccggctgggtgctgtggctcacgtctgtaatcccagcactttgggaggccgaggtgggcggatcacctgaggtcgggagttcgagaccagcctggccaacatggtgaagccccgtctctactaaaaatacaaaaaaatttagccgtgcttggtggcacctgtaatcccagctacttgggaggctgaggcaggagaatcgcctgaacctgggagactaaggcaggagaatcgcctggacctgggaggcagaggttgcagtgagcccagacggcaccattgcactctagcctgggcaacaacacgaaactccgtccccaaaaaaaaaaaaaaaaaaatcccaaggggctgcagctgccaaacccaataccctctatttaacccctactctgttttacaagagaaataaaagaagtatcagcagagctcaggtgctaacacctgttgagggctgacctacaaaactctgcctacaaaactctcttagacaggtgaatatgccactagaagttaggttgctggtagacctgggggtccctgcgggagggtgatggtttctttaccaccccacaggagatttcagtggcaaggcatgcctgcagtgggctttgggccatgcatcttccaagtccataggtcttcacctgggtggcagtgagaaaaagtagaaagtaatgagcctcctgtgtctctggaaggttctagggatagggtagagggaagaagagaacaaacaagcctggcttgtgctgaagtgtggtaggcactaccctgtttgcgtgaagagaaaacaaagcacctgttagtagggaggctttagggggaagccccgtcttgggggcatttctgggcagattgtgaattggaggaatctctttaactgaagtactctggctggaccctgcccttgtgtgaccatgtctcctattgcaccagcatttgaattccatggctcaagagggttctggtaccatttattcacagactgtatcctcgagagagctgctatatatgggagtgtaccagccaactccttttccagtgtctgtaagtcacctcattaaagtataattagctgtctcctctgggagatcctaccccatcagacaagggcagtgagcccaagcagtgccagaggccctcagaaagggattagggtagatgattgcaactgaaacacaatcttctttctttgccagggtattttgggggttttgccccaaaatataccctgggcatagcattactgcagtcttggatgtctaccccaaacttccacaccatccttcgacccacagctgcacctttatttatttattttgctctgttgcccaggctggagtgcaatggcgtgatctcggctcactgcaacctctgcctcccgggttcaggtgatcctcctgccttagcctcccangtagctgggattacaggcacctgccaccacgcctggctagtttttgtatttttngtagagacgatgtttcaccatgttgaccaggctggtctcgaactcttgacctcaggtgatccgctcgcttcggcctcccaaagtgctgggattataggcgtgagccactgtgcccagcctcacagctgcatcttaaccttacctttgcctctgcctctcaagctggtacctcctaatttacatcctaagagtggaaccatgtgacaaggactggagtgccattggctgtggactgttcaggcagggaagtacaagaccactcttgtattcaggggcaaccaaaggagagaattacgtacttgttgagtacaaactgcaccaagccctggagacccattaccaccgttaaccctcaatacagctctgctagtaagggattcgtctccccaaatgaaaaaaaaaagtaatctcagaatgttggccgagcatggtggctcacacctgtagtcccacctcccgagtaacagggactacaggtgcccaccaccatgctgggctaatttttgtatttttggtagaggcgggggtttctccacactggccaggctggtcttgaacttctgacctcaagggatccacccgcctcggcctcccaaagtgctgggattataggcatgaaccaccgtgtccggccatatattttcgtcttttgaagactgttatatacatgaaattatatggtatgtagcattttgagagcgacttcttttgctatgagtaatacatttgagattcatccatatttctcagtatattaatagttcttatttctgagtcactccattgtgtggatttactactgtttgttccccagttgaaggatgtttaggatctttgcagttttggacaattacaagtaaagctgctataaacatttgtatgcaaattttgtgttttcatttatctatagtaaatacctagagttggattgctgggatatatggtaagcatatgtttgacattttaagaaacttctaaactgtttttcaaagtggctctaccatttcacattcccatcagtatgaaagtttcatttccacatcctctctagtacttgggggtgtcagtttagttttttaatttttaaattttttaatttttttaatacatttaaatagagatggggtctcactgtgttgaccaggatggtcttgaactgctggc

SEQ ID NO: 456671 - DNA, 4082 bp, Homo sapiens
  misc_feature (3456)..(3456): n is a, c, g, or t
  misc_feature (3510)..(3510): n is a, c, g, or t
gatccggaagtcggagcctagctgcgcgagagtttctgctcgctcaaccgagttgtcgtgttgccctcgcttctcagatccccgccggaagtgaagagagcaagcagatttgaacctatctgctttcaagctggtcatcatgatgaaacttagacacaaaaataaaaagccaggtgaaggttccaagggccacaagaagataagttggccctaccctcagcctgcaaagcaaaatgggaagaaagcaacctccaaagtgccctctgcacctcattttgttcaccccaatgatcatgccaatcgagaggctgaattaaagaagaagtgggttgaggagatgagggagaagcagcaagccgcccgggagcaagaaagacaaaaacgcaggaccattgagagctactgtcaggatgtcctaagacgccaggaggagtttgagcataaggaggaagttttgcaggaattaaatatgtttcctcagctggatgacgaggccacgaggaaggcttattacaaggagttccgtaaggtggtggaatactctgatgtgattctggaagtcctggatgccagagacccattaggctgccgctgcttccaaatggaggaggctgtcctgcgagcacaaggcaacaagaagctggtcctggtcttgaacaagattgacctggtccccaaggaggttgtggagaaatggctggattaccttcggaatgagttgccaaccgtggctttcaaggccagtacccagcatcaggtcaaaaacctgaatcgttgcagtgtgccagtagatcaggcctctgagtcactgctgaaaagcaaagcctgctttggagctgaaaacctcatgagggttctggggaactattgccgccttggtgaagtgcgcacccacattcgtgtgggtgttgtgggtcttcccaatgttgggaagagcagcctgatcaatagcctgaagcgcagccgcgcatgcagcgtgggagctgttcctggaattaccaaattcatgcaggaggtctacctggacaagttcatccggctcttggatgctccaggcattgtcccagggcccaactcagaggtgggcaccatcctgcgtaactgcgtccacgtgcagaagctggcagaccctgtgaccccagtggagaccatcctgcagcgctgcaacctggaggagatttccaactattatggcgtctctgggttccagaccactgagcactttctgacggcagtggcccaccgtttggggaagaagaagaagggaggcttatatagtcaggaacaggcggccaaagctgtcctagctgactgggtgagcgggaagatcagcttctatataccaccaccagccactcacactctgcccacccatctcagtgctgagatcgttaaggaaatgaccgaggtctttgacatcgaggatactgagcaggccaatgaagacaccatggaatgcttggccaccggagaatctgatgagctgttgggtgacacggacccacttgaaatggagatcaagttgctccattctccgatgacgaaaatagcagatgccattgaaaataaaaccaccgtgtataagattggagatctcactgggtattgcaccaatccgaaccgtcatcagatggggtgggctaaacgcaatgtggaccaccgccctaagagcaacagtatggtggatgtctgctcagtggaccgccgctcagtgctgcagaggatcatggagacggaccccctgcaacagggccaggctctggcatctgccctgaaaaataagaagaagatgcagaaacgtgcagataaaatcgccagcaagctgtctgattccatgatgtctgctctcgacctctctggcaatgctgatgatggtgttggtgactaatcgactgatctcacttcccttccgctccaagcaccagttccggtggtacgggggaataccagtgaaatagtttggttctccctgaagcatctgcatattgaaagaacgctttccccactgtgtgtcttctccccctcctccagtaaaaacagtcccggctgggtgctgtggctcacgtctgtaatcccagcactttgggaggccgaggtgggcggatcacctgaggtcgggagttcgagaccagcctggccaacatggtgaagccccgtctctactaaaaatacaaaaaaatttagccgtgcttggtggcacctgtaatcccagctacttgggaggctgaggcaggagaatcgcctgaacctgggagactaaggcaggagaatcgcctggacctgggaggcagaggttgcagtgagcccagacggcaccattgcactctagcctgggcaacaacacgaaactccgtccccaaaaaaaaaaaaaaaaaaatcccaaggggctgcagctgccaaacccaataccctctatttaacccctactctgttttacaagagaaataaaagaagtatcagcagagctcaggtgctaacacctgttgagggctgacctacaaaactctgcctacaaaactctcttagacaggtgaatatgccactagaagttaggttgctggtagacctgggggtccctgcgggagggtgatggtttctttaccaccccacaggagatttcagtggcaaggcatgcctgcagtgggctttgggccatgcatcttccaagtccataggtcttcacctgggtggcagtgagaaaaagtagaaagtaatgagcctcctgtgtctctggaaggttctagggatagggtagagggaagaagagaacaaacaagcctggcttgtgctgaagtgtggtaggcactaccctgtttgcgtgaagagaaaacaaagcacctgttagtagggaggctttagggggaagccccgtcttgggggcatttctgggcagattgtgaattggaggaatctctttaactgaagtactctggctggaccctgcccttgtgtgaccatgtctcctattgcaccagcatttgaattccatggctcaagagggttctggtaccatttattcacagactgtatcctcgagagagctgctatatatgggagtgtaccagccaactccttttccagtgtctgtaagtcacctcattaaagtataattagctgtctcctctgggagatcctaccccatcagacaagggcagtgagcccaagcagtgccagaggccctcagaaagggattagggtagatgattgcaactgaaacacaatcttctttctttgccagggtattttgggggttttgccccaaaatataccctgggcatagcattactgcagtcttggatgtctaccccaaacttccacaccatccttcgacccacagctgcacctttatttatttattttgctctgttgcccaggctggagtgcaatggcgtgatctcggctcactgcaacctctgcctcccgggttcaggtgatcctcctgccttagcctcccangtagctgggattacaggcacctgccaccacgcctggctagtttttgtatttttngtagagacgatgtttcaccatgttgaccaggctggtctcgaactcttgacctcaggtgatccgctcgcttcggcctcccaaagtgctgggattataggcgtgagccactgtgcccagcctcacagctgcatcttaaccttacctttgcctctgcctctcaagctggtacctcctaatttacatcctaagagtggaaccatgtgacaaggactggagtgccattggctgtggactgttcaggcagggaagtacaagaccactcttgtattcaggggcaaccaaaggagagaattacgtacttgttgagtacaaactgcaccaagccctggagacccattaccaccgttaaccctcaatacagctctgctagtaagggattcgtctccccaaatgaaaaaaaaaagtaatctcagcctcccgagtagctgggattatgggcgcccgccaccacgcccagctaatttttgtatttttagtagagatggggtttcactgttttggccaggctggtctcgaactcctgacctcatgatcctcctgcctcagcctcccaaagtgctgggattacaaga

SEQ ID NO: 456672 - DNA, 5663 bp, Homo sapiens
  misc_feature (3457)..(3457): n is a, c, g, or t
  misc_feature (3511)..(3511): n is a, c, g, or t
taacggctaggtacgagcctgggagtgaatcggccgaggctcgcccaacgagtttgcagtgtatgccctcgcactcagatccccgccggaagtgaagagagcaagcagatttgaacctatctgctttcaagctggtcatcatgatgaaacttagacacaaaaataaaaagccaggtgaaggttccaagggccacaagaagataagttggccctaccctcagcctgcaaagcaaaatgggaagaaagcaacctccaaagtgccctctgcacctcattttgttcaccccaatgatcatgccaatcgagaggctgaattaaagaagaagtgggttgaggagatgagggagaagcagcaagccgcccgggagcaagaaagacaaaaacgcaggaccattgagagctactgtcaggatgtcctaagacgccaggaggagtttgagcataaggaggaagttttgcaggaattaaatatgtttcctcagctggatgacgaggccacgaggaaggcttattacaaggagttccgtaaggtggtggaatactctgatgtgattctggaagtcctggatgccagagacccattaggctgccgctgcttccaaatggaggaggctgtcctgcgagcacaaggcaacaagaagctggtcctggtcttgaacaagattgacctggtccccaaggaggttgtggagaaatggctggattaccttcggaatgagttgccaaccgtggctttcaaggccagtacccagcatcaggtcaaaaacctgaatcgttgcagtgtgccagtagatcaggcctctgagtcactgctgaaaagcaaagcctgctttggagctgaaaacctcatgagggttctggggaactattgccgccttggtgaagtgcgcacccacattcgtgtgggtgttgtgggtcttcccaatgttgggaagagcagcctgatcaatagcctgaagcgcagccgcgcatgcagcgtgggagctgttcctggaattaccaaattcatgcaggaggtctacctggacaagttcatccggctcttggatgctccaggcattgtcccagggcccaactcagaggtgggcaccatcctgcgtaactgcgtccacgtgcagaagctggcagaccctgtgaccccagtggagaccatcctgcagcgctgcaacctggaggagatttccaactattatggcgtctctgggttccagaccactgagcactttctgacggcagtggcccaccgtttggggaagaagaagaagggaggcttatatagtcaggaacaggcggccaaagctgtcctagctgactgggtgagcgggaagatcagcttctatataccaccaccagccactcacactctgcccacccatctcagtgctgagatcgttaaggaaatgaccgaggtctttgacatcgaggatactgagcaggccaatgaagacaccatggaatgcttggccaccggagaatctgatgagctgttgggtgacacggacccacttgaaatggagatcaagttgctccattctccgatgacgaaaatagcagatgccattgaaaataaaaccaccgtgtataagattggagatctcactgggtattgcaccaatccgaaccgtcatcagatggggtgggctaaacgcaatgtggaccaccgccctaagagcaacagtatggtggatgtctgctcagtggaccgccgctcagtgctgcagaggatcatggagacggaccccctgcaacagggccaggctctggcatctgccctgaaaaataagaagaagatgcagaaacgtgcagataaaatcgccagcaagctgtctgattccatgatgtctgctctcgacctctctggcaatgctgatgatggtgttggtgactaatcgactgatctcacttcccttccgctccaagcaccagttccggtggtacgggggaataccagtgaaatagtttggttctccctgaagcatctgcatattgaaagaacgctttccccactgtgtgtcttctccccctcctccagtaaaaacagtcccggctgggtgctgtggctcacgtctgtaatcccagcactttgggaggccgaggtgggcggatcacctgaggtcgggagttcgagaccagcctggccaacatggtgaagccccgtctctactaaaaatacaaaaaaatttagccgtgcttggtggcacctgtaatcccagctacttgggaggctgaggcaggagaatcgcctgaacctgggagactaaggcaggagaatcgcctggacctgggaggcagaggttgcagtgagcccagacggcaccattgcactctagcctgggcaacaacacgaaactccgtccccaaaaaaaaaaaaaaaaaaatcccaaggggctgcagctgccaaacccaataccctctatttaacccctactctgttttacaagagaaataaaagaagtatcagcagagctcaggtgctaacacctgttgagggctgacctacaaaactctgcctacaaaactctcttagacaggtgaatatgccactagaagttaggttgctggtagacctgggggtccctgcgggagggtgatggtttctttaccaccccacaggagatttcagtggcaaggcatgcctgcagtgggctttgggccatgcatcttccaagtccataggtcttcacctgggtggcagtgagaaaaagtagaaagtaatgagcctcctgtgtctctggaaggttctagggatagggtagagggaagaagagaacaaacaagcctggcttgtgctgaagtgtggtaggcactaccctgtttgcgtgaagagaaaacaaagcacctgttagtagggaggctttagggggaagccccgtcttgggggcatttctgggcagattgtgaattggaggaatctctttaactgaagtactctggctggaccctgcccttgtgtgaccatgtctcctattgcaccagcatttgaattccatggctcaagagggttctggtaccatttattcacagactgtatcctcgagagagctgctatatatgggagtgtaccagccaactccttttccagtgtctgtaagtcacctcattaaagtataattagctgtctcctctgggagatcctaccccatcagacaagggcagtgagcccaagcagtgccagaggccctcagaaagggattagggtagatgattgcaactgaaacacaatcttctttctttgccagggtattttgggggttttgccccaaaatataccctgggcatagcattactgcagtcttggatgtctaccccaaacttccacaccatccttcgacccacagctgcacctttatttatttattttgctctgttgcccaggctggagtgcaatggcgtgatctcggctcactgcaacctctgcctcccgggttcaggtgatcctcctgccttagcctcccangtagctgggattacaggcacctgccaccacgcctggctagtttttgtatttttngtagagacgatgtttcaccatgttgaccaggctggtctcgaactcttgacctcaggtgatccgctcgcttcggcctcccaaagtgctgggattataggcgtgagccactgtgcccagcctcacagctgcatcttaaccttacctttgcctctgcctctcaagctggtacctcctaatttacatcctaagagtggaaccatgtgacaaggactggagtgccattggctgtggactgttcaggcagggaagtacaagaccactcttgtattcaggggcaaccaaaggagagaattacgtacttgttgagtacaaactgcaccaagccctggagacccattaccaccgttaaccctcaatacagctctgctagtaagggattcgtctccccaaatgaaaaaaaaaagtaatctcagaatgttggccgagcatggtggctcacacctgtagtcccagttatgcaggaggctgaggcaggagaatcgcttgatctcaggaggcggaggttgcagtgagtcgacatcacaccactgcactccagcctgggggacagagtgagacttcgtctcggaaaaaaaaaaaaaaagttgacaggatggccagacccaagtgggcgtattaagtggtggtgctaggattggaacccaagcgtgattaaaaccctatgcaggccctttcctctatattgtactgcctccttaacaaaggaagattgattaagcccctactttgtgccagtctctgttatcaagtccgttaaatgcatttaacgttaaattttttcttttttggtttaaaaaactctagtttcttaaactactagtttttagtgtcttgctaaaactatgtgctcttgaataggctacaacttatttcacactatctcattgaactctcctggtatgtgatagtgttataatgaaaaattgcataccaggacagctaagtctattttgcaaccatacagcgtttcataatttagcatttaaaatacagacagtccccgacttttggtggtttgatgtgggatttttggtggaaaagcagtatacattcagaatgcacctctacttatgatggggctacttcctggtaaacccattgtaatgtgcaaattacgggtttatcaggaggtgaccccatcggtaatggagaagtgctgggaggtaaatattagaaatggaagtatctaaatgagtaagaaacagcatgggagcataatttggccaaaatcaaacagaactaaagtagtcatgtcggtaagaatttgggactgcaggccagttacgatagctctcacctgtaatcccagcattttgggaggccgaggcaggcggatcacttgaggtcaggagttcaagaccagcctaaacaatatggcgaaacctcatctctaccaaaaaaatacaaagattagctgggcatggtgtctcatgcctgtagtcccagctacctatggggctgaggcaggaggatctcttgagcccaggaggtcgatgctgcattgagccgagattgtgccactgcactccagcgtgggcaacagagtgagactgtctcagggggaaaaaaaaagaggaaaacaaaaaagacgttgggagtgcagtttctctacctacagcatatctcaaaggttttttttaaaaaagtattttcttaactttttaccttcatttttcaaaacaattagggtacaatttacatatagtaaagttcactctttatagttttagttatgtgagtttgtacaaacatatacaggagtgaaccactaccacaatcgaaatatagttgcatcacccccctaaaactctccaggcccttttgtagtcaactcctacccccgaccctcagattctgctaaccactgatttgttttctgcccctatagttttgctttagtatgactgtcatatcaatagaatcatacaatgagtaggcttattttatgccttcaggttttaaaaattataaacatttacattacagtaaaattcactctggtatacagttctataaagctctgataaatgtgtagagttgtgtaaccaccaatgcaaccaaggtacagaacagtcctcttagcctctccctaccaaatttattcctgctactttgtagtcaaaaccagtcccctacacccaaaccctggcag

SEQ ID NO: 456673 - DNA, 5651 bp, Homo sapiens
  misc_feature (3445)..(3445): n is a, c, g, or t
  misc_feature (3499)..(3499): n is a, c, g, or t
aggtactctagagcgtccccgaagtcttgctccccatcaggtcgtagaagctgcactgagcctgacaagagttggtactcaaaaatgcagaatgaattagtttgaatgaggtgattaaggattaatgagtagtggttaaggaaacaaagaccattagtggatggggtaatattgctgtattactgatgggacgaagatgcgcccatcagcctgcaaagcaaaatgggaagaaagcaacctccaaagtgccctctgcacctcattttgttcaccccaatgatcatgccaatcgagaggctgaattaaagaagaagtgggttgaggagatgagggagaagcagcaagccgcccgggagcaagaaagacaaaaacgcaggaccattgagagctactgtcaggatgtcctaagacgccaggaggagtttgagcataaggaggaagttttgcaggaattaaatatgtttcctcagctggatgacgaggccacgaggaaggcttattacaaggagttccgtaaggtggtggaatactctgatgtgattctggaagtcctggatgccagagacccattaggctgccgctgcttccaaatggaggaggctgtcctgcgagcacaaggcaacaagaagctggtcctggtcttgaacaagattgacctggtccccaaggaggttgtggagaaatggctggattaccttcggaatgagttgccaaccgtggctttcaaggccagtacccagcatcaggtcaaaaacctgaatcgttgcagtgtgccagtagatcaggcctctgagtcactgctgaaaagcaaagcctgctttggagctgaaaacctcatgagggttctggggaactattgccgccttggtgaagtgcgcacccacattcgtgtgggtgttgtgggtcttcccaatgttgggaagagcagcctgatcaatagcctgaagcgcagccgcgcatgcagcgtgggagctgttcctggaattaccaaattcatgcaggaggtctacctggacaagttcatccggctcttggatgctccaggcattgtcccagggcccaactcagaggtgggcaccatcctgcgtaactgcgtccacgtgcagaagctggcagaccctgtgaccccagtggagaccatcctgcagcgctgcaacctggaggagatttccaactattatggcgtctctgggttccagaccactgagcactttctgacggcagtggcccaccgtttggggaagaagaagaagggaggcttatatagtcaggaacaggcggccaaagctgtcctagctgactgggtgagcgggaagatcagcttctatataccaccaccagccactcacactctgcccacccatctcagtgctgagatcgttaaggaaatgaccgaggtctttgacatcgaggatactgagcaggccaatgaagacaccatggaatgcttggccaccggagaatctgatgagctgttgggtgacacggacccacttgaaatggagatcaagttgctccattctccgatgacgaaaatagcagatgccattgaaaataaaaccaccgtgtataagattggagatctcactgggtattgcaccaatccgaaccgtcatcagatggggtgggctaaacgcaatgtggaccaccgccctaagagcaacagtatggtggatgtctgctcagtggaccgccgctcagtgctgcagaggatcatggagacggaccccctgcaacagggccaggctctggcatctgccctgaaaaataagaagaagatgcagaaacgtgcagataaaatcgccagcaagctgtctgattccatgatgtctgctctcgacctctctggcaatgctgatgatggtgttggtgactaatcgactgatctcacttcccttccgctccaagcaccagttccggtggtacgggggaataccagtgaaatagtttggttctccctgaagcatctgcatattgaaagaacgctttccccactgtgtgtcttctccccctcctccagtaaaaacagtcccggctgggtgctgtggctcacgtctgtaatcccagcactttgggaggccgaggtgggcggatcacctgaggtcgggagttcgagaccagcctggccaacatggtgaagccccgtctctactaaaaatacaaaaaaatttagccgtgcttggtggcacctgtaatcccagctacttgggaggctgaggcaggagaatcgcctgaacctgggagactaaggcaggagaatcgcctggacctgggaggcagaggttgcagtgagcccagacggcaccattgcactctagcctgggcaacaacacgaaactccgtccccaaaaaaaaaaaaaaaaaaatcccaaggggctgcagctgccaaacccaataccctctatttaacccctactctgttttacaagagaaataaaagaagtatcagcagagctcaggtgctaacacctgttgagggctgacctacaaaactctgcctacaaaactctcttagacaggtgaatatgccactagaagttaggttgctggtagacctgggggtccctgcgggagggtgatggtttctttaccaccccacaggagatttcagtggcaaggcatgcctgcagtgggctttgggccatgcatcttccaagtccataggtcttcacctgggtggcagtgagaaaaagtagaaagtaatgagcctcctgtgtctctggaaggttctagggatagggtagagggaagaagagaacaaacaagcctggcttgtgctgaagtgtggtaggcactaccctgtttgcgtgaagagaaaacaaagcacctgttagtagggaggctttagggggaagccccgtcttgggggcatttctgggcagattgtgaattggaggaatctctttaactgaagtactctggctggaccctgcccttgtgtgaccatgtctcctattgcaccagcatttgaattccatggctcaagagggttctggtaccatttattcacagactgtatcctcgagagagctgctatatatgggagtgtaccagccaactccttttccagtgtctgtaagtcacctcattaaagtataattagctgtctcctctgggagatcctaccccatcagacaagggcagtgagcccaagcagtgccagaggccctcagaaagggattagggtagatgattgcaactgaaacacaatcttctttctttgccagggtattttgggggttttgccccaaaatataccctgggcatagcattactgcagtcttggatgtctaccccaaacttccacaccatccttcgacccacagctgcacctttatttatttattttgctctgttgcccaggctggagtgcaatggcgtgatctcggctcactgcaacctctgcctcccgggttcaggtgatcctcctgccttagcctcccangtagctgggattacaggcacctgccaccacgcctggctagtttttgtatttttngtagagacgatgtttcaccatgttgaccaggctggtctcgaactcttgacctcaggtgatccgctcgcttcggcctcccaaagtgctgggattataggcgtgagccactgtgcccagcctcacagctgcatcttaaccttacctttgcctctgcctctcaagctggtacctcctaatttacatcctaagagtggaaccatgtgacaaggactggagtgccattggctgtggactgttcaggcagggaagtacaagaccactcttgtattcaggggcaaccaaaggagagaattacgtacttgttgagtacaaactgcaccaagccctggagacccattaccaccgttaaccctcaatacagctctgctagtaagggattcgtctccccaaatgaaaaaaaaaagtaatctcagaatgttggccgagcatggtggctcacacctgtagtcccagttatgcaggaggctgaggcaggagaatcgcttgatctcaggaggcggaggttgcagtgagtcgacatcacaccactgcactccagcctgggggacagagtgagacttcgtctcggaaaaaaaaaaaaaaagttgacaggatggccagacccaagtgggcgtattaagtggtggtgctaggattggaacccaagcgtgattaaaaccctatgcaggccctttcctctatattgtactgcctccttaacaaaggaagattgattaagcccctactttgtgccagtctctgttatcaagtccgttaaatgcatttaacgttaaattttttcttttttggtttaaaaaactctagtttcttaaactactagtttttagtgtcttgctaaaactatgtgctcttgaataggctacaacttatttcacactatctcattgaactctcctggtatgtgatagtgttataatgaaaaattgcataccaggacagctaagtctattttgcaaccatacagcgtttcataatttagcatttaaaatacagacagtccccgacttttggtggtttgatgtgggatttttggtggaaaagcagtatacattcagaatgcacctctacttatgatggggctacttcctggtaaacccattgtaatgtgcaaattacgggtttatcaggaggtgaccccatcggtaatggagaagtgctgggaggtaaatattagaaatggaagtatctaaatgagtaagaaacagcatgggagcataatttggccaaaatcaaacagaactaaagtagtcatgtcggtaagaatttgggactgcaggccagttacgatagctctcacctgtaatcccagcattttgggaggccgaggcaggcggatcacttgaggtcaggagttcaagaccagcctaaacaatatggcgaaacctcatctctaccaaaaaaatacaaagattagctgggcatggtgtctcatgcctgtagtcccagctacctatggggctgaggcaggaggatctcttgagcccaggaggtcgatgctgcattgagccgagattgtgccactgcactccagcgtgggcaacagagtgagactgtctcagggggaaaaaaaaagaggaaaacaaaaaagacgttgggagtgcagtttctctacctacagcatatctcaaaggttttttttaaaaaagtattttcttaactttttaccttcatttttcaaaacaattagggtacaatttacatatagtaaagttcactctttatagttttagttatgtgagtttgtacaaacatatacaggagtgaaccactaccacaatcgaaatatagttgcatcacccccctaaaactctccaggcccttttgtagtcaactcctacccccgaccctcagattctgctaaccactgatttgttttctgcccctatagttttgctttagtatgactgtcatatcaatagaatcatacaatgagtaggcttattttatgccttcaggttttaaaaattataaacatttacattacagtaaaattcactctggtatacagttctataaagctctgataaatgtgtagagttgtgtaaccaccaatgcaaccaaggtacagaacagtcctcttagcctctccctaccaaatttattcctgctactttgtagtcaaaaccagtcccctacacccaaaccctggcag

SEQ ID NO: 456674 - DNA, 5177 bp, Homo sapiens
  misc_feature (2971)..(2971): n is a, c, g, or t
  misc_feature (3025)..(3025): n is a, c, g, or t
cctatccttttcctgccctcatctcctggtcctctgccctgcaggtggtggaatactctgatgtgattctggaagtcctggatgccagagacccattaggctgccgctgcttccaaatggaggaggctgtcctgcgagcacaaggcaacaagaagctggtcctggtcttgaacaagattgacctggtccccaaggaggttgtggagaaatggctggattaccttcggaatgagttgccaaccgtggctttcaaggccagtacccagcatcaggtcaaaaacctgaatcgttgcagtgtgccagtagatcaggcctctgagtcactgctgaaaagcaaagcctgctttggagctgaaaacctcatgagggttctggggaactattgccgccttggtgaagtgcgcacccacattcgtgtgggtgttgtgggtcttcccaatgttgggaagagcagcctgatcaatagcctgaagcgcagccgcgcatgcagcgtgggagctgttcctggaattaccaaattcatgcaggaggtctacctggacaagttcatccggctcttggatgctccaggcattgtcccagggcccaactcagaggtgggcaccatcctgcgtaactgcgtccacgtgcagaagctggcagaccctgtgaccccagtggagaccatcctgcagcgctgcaacctggaggagatttccaactattatggcgtctctgggttccagaccactgagcactttctgacggcagtggcccaccgtttggggaagaagaagaagggaggcttatatagtcaggaacaggcggccaaagctgtcctagctgactgggtgagcgggaagatcagcttctatataccaccaccagccactcacactctgcccacccatctcagtgctgagatcgttaaggaaatgaccgaggtctttgacatcgaggatactgagcaggccaatgaagacaccatggaatgcttggccaccggagaatctgatgagctgttgggtgacacggacccacttgaaatggagatcaagttgctccattctccgatgacgaaaatagcagatgccattgaaaataaaaccaccgtgtataagattggagatctcactgggtattgcaccaatccgaaccgtcatcagatggggtgggctaaacgcaatgtggaccaccgccctaagagcaacagtatggtggatgtctgctcagtggaccgccgctcagtgctgcagaggatcatggagacggaccccctgcaacagggccaggctctggcatctgccctgaaaaataagaagaagatgcagaaacgtgcagataaaatcgccagcaagctgtctgattccatgatgtctgctctcgacctctctggcaatgctgatgatggtgttggtgactaatcgactgatctcacttcccttccgctccaagcaccagttccggtggtacgggggaataccagtgaaatagtttggttctccctgaagcatctgcatattgaaagaacgctttccccactgtgtgtcttctccccctcctccagtaaaaacagtcccggctgggtgctgtggctcacgtctgtaatcccagcactttgggaggccgaggtgggcggatcacctgaggtcgggagttcgagaccagcctggccaacatggtgaagccccgtctctactaaaaatacaaaaaaatttagccgtgcttggtggcacctgtaatcccagctacttgggaggctgaggcaggagaatcgcctgaacctgggagactaaggcaggagaatcgcctggacctgggaggcagaggttgcagtgagcccagacggcaccattgcactctagcctgggcaacaacacgaaactccgtccccaaaaaaaaaaaaaaaaaaatcccaaggggctgcagctgccaaacccaataccctctatttaacccctactctgttttacaagagaaataaaagaagtatcagcagagctcaggtgctaacacctgttgagggctgacctacaaaactctgcctacaaaactctcttagacaggtgaatatgccactagaagttaggttgctggtagacctgggggtccctgcgggagggtgatggtttctttaccaccccacaggagatttcagtggcaaggcatgcctgcagtgggctttgggccatgcatcttccaagtccataggtcttcacctgggtggcagtgagaaaaagtagaaagtaatgagcctcctgtgtctctggaaggttctagggatagggtagagggaagaagagaacaaacaagcctggcttgtgctgaagtgtggtaggcactaccctgtttgcgtgaagagaaaacaaagcacctgttagtagggaggctttagggggaagccccgtcttgggggcatttctgggcagattgtgaattggaggaatctctttaactgaagtactctggctggaccctgcccttgtgtgaccatgtctcctattgcaccagcatttgaattccatggctcaagagggttctggtaccatttattcacagactgtatcctcgagagagctgctatatatgggagtgtaccagccaactccttttccagtgtctgtaagtcacctcattaaagtataattagctgtctcctctgggagatcctaccccatcagacaagggcagtgagcccaagcagtgccagaggccctcagaaagggattagggtagatgattgcaactgaaacacaatcttctttctttgccagggtattttgggggttttgccccaaaatataccctgggcatagcattactgcagtcttggatgtctaccccaaacttccacaccatccttcgacccacagctgcacctttatttatttattttgctctgttgcccaggctggagtgcaatggcgtgatctcggctcactgcaacctctgcctcccgggttcaggtgatcctcctgccttagcctcccangtagctgggattacaggcacctgccaccacgcctggctagtttttgtatttttngtagagacgatgtttcaccatgttgaccaggctggtctcgaactcttgacctcaggtgatccgctcgcttcggcctcccaaagtgctgggattataggcgtgagccactgtgcccagcctcacagctgcatcttaaccttacctttgcctctgcctctcaagctggtacctcctaatttacatcctaagagtggaaccatgtgacaaggactggagtgccattggctgtggactgttcaggcagggaagtacaagaccactcttgtattcaggggcaaccaaaggagagaattacgtacttgttgagtacaaactgcaccaagccctggagacccattaccaccgttaaccctcaatacagctctgctagtaagggattcgtctccccaaatgaaaaaaaaaagtaatctcagaatgttggccgagcatggtggctcacacctgtagtcccagttatgcaggaggctgaggcaggagaatcgcttgatctcaggaggcggaggttgcagtgagtcgacatcacaccactgcactccagcctgggggacagagtgagacttcgtctcggaaaaaaaaaaaaaaagttgacaggatggccagacccaagtgggcgtattaagtggtggtgctaggattggaacccaagcgtgattaaaaccctatgcaggccctttcctctatattgtactgcctccttaacaaaggaagattgattaagcccctactttgtgccagtctctgttatcaagtccgttaaatgcatttaacgttaaattttttcttttttggtttaaaaaactctagtttcttaaactactagtttttagtgtcttgctaaaactatgtgctcttgaataggctacaacttatttcacactatctcattgaactctcctggtatgtgatagtgttataatgaaaaattgcataccaggacagctaagtctattttgcaaccatacagcgtttcataatttagcatttaaaatacagacagtccccgacttttggtggtttgatgtgggatttttggtggaaaagcagtatacattcagaatgcacctctacttatgatggggctacttcctggtaaacccattgtaatgtgcaaattacgggtttatcaggaggtgaccccatcggtaatggagaagtgctgggaggtaaatattagaaatggaagtatctaaatgagtaagaaacagcatgggagcataatttggccaaaatcaaacagaactaaagtagtcatgtcggtaagaatttgggactgcaggccagttacgatagctctcacctgtaatcccagcattttgggaggccgaggcaggcggatcacttgaggtcaggagttcaagaccagcctaaacaatatggcgaaacctcatctctaccaaaaaaatacaaagattagctgggcatggtgtctcatgcctgtagtcccagctacctatggggctgaggcaggaggatctcttgagcccaggaggtcgatgctgcattgagccgagattgtgccactgcactccagcgtgggcaacagagtgagactgtctcagggggaaaaaaaaagaggaaaacaaaaaagacgttgggagtgcagtttctctacctacagcatatctcaaaggttttttttaaaaaagtattttcttaactttttaccttcatttttcaaaacaattagggtacaatttacatatagtaaagttcactctttatagttttagttatgtgagtttgtacaaacatatacaggagtgaaccactaccacaatcgaaatatagttgcatcacccccctaaaactctccaggcccttttgtagtcaactcctacccccgaccctcagattctgctaaccactgatttgttttctgcccctatagttttgctttagtatgactgtcatatcaatagaatcatacaatgagtaggcttattttatgccttcaggttttaaaaattataaacatttacattacagtaaaattcactctggtatacagttctataaagctctgataaatgtgtagagttgtgtaaccaccaatgcaaccaaggtacagaacagtcctcttagcctctccctaccaaatttattcctgctactttgtagtcaaaaccagtcccctacacccaaaccctggcag

SEQ ID NO: 456675 - DNA, 2698 bp, Homo sapiens
ccccccgccccccccccccccccccaacataggcagtagaggccgggttaatcggcagagggtagtaagaaacttctctcctcttttctcacaatgtgcgctcacctagacggccgggcagttaggatcgtctattggatgtgaaaccagagatgcccgccaacctggaatagagaggaagagagcaagcagatttgaacctatctgctttcaagctggtcatcatgatgaaacttagacacaaaaataaaaagccaggtgaaggttccaagggccacaagaagataagttggccctaccctcagcctgcaaagcaaaatgggaagaaagcaacctccaaagtgccctctgcacctcattttgttcaccccaatgatcatgccaatcgagaggctgaattaaagaagaagtgggttgaggagatgagggagaagcagcaagccgcccgggagcaagaaagacaaaaacgcaggaccattgagagctactgtcaggatgtcctaagacgccaggaggagtttgagcataaggaggaagttttgcaggaattaaatatgtttcctcagctggatgacgaggccacgaggaaggcttattacaaggagttccgtaaggtggtggaatactctgatgtgattctggaagtcctggatgccagagacccattaggctgccgctgcttccaaatggaggaggctgtcctgcgagcacaaggcaacaagaagctggtcctggtcttgaacaagattgacctggtccccaaggaggttgtggagaaatggctggattaccttcggaatgagttgccaaccgtggctttcaaggccagtacccagcatcaggtcaaaaacctgaatcgttgcagtgtgccagtagatcaggcctctgagtcactgctgaaaagcaaagcctgctttggagctgaaaacctcatgagggttctggggaactattgccgccttggtgaagtgcgcacccacattcgtgtgggtgttgtgggtcttcccaatgttgggaagagcagcctgatcaatagcctgaagcgcagccgcgcatgcagcgtgggagctgttcctggaattaccaaattcatgcaggaggtctacctggacaagttcatccggctcttggatgctccaggcattgtcccagggcccaactcagaggtgggcaccatcctgcgtaactgcgtccacgtgcagaagctggcagaccctgtgaccccagtggagaccatcctgcagcgctgcaacctggaggagatttccaactattatggcgtctctgggttccagaccactgagcactttctgacggcagtggcccaccgtttggggaagaagaagaagggaggcttatatagtcaggaacaggcggccaaagctgtcctagctgactgggtgagcgggaagatcagcttctatataccaccaccagccactcacactctgcccacccatctcagtgctgagatcgttaaggaaatgaccgaggtctttgacatcgaggatactgagcaggccaatgaagacaccatggaatgcttggccaccggagaatctgatgagctgttgggtgacacggacccacttgaaatggagatcaagttgctccattctccgatgacgaaaatagcagatgccattgaaaataaaaccaccgtgtataagattggagatctcactgggtattgcaccaatccgaaccgtcatcagatggggtgggctaaacgcaatgtggaccaccgccctaagagcaacagtatggtggatgtctgctcagtggaccgccgctcagtgctgcagaggatcatggagacggaccccctgcaacagggccaggctctggcatctgccctgaaaaataagaagaagatgcagaaacgtgcagataaaatcgccagcaagctgtctgattccatgatgtctgctctcgacctctctggcaatgctgatgatggtgttggtgactaatcgactgatctcacttcccttccgctccaagcaccagttccggtggtacgggggaataccagtgaaatagtttggttctccctgaagcatctgcatattgaaagaacgctttccccactgtgtgtcttctccccctcctccagtaaaaacagtcccggctgctgggattataggcatgaaccaccgtgtccggccatatattttcgtcttttgaagactgttatatacatgaaattatatggtatgtagcattttgagagcgacttcttttgctatgagtaatacatttgagattcatccatatttctcagtatattaatagttcttatttctgagtcactccattgtgtggatttactactgtttgttccccagttgaaggatgtttaggatctttgcagttttggacaattacaagtaaagctgctataaacatttgtatgcaaattttgtgttttcatttatctatagtaaatacctagagttggattgctgggatatatggtaagcatatgtttgacattttaagaaacttctaaactgtttttcaaagtggctctaccatttcacattcccatcagtatgaaagtttcatttccacatcctctctagtacttgggggtgtcagtttagttttttaatttttaaattttttaatttttttaatacatttaaatagagatggggtctcactgtgttgaccaggatggtcttgaactgctggc

SEQ ID NO: 456676 - DNA, 2560 bp, Homo sapiens
  misc_feature (354)..(354): n is a, c, g, or t
  misc_feature (408)..(408): n is a, c, g, or t
gatgattgcaactgagggcctctggcactgcttgggctcactgcccttgtctgatggggtaggatctgccagaggccctcagaaagggattagggtagatgattgcaactgaaacacaatcttctttctttgccagggtattttgggggttttgccccaaaatataccctgggcatagcattactgcagtcttggatgtctaccccaaacttccacaccatccttcgacccacagctgcacctttatttatttattttgctctgttgcccaggctggagtgcaatggcgtgatctcggctcactgcaacctctgcctcccgggttcaggtgatcctcctgccttagcctcccangtagctgggattacaggcacctgccaccacgcctggctagtttttgtatttttngtagagacgatgtttcaccatgttgaccaggctggtctcgaactcttgacctcaggtgatccgctcgcttcggcctcccaaagtgctgggattataggcgtgagccactgtgcccagcctcacagctgcatcttaaccttacctttgcctctgcctctcaagctggtacctcctaatttacatcctaagagtggaaccatgtgacaaggactggagtgccattggctgtggactgttcaggcagggaagtacaagaccactcttgtattcaggggcaaccaaaggagagaattacgtacttgttgagtacaaactgcaccaagccctggagacccattaccaccgttaaccctcaatacagctctgctagtaagggattcgtctccccaaatgaaaaaaaaaagtaatctcagaatgttggccgagcatggtggctcacacctgtagtcccagttatgcaggaggctgaggcaggagaatcgcttgatctcaggaggcggaggttgcagtgagtcgacatcacaccactgcactccagcctgggggacagagtgagacttcgtctcggaaaaaaaaaaaaaaagttgacaggatggccagacccaagtgggcgtattaagtggtggtgctaggattggaacccaagcgtgattaaaaccctatgcaggccctttcctctatattgtactgcctccttaacaaaggaagattgattaagcccctactttgtgccagtctctgttatcaagtccgttaaatgcatttaacgttaaattttttcttttttggtttaaaaaactctagtttcttaaactactagtttttagtgtcttgctaaaactatgtgctcttgaataggctacaacttatttcacactatctcattgaactctcctggtatgtgatagtgttataatgaaaaattgcataccaggacagctaagtctattttgcaaccatacagcgtttcataatttagcatttaaaatacagacagtccccgacttttggtggtttgatgtgggatttttggtggaaaagcagtatacattcagaatgcacctctacttatgatggggctacttcctggtaaacccattgtaatgtgcaaattacgggtttatcaggaggtgaccccatcggtaatggagaagtgctgggaggtaaatattagaaatggaagtatctaaatgagtaagaaacagcatgggagcataatttggccaaaatcaaacagaactaaagtagtcatgtcggtaagaatttgggactgcaggccagttacgatagctctcacctgtaatcccagcattttgggaggccgaggcaggcggatcacttgaggtcaggagttcaagaccagcctaaacaatatggcgaaacctcatctctaccaaaaaaatacaaagattagctgggcatggtgtctcatgcctgtagtcccagctacctatggggctgaggcaggaggatctcttgagcccaggaggtcgatgctgcattgagccgagattgtgccactgcactccagcgtgggcaacagagtgagactgtctcagggggaaaaaaaaagaggaaaacaaaaaagacgttgggagtgcagtttctctacctacagcatatctcaaaggttttttttaaaaaagtattttcttaactttttaccttcatttttcaaaacaattagggtacaatttacatatagtaaagttcactctttatagttttagttatgtgagtttgtacaaacatatacaggagtgaaccactaccacaatcgaaatatagttgcatcacccccctaaaactctccaggcccttttgtagtcaactcctacccccgaccctcagattctgctaaccactgatttgttttctgcccctatagttttgctttagtatgactgtcatatcaatagaatcatacaatgagtaggcttattttatgccttcaggttttaaaaattataaacatttacattacagtaaaattcactctggtatacagttctataaagctctgataaatgtgtagagttgtgtaaccaccaatgcaaccaaggtacagaacagtcctcttagcctctccctaccaaatttattcctgctactttgtagtcaaaaccagtcccctacacccaaaccctggcag

SEQ ID NO: 456677 - DNA, 2416 bp, Homo sapiens
ccccccgccccccccccccccccccaacataggcagtagaggccgggttaatcggcagagggtagtaagaaacttctctcctcttttctcacaatgtgcgctcacctagacggccgggcagttaggatcgtctattggatgtgaaaccagagatgcccgccaacctggaatagagaggaagagagcaagcagatttgaacctatctgctttcaagctggtcatcatgatgaaacttagacacaaaaataaaaagccaggtgaaggttccaagggccacaagaagataagttggccctaccctcagcctgcaaagcaaaatgggaagaaagcaacctccaaaccaaagtgctgggattataggcgtgagccactgtgcccagcctcacagctgcatcttaaccttacctttgcctctgcctctcaagctggtacctcctaatttacatcctaagagtggaaccatgtgacaaggactggagtgccattggctgtggactgttcaggcagggaagtacaagaccactcttgtattcaggggcaaccaaaggagagaattacgtacttgttgagtacaaactgcaccaagccctggagacccattaccaccgttaaccctcaatacagctctgctagtaagggattcgtctccccaaatgaaaaaaaaaagtaatctcagaatgttggccgagcatggtggctcacacctgtagtcccagttatgcaggaggctgaggcaggagaatcgcttgatctcaggaggcggaggttgcagtgagtcgacatcacaccactgcactccagcctgggggacagagtgagacttcgtctcggaaaaaaaaaaaaaaagttgacaggatggccagacccaagtgggcgtattaagtggtggtgctaggattggaacccaagcgtgattaaaaccctatgcaggccctttcctctatattgtactgcctccttaacaaaggaagattgattaagcccctactttgtgccagtctctgttatcaagtccgttaaatgcatttaacgttaaattttttcttttttggtttaaaaaactctagtttcttaaactactagtttttagtgtcttgctaaaactatgtgctcttgaataggctacaacttatttcacactatctcattgaactctcctggtatgtgatagtgttataatgaaaaattgcataccaggacagctaagtctattttgcaaccatacagcgtttcataatttagcatttaaaatacagacagtccccgacttttggtggtttgatgtgggatttttggtggaaaagcagtatacattcagaatgcacctctacttatgatggggctacttcctggtaaacccattgtaatgtgcaaattacgggtttatcaggaggtgaccccatcggtaatggagaagtgctgggaggtaaatattagaaatggaagtatctaaatgagtaagaaacagcatgggagcataatttggccaaaatcaaacagaactaaagtagtcatgtcggtaagaatttgggactgcaggccagttacgatagctctcacctgtaatcccagcattttgggaggccgaggcaggcggatcacttgaggtcaggagttcaagaccagcctaaacaatatggcgaaacctcatctctaccaaaaaaatacaaagattagctgggcatggtgtctcatgcctgtagtcccagctacctatggggctgaggcaggaggatctcttgagcccaggaggtcgatgctgcattgagccgagattgtgccactgcactccagcgtgggcaacagagtgagactgtctcagggggaaaaaaaaagaggaaaacaaaaaagacgttgggagtgcagtttctctacctacagcatatctcaaaggttttttttaaaaaagtattttcttaactttttaccttcatttttcaaaacaattagggtacaatttacatatagtaaagttcactctttatagttttagttatgtgagtttgtacaaacatatacaggagtgaaccactaccacaatcgaaatatagttgcatcacccccctaaaactctccaggcccttttgtagtcaactcctacccccgaccctcagattctgctaaccactgatttgttttctgcccctatagttttgctttagtatgactgtcatatcaatagaatcatacaatgagtaggcttattttatgccttcaggttttaaaaattataaacatttacattacagtaaaattcactctggtatacagttctataaagctctgataaatgtgtagagttgtgtaaccaccaatgcaaccaaggtacagaacagtcctcttagcctctccctaccaaatttattcctgctactttgtagtcaaaaccagtcccctacacccaaaccctggcag

SEQ ID NO: 456678 - DNA, 2178 bp, Homo sapiens
aacagagcgagactccgtctcaaaaaaaagaagacacgcatgtgcccacatacactttgaccctcgaactcttgacctcaggtgatccgctcgcttcggcctcccaaagtgctgggattataggcgtgagccactgtgcccagcctcacagctgcatcttaaccttacctttgcctctgcctctcaagctggtacctcctaatttacatcctaagagtggaaccatgtgacaaggactggagtgccattggctgtggactgttcaggcagggaagtacaagaccactcttgtattcaggggcaaccaaaggagagaattacgtacttgttgagtacaaactgcaccaagccctggagacccattaccaccgttaaccctcaatacagctctgctagtaagggattcgtctccccaaatgaaaaaaaaaagtaatctcagaatgttggccgagcatggtggctcacacctgtagtcccagttatgcaggaggctgaggcaggagaatcgcttgatctcaggaggcggaggttgcagtgagtcgacatcacaccactgcactccagcctgggggacagagtgagacttcgtctcggaaaaaaaaaaaaaaagttgacaggatggccagacccaagtgggcgtattaagtggtggtgctaggattggaacccaagcgtgattaaaaccctatgcaggccctttcctctatattgtactgcctccttaacaaaggaagattgattaagcccctactttgtgccagtctctgttatcaagtccgttaaatgcatttaacgttaaattttttcttttttggtttaaaaaactctagtttcttaaactactagtttttagtgtcttgctaaaactatgtgctcttgaataggctacaacttatttcacactatctcattgaactctcctggtatgtgatagtgttataatgaaaaattgcataccaggacagctaagtctattttgcaaccatacagcgtttcataatttagcatttaaaatacagacagtccccgacttttggtggtttgatgtgggatttttggtggaaaagcagtatacattcagaatgcacctctacttatgatggggctacttcctggtaaacccattgtaatgtgcaaattacgggtttatcaggaggtgaccccatcggtaatggagaagtgctgggaggtaaatattagaaatggaagtatctaaatgagtaagaaacagcatgggagcataatttggccaaaatcaaacagaactaaagtagtcatgtcggtaagaatttgggactgcaggccagttacgatagctctcacctgtaatcccagcattttgggaggccgaggcaggcggatcacttgaggtcaggagttcaagaccagcctaaacaatatggcgaaacctcatctctaccaaaaaaatacaaagattagctgggcatggtgtctcatgcctgtagtcccagctacctatggggctgaggcaggaggatctcttgagcccaggaggtcgatgctgcattgagccgagattgtgccactgcactccagcgtgggcaacagagtgagactgtctcagggggaaaaaaaaagaggaaaacaaaaaagacgttgggagtgcagtttctctacctacagcatatctcaaaggttttttttaaaaaagtattttcttaactttttaccttcatttttcaaaacaattagggtacaatttacatatagtaaagttcactctttatagttttagttatgtgagtttgtacaaacatatacaggagtgaaccactaccacaatcgaaatatagttgcatcacccccctaaaactctccaggcccttttgtagtcaactcctacccccgaccctcagattctgctaaccactgatttgttttctgcccctatagttttgctttagtatgactgtcatatcaatagaatcatacaatgagtaggcttattttatgccttcaggttttaaaaattataaacatttacattacagtaaaattcactctggtatacagttctataaagctctgataaatgtgtagagttgtgtaaccaccaatgcaaccaaggtacagaacagtcctcttagcctctccctaccaaatttattcctgctactttgtagtcaaaaccagtcccctacacccaaaccctggcag

SEQ ID NO: 456679 - DNA, 816 bp, Homo sapiens
tttgaaacagagtctcactctttcactgaggctggagtgcagtggcgtgatcttggctcactgcaacctccacctcctgggttcaagcgattctcctgccttagcctcccgagtaacagggactacaggtgcccaccaccatgctgggctaatttttgtatttttggtagaggcgggggtttctccacactggccaggctggtcttgaacttctgacctcaagggatccacccgcctcggcctcccaaagtgctgggattataggcatgaaccaccgtgtccggccatatattttcgtcttttgaagactgttatatacatgaaattatatggtatgtagcattttgagagcgacttcttttgctatgagtaatacatttgagattcatccatatttctcagtatattaatagttcttatttctgagtcactccattgtgtggatttactactgtttgttccccagttgaaggatgtttaggatctttgcagttttggacaattacaagtaaagctgctataaacatttgtatgcaaattttgtgttttcatttatctatagtaaatacctagagttggattgctgggatatatggtaagcatatgtttgacattttaagaaacttctaaactgtttttcaaagtggctctaccatttcacattcccatcagtatgaaagtttcatttccacatcctctctagtacttgggggtgtcagtttagttttttaatttttaaattttttaatttttttaatacatttaaatagagatggggtctcactgtgttgaccaggatggtcttgaactgctggc

SEQ ID NO: 456680 - DNA, 975 bp, Homo sapiens
cttcttctcccattctgacaggaagagagcaagcagatttgaacctatctgctttcaagctggtcatcatgatgaaacttagacacaaaaataaaaagccaggtgaaggttccaagggccacaagaagataagttggccctaccctcagcctgcaaagcaaaatgggaagaaagcaacctccaaagtgccctctgcacctcattttgttcaccccaatgatcatgccaatcgagaggctgaattaaagaagaagtgggttgaggagatgagggagaagcagcaagccgcccgggagcaagaaagacaaaaacgcaggaccattgagagctactgtcaggatgtcctaagacgccaggaggagtttgagcataaggaggaagttttgcaggaattaaatatgtttcctcaggctgggattataggcatgaaccaccgtgtccggccatatattttcgtcttttgaagactgttatatacatgaaattatatggtatgtagcattttgagagcgacttcttttgctatgagtaatacatttgagattcatccatatttctcagtatattaatagttcttatttctgagtcactccattgtgtggatttactactgtttgttccccagttgaaggatgtttaggatctttgcagttttggacaattacaagtaaagctgctataaacatttgtatgcaaattttgtgttttcatttatctatagtaaatacctagagttggattgctgggatatatggtaagcatatgtttgacattttaagaaacttctaaactgtttttcaaagtggctctaccatttcacattcccatcagtatgaaagtttcatttccacatcctctctagtacttgggggtgtcagtttagttttttaatttttaaattttttaatttttttaatacatttaaatagagatggggtctcactgtgttgaccaggatggtcttgaactgctggc

SEQ ID NO: 456681 - DNA, 725 bp, Homo sapiens
ccccccgccccccccccccccccccaacataggcagtagaggccgggttaatcggcagagggtagtaagaaacttctctcctcttttctcacaatgtgcgctcacctagacggccgggcagttaggatcgtctattggatgtgaaaccagagatgcccgccaacctggaatagagaggtaaacagcaggatcccttccagggtagaagggaccggaagaggggcagggatcgcggcacacgtggagacgcgccgaattgccttttcgcggagtggagtttgccgggagaggggcattgccccatcccacctagaaaggtgtagacccgggacacactgtgtagagaggcacaaacttcacttgtgtggtgaagcgttgatcgtcctcaagatagtgaggcttcattctgcattcaccttgtatagacaggagtcgacccaccaaaggcatgggggacatccaccccaaccgtgtagagacatctccctccacccagctgagcagcgcagacttctcccgacttaaggcacttccttggcttggctctagacagccgtctcgaggcacctcctcaggacagacagaggctttgatgtatctgcccccataccagcatagaggagcttagaaacatttaatatacagagggagggcacctcctccccatacgcgtagactcagagccctcagtatcgctccccaactcacccgtctaggaaagtggt

SEQ ID NO: 456682 - DNA, 531 bp, Homo sapiens
tgcagtagaggccagctccaggcaaggggccagagagaggaggagaaagtctggtcctggggagggaatcccagtgcctgccatttacagagcagcatcttgggccagagcattacagacatctgccatgtctcacagcagcccagtgtgaagagggcttgtggaattcccattttccacatgaggaagctgaagctctgagtccagctcccagcaagtgaatgtcctactgcaaaacccatgcttttaattcttggtgatgtggcctctcagcaggagtgaaaaagttcctgcacctgactcccctgggaagcatccatgtatccttttcactgaggcctgaccagggggctggcaacagaggggagccagggccctgacagtggtgttggttgtgttaaaggcttggccaccggagaatctgatgagctgttgggtgacacggacccacttgaaatggagatcaagttgctccattctccgatgacgaaaatagcagatgccattgaaaataaaaccaccgtgtataag

SEQ ID NO: 456683 - DNA, 5560 bp, Homo sapiens
  misc_feature (3456)..(3456): n is a, c, g, or t
  misc_feature (3510)..(3510): n is a, c, g, or t
  misc_feature (5360)..(5360): n is a, c, g, or t
  misc_feature (5452)..(5452): n is a, c, g, or t
gatccggaagtcggagcctagctgcgcgagagtttctgctcgctcaaccgagttgtcgtgttgccctcgcttctcagatccccgccggaagtgaagagagcaagcagatttgaacctatctgctttcaagctggtcatcatgatgaaacttagacacaaaaataaaaagccaggtgaaggttccaagggccacaagaagataagttggccctaccctcagcctgcaaagcaaaatgggaagaaagcaacctccaaagtgccctctgcacctcattttgttcaccccaatgatcatgccaatcgagaggctgaattaaagaagaagtgggttgaggagatgagggagaagcagcaagccgcccgggagcaagaaagacaaaaacgcaggaccattgagagctactgtcaggatgtcctaagacgccaggaggagtttgagcataaggaggaagttttgcaggaattaaatatgtttcctcagctggatgacgaggccacgaggaaggcttattacaaggagttccgtaaggtggtggaatactctgatgtgattctggaagtcctggatgccagagacccattaggctgccgctgcttccaaatggaggaggctgtcctgcgagcacaaggcaacaagaagctggtcctggtcttgaacaagattgacctggtccccaaggaggttgtggagaaatggctggattaccttcggaatgagttgccaaccgtggctttcaaggccagtacccagcatcaggtcaaaaacctgaatcgttgcagtgtgccagtagatcaggcctctgagtcactgctgaaaagcaaagcctgctttggagctgaaaacctcatgagggttctggggaactattgccgccttggtgaagtgcgcacccacattcgtgtgggtgttgtgggtcttcccaatgttgggaagagcagcctgatcaatagcctgaagcgcagccgcgcatgcagcgtgggagctgttcctggaattaccaaattcatgcaggaggtctacctggacaagttcatccggctcttggatgctccaggcattgtcccagggcccaactcagaggtgggcaccatcctgcgtaactgcgtccacgtgcagaagctggcagaccctgtgaccccagtggagaccatcctgcagcgctgcaacctggaggagatttccaactattatggcgtctctgggttccagaccactgagcactttctgacggcagtggcccaccgtttggggaagaagaagaagggaggcttatatagtcaggaacaggcggccaaagctgtcctagctgactgggtgagcgggaagatcagcttctatataccaccaccagccactcacactctgcccacccatctcagtgctgagatcgttaaggaaatgaccgaggtctttgacatcgaggatactgagcaggccaatgaagacaccatggaatgcttggccaccggagaatctgatgagctgttgggtgacacggacccacttgaaatggagatcaagttgctccattctccgatgacgaaaatagcagatgccattgaaaataaaaccaccgtgtataagattggagatctcactgggtattgcaccaatccgaaccgtcatcagatggggtgggctaaacgcaatgtggaccaccgccctaagagcaacagtatggtggatgtctgctcagtggaccgccgctcagtgctgcagaggatcatggagacggaccccctgcaacagggccaggctctggcatctgccctgaaaaataagaagaagatgcagaaacgtgcagataaaatcgccagcaagctgtctgattccatgatgtctgctctcgacctctctggcaatgctgatgatggtgttggtgactaatcgactgatctcacttcccttccgctccaagcaccagttccggtggtacgggggaataccagtgaaatagtttggttctccctgaagcatctgcatattgaaagaacgctttccccactgtgtgtcttctccccctcctccagtaaaaacagtcccggctgggtgctgtggctcacgtctgtaatcccagcactttgggaggccgaggtgggcggatcacctgaggtcgggagttcgagaccagcctggccaacatggtgaagccccgtctctactaaaaatacaaaaaaatttagccgtgcttggtggcacctgtaatcccagctacttgggaggctgaggcaggagaatcgcctgaacctgggagactaaggcaggagaatcgcctggacctgggaggcagaggttgcagtgagcccagacggcaccattgcactctagcctgggcaacaacacgaaactccgtccccaaaaaaaaaaaaaaaaaaatcccaaggggctgcagctgccaaacccaataccctctatttaacccctactctgttttacaagagaaataaaagaagtatcagcagagctcaggtgctaacacctgttgagggctgacctacaaaactctgcctacaaaactctcttagacaggtgaatatgccactagaagttaggttgctggtagacctgggggtccctgcgggagggtgatggtttctttaccaccccacaggagatttcagtggcaaggcatgcctgcagtgggctttgggccatgcatcttccaagtccataggtcttcacctgggtggcagtgagaaaaagtagaaagtaatgagcctcctgtgtctctggaaggttctagggatagggtagagggaagaagagaacaaacaagcctggcttgtgctgaagtgtggtaggcactaccctgtttgcgtgaagagaaaacaaagcacctgttagtagggaggctttagggggaagccccgtcttgggggcatttctgggcagattgtgaattggaggaatctctttaactgaagtactctggctggaccctgcccttgtgtgaccatgtctcctattgcaccagcatttgaattccatggctcaagagggttctggtaccatttattcacagactgtatcctcgagagagctgctatatatgggagtgtaccagccaactccttttccagtgtctgtaagtcacctcattaaagtataattagctgtctcctctgggagatcctaccccatcagacaagggcagtgagcccaagcagtgccagaggccctcagaaagggattagggtagatgattgcaactgaaacacaatcttctttctttgccagggtattttgggggttttgccccaaaatataccctgggcatagcattactgcagtcttggatgtctaccccaaacttccacaccatccttcgacccacagctgcacctttatttatttattttgctctgttgcccaggctggagtgcaatggcgtgatctcggctcactgcaacctctgcctcccgggttcaggtgatcctcctgccttagcctcccangtagctgggattacaggcacctgccaccacgcctggctagtttttgtatttttngtagagacgatgtttcaccatgttgaccaggctggtctcgaactcttgacctcaggtgatccgctcgcttcggcctcccaaagtgctgggattataggcgtgagccactgtgcccagcctcacagctgcatcttaaccttacctttgcctctgcctctcaagctggtacctcctaatttacatcctaagagtggaaccatgtgacaaggactggagtgccattggctgtggactgttcaggcagggaagtacaagaccactcttgtattcaggggcaaccaaaggagagaattacgtacttgttgagtacaaactgcaccaagccctggagacccattaccaccgttaaccctcaatacagctctgctagtaagggattcgtctccccaaatgaaaaaaaaaagtaatctcagaatgttggccgagcatggtggctcacacctgtagtcccagttatgcaggaggctgaggcaggagaatcgcttgatctcaggaggcggaggttgcagtgagtcgacatcacaccactgcactccagcctgggggacagagtgagacttcgtctcggaaaaaaaaaaaaaaagttgacaggatggccagacccaagtgggcgtattaagtggtggtgctaggattggaacccaagcgtgattaaaaccctatgcaggccctttcctctatattgtactgcctccttaacaaaggaagattgattaagcccctactttgtgccagtctctgttatcaagtccgttaaatgcatttaacgttaaattttttcttttttggtttaaaaaactctagtttcttaaactactagtttttagtgtcttgctaaaactatgtgctcttgaataggctacaacttatttcacactatctcattgaactctcctggtatgtgatagtgttataatgaaaaattgcataccaggacagctaagtctattttgcaaccatacagcgtttcataatttagcatttaaaatacagacagtccccgacttttggtggtttgatgtgggatttttggtggaaaagcagtatacattcagaatgcacctctacttatgatggggctacttcctggtaaacccattgtaatgtgcaaattacgggtttatcaggaggtgaccccatcggtaatggagaagtgctgggaggtaaatattagaaatggaagtatctaaatgagtaagaaacagcatgggagcataatttggccaaaatcaaacagaactaaagtagtcatgtcggtaagaatttgggactgcaggccagttacgatagctctcacctgtaatcccagcattttgggaggccgaggcaggcggatcacttgaggtcaggagttcaagaccagcctaaacaatatggcgaaacctcatctctaccaaaaaaatacaaagattagctgggcatggtgtctcatgcctgtagtcccagctacctatggggctgaggcaggaggatctcttgagcccaggaggtcgatgctgcattgagccgagattgtgccactgcactccagcgtgggcaacagagtgagactgtctcagggggaaaaaaaaagaggaaaacaaaaaagacgttgggagtgcagtttctctacctacagcatatctcaaaggttttttttaaaaaagtattttcttaactttttaccttcatttttcaaaacaattagggtacaatttacatatagtaaagttcactctttatagttttagttatgtgagtttgtacaaacatatacaggagtgaaccactaccacaatcgaaatatagttgcatcacccccctaaaactctccaggcccttttgtagtcaactcctaatttacatcctangagtggaaccatgtgacaaggactggagtgccattggctgtggactgttcaggcagggaagtacaagaccactcttgtattcaggggcaacnaaaggagagaattacgtacttgttgagtacaaactgcaccaagccctggagacccattaccaccgttaaccctcaatacagctctgctagtaagggattcgtctcccc

SEQ ID NO: 456684 - DNA, 4985 bp, Homo sapiens
gatccggaagtcggagcctagctgcgcgagagtttctgctcgctcaaccgagttgtcgtgttgccctcgcttctcagatccccgccggaagtgaagagagcaagcagatttgaacctatctgctttcaagctggtcatcatgatgaaacttagacacaaaaataaaaagccaggtgaaggttccaagggccacaagaagataagttggccctaccctcagcctgcaaagcaaaatgggaagaaagcaacctccaaagtgccctctgcacctcattttgttcaccccaatgatcatgccaatcgagaggctgaattaaagaagaagtgggttgaggagatgagggagaagcagcaagccgcccgggagcaagaaagacaaaaacgcaggaccattgagagctactgtcaggatgtcctaagacgccaggaggagtttgagcataaggaggaagttttgcaggaattaaatatgtttcctcagctggatgacgaggccacgaggaaggcttattacaaggagttccgtaaggtggtggaatactctgatgtgattctggaagtcctggatgccagagacccattaggctgccgctgcttccaaatggaggaggctgtcctgcgagcacaaggcaacaagaagctggtcctggtcttgaacaagattgacctggtccccaaggaggttgtggagaaatggctggattaccttcggaatgagttgccaaccgtggctttcaaggccagtacccagcatcaggtcaaaaacctgaatcgttgcagtgtgccagtagatcaggcctctgagtcactgctgaaaagcaaagcctgctttggagctgaaaacctcatgagggttctggggaactattgccgccttggtgaagtgcgcacccacattcgtgtgggtgttgtgggtcttcccaatgttgggaagagcagcctgatcaatagcctgaagcgcagccgcgcatgcagcgtgggagctgttcctggaattaccaaattcatgcaggaggtctacctggacaagttcatccggctcttggatgctccaggcattgtcccagggcccaactcagaggtgggcaccatcctgcgtaactgcgtccacgtgcagaagctggcagaccctgtgaccccagtggagaccatcctgcagcgctgcaacctggaggagatttccaactattatggcgtctctgggttccagaccactgagcactttctgacggcagtggcccaccgtttggggaagaagaagaagggaggcttatatagtcaggaacaggcggccaaagctgtcctagctgactgggtgagcgggaagatcagcttctatataccaccaccagccactcacactctgcccacccatctcagtgctgagatcgttaaggaaatgaccgaggtctttgacatcgaggatactgagcaggccaatgaagacaccatggaatgcttggccaccggagaatctgatgagctgttgggtgacacggacccacttgaaatggagatcaagttgctccattctccgatgacgaaaatagcagatgccattgaaaataaaaccaccgtgtataagattggagatctcactgggtattgcaccaatccgaaccgtcatcagatggggtgggctaaacgcaatgtggaccaccgccctaagagcaacagtatggtggatgtctgctcagtggaccgccgctcagtgctgcagaggatcatggagacggaccccctgcaacagggccaggctctggcatctgccctgaaaaataagaagaagatgcagaaacgtgcagataaaatcgccagcaagctgtctgattccatgatgtctgctctcgacctctctggcaatgctgatgatggtgttggtgactaatcgactgatctcacttcccttccgctccaagcaccagttccggtggtacgggggaataccagtgaaatagtttggttctccctgaagcatctgcatattgaaagaacgctttccccactgtgtgtcttctccccctcctccagtaaaaacagtcccggctgggtgctgtggctcacgtctgtaatcccagcactttgggaggccgaggtgggcggatcacctgaggtcgggagttcgagaccagcctggccaacatggtgaagccccgtctctactaaaaatacaaaaaaatttagccgtgcttggtggcacctgtaatcccagctacttgggaggctgaggcaggagaatcgcctgaacctgggagactaaggcaggagaatcgcctggacctgggaggcagaggttgcagtgagcccagacggcaccattgcactctagcctgggcaacaacacgaaactccgtccccaaaaaaaaaaaaaaaaaaatcccaaggggctgcagctgccaaacccaataccctctatttaacccctactctgttttacaagagaaataaaagaagtatcagcagagctcaggtgctaacacctgttgagggctgacctacaaaactctgcctacaaaactctcttagacaggtgaatatgccactagaagttaggttgctggtagacctgggggtccctgcgggagggtgatggtttctttaccaccccacaggagatttcagtggcaaggcatgcctgcagtgggctttgggccatgcatcttccaagtccataggtcttcacctgggtggcagtgagaaaaagtagaaagtaatgagcctcctgtgtctctggaaggttctagggatagggtagagggaagaagagaacaaacaagcctggcttgtgctgaagtgtggtaggcactaccctgtttgcgtgaagagaaaacaaagcacctgttagtagggaggctttagggggaagccccgtcttgggggcatttctgggcagattgtgaattggaggaatctctttaactgaagtactctggctggaccctgcccttgtgtgaccatgtctcctattgcaccagcatttgaattccatggctcaagagggttctggtaccatttattcacagactgtatcctcgagagagctgctatatatgggagtgtaccagccaactccttttccagtgtctgtaagtcacctcattaaagtataattagctgtctcctctgggagatcctaccccatcagacaagggcagtgagcccaagcagtgccagaggccctcagaaagggattagggtagatgattgcaactgaaacacaatcttctttctttgccagggtattttgggggttttgccccaaaatataccctgggcatagcattactgcagtcttggatgtctaccccaaacttccacaccatccttcgacccacagctgcacctttatttatttattttgctcactccagcctgggggacagagtgagacttcgtctcggaaaaaaaaaaaaaaagttgacaggatggccagacccaagtgggcgtattaagtggtggtgctaggattggaacccaagcgtgattaaaaccctatgcaggccctttcctctatattgtactgcctccttaacaaaggaagattgattaagcccctactttgtgccagtctctgttatcaagtccgttaaatgcatttaacgttaaattttttcttttttggtttaaaaaactctagtttcttaaactactagtttttagtgtcttgctaaaactatgtgctcttgaataggctacaacttatttcacactatctcattgaactctcctggtatgtgatagtgttataatgaaaaattgcataccaggacagctaagtctattttgcaaccatacagcgtttcataatttagcatttaaaatacagacagtccccgacttttggtggtttgatgtgggatttttggtggaaaagcagtatacattcagaatgcacctctacttatgatggggctacttcctggtaaacccattgtaatgtgcaaattacgggtttatcaggaggtgaccccatcggtaatggagaagtgctgggaggtaaatattagaaatggaagtatctaaatgagtaagaaacagcatgggagcataatttggccaaaatcaaacagaactaaagtagtcatgtcggtaagaatttgggactgcaggccagttacgatagctctcacctgtaatcccagcattttgggaggccgaggcaggcggatcacttgaggtcaggagttcaagaccagcctaaacaatatggcgaaacctcatctctaccaaaaaaatacaaagattagctgggcatggtgtctcatgcctgtagtcccagctacctatggggctgaggcaggaggatctcttgagcccaggaggtcgatgctgcattgagccgagattgtgccactgcactccagcgtgggcaacagagtgagactgtctcagggggaaaaaaaaagaggaaaacaaaaaagacgttgggagtgcagtttctctacctacagcatatctcaaaggttttttttaaaaaagtattttcttaactttttaccttcatttttcaaaacaattagggtacaatttacatatagtaaagttcactctttatagttttagttatgtgagtttgtacaaacatatacaggagtgaaccactaccacaatcgaaatatagttgcatcacccccctaaaactctccaggcccttttgtagtcaactcctacccccgaccctcagattctgctaaccactgatttgttttctgcccctatagttttgctttagtatgactgtcatatcaatagaatcatacaatgagtaggcttattttatgccttcaggttttaaaaattataaacatttacattacagtaaaattcactctggtatacagttctataaagctctgataaatgtgtagagttgtgtaaccaccaatgcaaccaaggtacagaacagtcctcttagcctctccctaccaaatttattcctgctactttgtagtcaaaaccagtcccctacacccaaaccctggcag

SEQ ID NO: 456685 - DNA, 4393 bp, Homo sapiens
  misc_feature (3456)..(3456): n is a, c, g, or t
  misc_feature (3510)..(3510): n is a, c, g, or t
gatccggaagtcggagcctagctgcgcgagagtttctgctcgctcaaccgagttgtcgtgttgccctcgcttctcagatccccgccggaagtgaagagagcaagcagatttgaacctatctgctttcaagctggtcatcatgatgaaacttagacacaaaaataaaaagccaggtgaaggttccaagggccacaagaagataagttggccctaccctcagcctgcaaagcaaaatgggaagaaagcaacctccaaagtgccctctgcacctcattttgttcaccccaatgatcatgccaatcgagaggctgaattaaagaagaagtgggttgaggagatgagggagaagcagcaagccgcccgggagcaagaaagacaaaaacgcaggaccattgagagctactgtcaggatgtcctaagacgccaggaggagtttgagcataaggaggaagttttgcaggaattaaatatgtttcctcagctggatgacgaggccacgaggaaggcttattacaaggagttccgtaaggtggtggaatactctgatgtgattctggaagtcctggatgccagagacccattaggctgccgctgcttccaaatggaggaggctgtcctgcgagcacaaggcaacaagaagctggtcctggtcttgaacaagattgacctggtccccaaggaggttgtggagaaatggctggattaccttcggaatgagttgccaaccgtggctttcaaggccagtacccagcatcaggtcaaaaacctgaatcgttgcagtgtgccagtagatcaggcctctgagtcactgctgaaaagcaaagcctgctttggagctgaaaacctcatgagggttctggggaactattgccgccttggtgaagtgcgcacccacattcgtgtgggtgttgtgggtcttcccaatgttgggaagagcagcctgatcaatagcctgaagcgcagccgcgcatgcagcgtgggagctgttcctggaattaccaaattcatgcaggaggtctacctggacaagttcatccggctcttggatgctccaggcattgtcccagggcccaactcagaggtgggcaccatcctgcgtaactgcgtccacgtgcagaagctggcagaccctgtgaccccagtggagaccatcctgcagcgctgcaacctggaggagatttccaactattatggcgtctctgggttccagaccactgagcactttctgacggcagtggcccaccgtttggggaagaagaagaagggaggcttatatagtcaggaacaggcggccaaagctgtcctagctgactgggtgagcgggaagatcagcttctatataccaccaccagccactcacactctgcccacccatctcagtgctgagatcgttaaggaaatgaccgaggtctttgacatcgaggatactgagcaggccaatgaagacaccatggaatgcttggccaccggagaatctgatgagctgttgggtgacacggacccacttgaaatggagatcaagttgctccattctccgatgacgaaaatagcagatgccattgaaaataaaaccaccgtgtataagattggagatctcactgggtattgcaccaatccgaaccgtcatcagatggggtgggctaaacgcaatgtggaccaccgccctaagagcaacagtatggtggatgtctgctcagtggaccgccgctcagtgctgcagaggatcatggagacggaccccctgcaacagggccaggctctggcatctgccctgaaaaataagaagaagatgcagaaacgtgcagataaaatcgccagcaagctgtctgattccatgatgtctgctctcgacctctctggcaatgctgatgatggtgttggtgactaatcgactgatctcacttcccttccgctccaagcaccagttccggtggtacgggggaataccagtgaaatagtttggttctccctgaagcatctgcatattgaaagaacgctttccccactgtgtgtcttctccccctcctccagtaaaaacagtcccggctgggtgctgtggctcacgtctgtaatcccagcactttgggaggccgaggtgggcggatcacctgaggtcgggagttcgagaccagcctggccaacatggtgaagccccgtctctactaaaaatacaaaaaaatttagccgtgcttggtggcacctgtaatcccagctacttgggaggctgaggcaggagaatcgcctgaacctgggagactaaggcaggagaatcgcctggacctgggaggcagaggttgcagtgagcccagacggcaccattgcactctagcctgggcaacaacacgaaactccgtccccaaaaaaaaaaaaaaaaaaatcccaaggggctgcagctgccaaacccaataccctctatttaacccctactctgttttacaagagaaataaaagaagtatcagcagagctcaggtgctaacacctgttgagggctgacctacaaaactctgcctacaaaactctcttagacaggtgaatatgccactagaagttaggttgctggtagacctgggggtccctgcgggagggtgatggtttctttaccaccccacaggagatttcagtggcaaggcatgcctgcagtgggctttgggccatgcatcttccaagtccataggtcttcacctgggtggcagtgagaaaaagtagaaagtaatgagcctcctgtgtctctggaaggttctagggatagggtagagggaagaagagaacaaacaagcctggcttgtgctgaagtgtggtaggcactaccctgtttgcgtgaagagaaaacaaagcacctgttagtagggaggctttagggggaagccccgtcttgggggcatttctgggcagattgtgaattggaggaatctctttaactgaagtactctggctggaccctgcccttgtgtgaccatgtctcctattgcaccagcatttgaattccatggctcaagagggttctggtaccatttattcacagactgtatcctcgagagagctgctatatatgggagtgtaccagccaactccttttccagtgtctgtaagtcacctcattaaagtataattagctgtctcctctgggagatcctaccccatcagacaagggcagtgagcccaagcagtgccagaggccctcagaaagggattagggtagatgattgcaactgaaacacaatcttctttctttgccagggtattttgggggttttgccccaaaatataccctgggcatagcattactgcagtcttggatgtctaccccaaacttccacaccatccttcgacccacagctgcacctttatttatttattttgctctgttgcccaggctggagtgcaatggcgtgatctcggctcactgcaacctctgcctcccgggttcaggtgatcctcctgccttagcctcccangtagctgggattacaggcacctgccaccacgcctggctagtttttgtatttttngtagagacgatgtttcaccatgttgaccaggctggtctcgaactcttgacctcaggtgatccgctcgcttcggcctcccaaagtgctgggattataggcgtgagccactgtgcccagcctcacagctgcatcttaaccttacctttgcctctgcctctcaagctggtacctcctaatttacatcctaagagtggaaccatgtgacaaggactggagtgccattggctgtggactgttcaggcagggaagtacaagaccactcttgtattcaggggcaaccaaaggagagaattacgtacttgttgagtacaaactgcaccaagccctggagacccattaccaccgttaaccctcaatacagctctgctagtaagggattcgtctccccaaatgaaaaaaaaaagtaatctcagaatgttggccgagcatggtggctcacacctgtagtcccacctcccgagtaacagggactacaggtgcccaccaccatgctgggctaatttttgtatttttggtagaggcgggggtttctccacactggccaggctggtcttgaacttctgacctcaagggatccacccgcctcggcctcccaaagtgctgggattataggcatgaaccaccgtgtccggccatatattttcgtcttttgaagactgttatatacatgaaattatatggtatgtagcattttgagagcgacttcttttgctatgagtaatacatttgagattcatccatatttctcagtatattaatagttcttatttctgagtcactccattgtgtggatttactactgtttgttccccagttgaaggatgtttaggatctttgcagttttggacaattacaagtaaagctgctataaacatttgtatgc

SEQ ID NO: 456686 - DNA, 5774 bp, Homo sapiens
  misc_feature (3568)..(3568): n is a, c, g, or t
  misc_feature (3622)..(3622): n is a, c, g, or t
gatccggaagtcggagcctagctgcgcgagagtttctgctcgctcaaccgagttgtcgtgttgccctcgcttctcagatccccgccggaagttaagaaacttctctcctcttttctcacaatgtgcgctcacctagacggccgggcagttaggatcgtctattggatgtgaaaccagagatgcccgccaacctggaatagagaggaagagagcaagcagatttgaacctatctgctttcaagctggtcatcatgatgaaacttagacacaaaaataaaaagccaggtgaaggttccaagggccacaagaagataagttggccctaccctcagcctgcaaagcaaaatgggaagaaagcaacctccaaagtgccctctgcacctcattttgttcaccccaatgatcatgccaatcgagaggctgaattaaagaagaagtgggttgaggagatgagggagaagcagcaagccgcccgggagcaagaaagacaaaaacgcaggaccattgagagctactgtcaggatgtcctaagacgccaggaggagtttgagcataaggaggaagttttgcaggaattaaatatgtttcctcagctggatgacgaggccacgaggaaggcttattacaaggagttccgtaaggtggtggaatactctgatgtgattctggaagtcctggatgccagagacccattaggctgccgctgcttccaaatggaggaggctgtcctgcgagcacaaggcaacaagaagctggtcctggtcttgaacaagattgacctggtccccaaggaggttgtggagaaatggctggattaccttcggaatgagttgccaaccgtggctttcaaggccagtacccagcatcaggtcaaaaacctgaatcgttgcagtgtgccagtagatcaggcctctgagtcactgctgaaaagcaaagcctgctttggagctgaaaacctcatgagggttctggggaactattgccgccttggtgaagtgcgcacccacattcgtgtgggtgttgtgggtcttcccaatgttgggaagagcagcctgatcaatagcctgaagcgcagccgcgcatgcagcgtgggagctgttcctggaattaccaaattcatgcaggaggtctacctggacaagttcatccggctcttggatgctccaggcattgtcccagggcccaactcagaggtgggcaccatcctgcgtaactgcgtccacgtgcagaagctggcagaccctgtgaccccagtggagaccatcctgcagcgctgcaacctggaggagatttccaactattatggcgtctctgggttccagaccactgagcactttctgacggcagtggcccaccgtttggggaagaagaagaagggaggcttatatagtcaggaacaggcggccaaagctgtcctagctgactgggtgagcgggaagatcagcttctatataccaccaccagccactcacactctgcccacccatctcagtgctgagatcgttaaggaaatgaccgaggtctttgacatcgaggatactgagcaggccaatgaagacaccatggaatgcttggccaccggagaatctgatgagctgttgggtgacacggacccacttgaaatggagatcaagttgctccattctccgatgacgaaaatagcagatgccattgaaaataaaaccaccgtgtataagattggagatctcactgggtattgcaccaatccgaaccgtcatcagatggggtgggctaaacgcaatgtggaccaccgccctaagagcaacagtatggtggatgtctgctcagtggaccgccgctcagtgctgcagaggatcatggagacggaccccctgcaacagggccaggctctggcatctgccctgaaaaataagaagaagatgcagaaacgtgcagataaaatcgccagcaagctgtctgattccatgatgtctgctctcgacctctctggcaatgctgatgatggtgttggtgactaatcgactgatctcacttcccttccgctccaagcaccagttccggtggtacgggggaataccagtgaaatagtttggttctccctgaagcatctgcatattgaaagaacgctttccccactgtgtgtcttctccccctcctccagtaaaaacagtcccggctgggtgctgtggctcacgtctgtaatcccagcactttgggaggccgaggtgggcggatcacctgaggtcgggagttcgagaccagcctggccaacatggtgaagccccgtctctactaaaaatacaaaaaaatttagccgtgcttggtggcacctgtaatcccagctacttgggaggctgaggcaggagaatcgcctgaacctgggagactaaggcaggagaatcgcctggacctgggaggcagaggttgcagtgagcccagacggcaccattgcactctagcctgggcaacaacacgaaactccgtccccaaaaaaaaaaaaaaaaaaatcccaaggggctgcagctgccaaacccaataccctctatttaacccctactctgttttacaagagaaataaaagaagtatcagcagagctcaggtgctaacacctgttgagggctgacctacaaaactctgcctacaaaactctcttagacaggtgaatatgccactagaagttaggttgctggtagacctgggggtccctgcgggagggtgatggtttctttaccaccccacaggagatttcagtggcaaggcatgcctgcagtgggctttgggccatgcatcttccaagtccataggtcttcacctgggtggcagtgagaaaaagtagaaagtaatgagcctcctgtgtctctggaaggttctagggatagggtagagggaagaagagaacaaacaagcctggcttgtgctgaagtgtggtaggcactaccctgtttgcgtgaagagaaaacaaagcacctgttagtagggaggctttagggggaagccccgtcttgggggcatttctgggcagattgtgaattggaggaatctctttaactgaagtactctggctggaccctgcccttgtgtgaccatgtctcctattgcaccagcatttgaattccatggctcaagagggttctggtaccatttattcacagactgtatcctcgagagagctgctatatatgggagtgtaccagccaactccttttccagtgtctgtaagtcacctcattaaagtataattagctgtctcctctgggagatcctaccccatcagacaagggcagtgagcccaagcagtgccagaggccctcagaaagggattagggtagatgattgcaactgaaacacaatcttctttctttgccagggtattttgggggttttgccccaaaatataccctgggcatagcattactgcagtcttggatgtctaccccaaacttccacaccatccttcgacccacagctgcacctttatttatttattttgctctgttgcccaggctggagtgcaatggcgtgatctcggctcactgcaacctctgcctcccgggttcaggtgatcctcctgccttagcctcccangtagctgggattacaggcacctgccaccacgcctggctagtttttgtatttttngtagagacgatgtttcaccatgttgaccaggctggtctcgaactcttgacctcaggtgatccgctcgcttcggcctcccaaagtgctgggattataggcgtgagccactgtgcccagcctcacagctgcatcttaaccttacctttgcctctgcctctcaagctggtacctcctaatttacatcctaagagtggaaccatgtgacaaggactggagtgccattggctgtggactgttcaggcagggaagtacaagaccactcttgtattcaggggcaaccaaaggagagaattacgtacttgttgagtacaaactgcaccaagccctggagacccattaccaccgttaaccctcaatacagctctgctagtaagggattcgtctccccaaatgaaaaaaaaaagtaatctcagaatgttggccgagcatggtggctcacacctgtagtcccagttatgcaggaggctgaggcaggagaatcgcttgatctcaggaggcggaggttgcagtgagtcgacatcacaccactgcactccagcctgggggacagagtgagacttcgtctcggaaaaaaaaaaaaaaagttgacaggatggccagacccaagtgggcgtattaagtggtggtgctaggattggaacccaagcgtgattaaaaccctatgcaggccctttcctctatattgtactgcctccttaacaaaggaagattgattaagcccctactttgtgccagtctctgttatcaagtccgttaaatgcatttaacgttaaattttttcttttttggtttaaaaaactctagtttcttaaactactagtttttagtgtcttgctaaaactatgtgctcttgaataggctacaacttatttcacactatctcattgaactctcctggtatgtgatagtgttataatgaaaaattgcataccaggacagctaagtctattttgcaaccatacagcgtttcataatttagcatttaaaatacagacagtccccgacttttggtggtttgatgtgggatttttggtggaaaagcagtatacattcagaatgcacctctacttatgatggggctacttcctggtaaacccattgtaatgtgcaaattacgggtttatcaggaggtgaccccatcggtaatggagaagtgctgggaggtaaatattagaaatggaagtatctaaatgagtaagaaacagcatgggagcataatttggccaaaatcaaacagaactaaagtagtcatgtcggtaagaatttgggactgcaggccagttacgatagctctcacctgtaatcccagcattttgggaggccgaggcaggcggatcacttgaggtcaggagttcaagaccagcctaaacaatatggcgaaacctcatctctaccaaaaaaatacaaagattagctgggcatggtgtctcatgcctgtagtcccagctacctatggggctgaggcaggaggatctcttgagcccaggaggtcgatgctgcattgagccgagattgtgccactgcactccagcgtgggcaacagagtgagactgtctcagggggaaaaaaaaagaggaaaacaaaaaagacgttgggagtgcagtttctctacctacagcatatctcaaaggttttttttaaaaaagtattttcttaactttttaccttcatttttcaaaacaattagggtacaatttacatatagtaaagttcactctttatagttttagttatgtgagtttgtacaaacatatacaggagtgaaccactaccacaatcgaaatatagttgcatcacccccctaaaactctccaggcccttttgtagtcaactcctacccccgaccctcagattctgctaaccactgatttgttttctgcccctatagttttgctttagtatgactgtcatatcaatagaatcatacaatgagtaggcttattttatgccttcaggttttaaaaattataaacatttacattacagtaaaattcactctggtatacagttctataaagctctgataaatgtgtagagttgtgtaaccaccaatgcaaccaaggtacagaacagtcctcttagcctctccctaccaaatttattcctgctactttgtagtcaaaaccagtcccctacacccaaaccctggcag

SEQ ID NO: 456687 - DNA, 2939 bp, Homo sapiens
ccccccgccccccccccccccccccaacataggcagtagaggccgggttaatcggcagagggtagtaagaaacttctctcctcttttctcacaatgtgcgctcacctagacggccgggcagttaggatcgtctattggatgtgaaaccagagatgcccgccaacctggaatagagaggaagagagcaagcagatttgaacctatctgctttcaagctggtcatcatgatgaaacttagacacaaaaataaaaagccaggtgaaggttccaagggccacaagaagataagttggccctaccctcagcctgcaaagcaaaatgggaagaaagcaacctccaaagtgccctctgcacctcattttgttcaccccaatgatcatgccaatcgagaggctgaattaaagaagaagtgggttgaggagatgagggagaagcagcaagccgcccgggagcaagaaagacaaaaacgcaggaccattgagagctactgtcaggatgtcctaagacgccaggaggagtttgagcataaggaggaagttttgcaggaattaaatatgtttcctcagctggatgacgaggccacgaggaaggcttattacaaggagttccgtaaggtggtggaatactctgatgtgattctggaagtcctggatgccagagacccattaggctgccgctgcttccaaatggaggaggctgtcctgcgagcacaaggcaacaagaagctggtcctggtcttgaacaagattgacctggtccccaaggaggttgtggagaaatggctggattaccttcggaatgagttgccaaccgtggctttcaaggccagtacccagcatcaggtcaaaaacctgaatcgttgcagtgtgccagtagatcaggcctctgagtcactgctgaaaagcaaagcctgctttggagctgaaaacctcatgagggttctggggaactattgccgccttggtgaagtgcgcacccacattcgtgtgggtgttgtgggtcttcccaatgttgggaagagcagcctgatcaatagcctgaagcgcagccgcgcatgcagcgtgggagctgttcctggaattaccaaattcatgcaggaggtctacctggacaagttcatccggctcttggatgctccaggcattgtcccagggcccaactcagaggtgggcaccatcctgcgtaactgcgtccacgtgcagaagctggcagaccctgtgaccccagtggagaccatcctgcagcgctgcaacctggaggagatttccaactattatggcgtctctgggttccagaccactgagcactttctgacggcagtggcccaccgtttggggaagaagaagaagggaggcttatatagtcaggaacaggcggccaaagctgtcctagctgactgggtgagcgggaagatcagcttctatataccaccaccagccactcacactctgcccacccatctcagtgctgagatcgttaaggaaatgaccgaggtctttgacatcgaggatactgagcaggccaatgaagacaccatggaatgcttggccaccggagaatctgatgagctgttgggtgacacggacccacttgaaatggagatcaagttgctccattctccgatgacgaaaatagcagatgccattgaaaataaaaccaccgtgtataagattggagatctcactgggtattgcaccaatccgaaccgtcatcagatggggtgggctaaacgcaatgtggaccaccgccctaagagcaacagtatggtggatgtctgctcagtggaccgccgctcagtgctgcagaggatcatggagacggaccccctgcaacagggccaggctctggcatctgccctgaaaaataagaagaagatgcagaaacgtgcagataaaatcgccagcaagctgtctgattccatgatgtctgctctcgacctctctggcaatgctgatgatggtgttggtgactaatcgactgatctcacttcccttccgctccaagcaccagttccggtggtacgggggaataccagtgaaatagtttggttctccctgaagcatctgcatattgaaagaacgctttccccactgtgtgtcttctccccctcctccagtaaaaacagtcccggctccaaagtgctgggattataggcgtgagccactgtgcccagcctcacagctgcatcttaaccttacctttgcctctgcctctcaagctggtacctcctaatttacatcctaagagtggaaccatgtgacaaggactggagtgccattggctgtggactgttcaggcagggaagtacaagaccactcttgtattcaggggcaaccaaaggagagaattacgtacttgttgagtacaaactgcaccaagccctggagacccattaccaccgttaaccctcaatacagctctgctagtaagggattcgtctccccaaatgaaaaaaaaaagtaatctcagaatgttggccgagcatggtggctcacacctgtagtcccacctcccgagtaacagggactacaggtgcccaccaccatgctgggctaatttttgtatttttggtagaggcgggggtttctccacactggccaggctggtcttgaacttctgacctcaagggatccacccgcctcggcctcccaaagtgctgggattataggcatgaaccaccgtgtccggccatatattttcgtcttttgaagactgttatatacatgaaattatatggtatgtagcattttgagagcgacttcttttgctatgagtaatacatttgagattcatccatatttctcagtatattaatagttcttatttctgagtcactccattgtgtggatttactactgtttgttccccagttgaaggatgtttaggatctttgcagttttggacaattacaagtaaagctgctataaacatttgtatgc

SEQ ID NO: 456688 - DNA, 5591 bp, Homo sapiens
  misc_feature (3385)..(3385): n is a, c, g, or t
  misc_feature (3439)..(3439): n is a, c, g, or t
cttcttctcccattctgacaggaagagagcaagcagatttgaacctatctgctttcaagctggtcatcatgatgaaacttagacacaaaaataaaaagccaggtgaaggttccaagggccacaagaagataagttggccctaccctcagcctgcaaagcaaaatgggaagaaagcaacctccaaagtgccctctgcacctcattttgttcaccccaatgatcatgccaatcgagaggctgaattaaagaagaagtgggttgaggagatgagggagaagcagcaagccgcccgggagcaagaaagacaaaaacgcaggaccattgagagctactgtcaggatgtcctaagacgccaggaggagtttgagcataaggaggaagttttgcaggaattaaatatgtttcctcagctggatgacgaggccacgaggaaggcttattacaaggagttccgtaaggtggtggaatactctgatgtgattctggaagtcctggatgccagagacccattaggctgccgctgcttccaaatggaggaggctgtcctgcgagcacaaggcaacaagaagctggtcctggtcttgaacaagattgacctggtccccaaggaggttgtggagaaatggctggattaccttcggaatgagttgccaaccgtggctttcaaggccagtacccagcatcaggtcaaaaacctgaatcgttgcagtgtgccagtagatcaggcctctgagtcactgctgaaaagcaaagcctgctttggagctgaaaacctcatgagggttctggggaactattgccgccttggtgaagtgcgcacccacattcgtgtgggtgttgtgggtcttcccaatgttgggaagagcagcctgatcaatagcctgaagcgcagccgcgcatgcagcgtgggagctgttcctggaattaccaaattcatgcaggaggtctacctggacaagttcatccggctcttggatgctccaggcattgtcccagggcccaactcagaggtgggcaccatcctgcgtaactgcgtccacgtgcagaagctggcagaccctgtgaccccagtggagaccatcctgcagcgctgcaacctggaggagatttccaactattatggcgtctctgggttccagaccactgagcactttctgacggcagtggcccaccgtttggggaagaagaagaagggaggcttatatagtcaggaacaggcggccaaagctgtcctagctgactgggtgagcgggaagatcagcttctatataccaccaccagccactcacactctgcccacccatctcagtgctgagatcgttaaggaaatgaccgaggtctttgacatcgaggatactgagcaggccaatgaagacaccatggaatgcttggccaccggagaatctgatgagctgttgggtgacacggacccacttgaaatggagatcaagttgctccattctccgatgacgaaaatagcagatgccattgaaaataaaaccaccgtgtataagattggagatctcactgggtattgcaccaatccgaaccgtcatcagatggggtgggctaaacgcaatgtggaccaccgccctaagagcaacagtatggtggatgtctgctcagtggaccgccgctcagtgctgcagaggatcatggagacggaccccctgcaacagggccaggctctggcatctgccctgaaaaataagaagaagatgcagaaacgtgcagataaaatcgccagcaagctgtctgattccatgatgtctgctctcgacctctctggcaatgctgatgatggtgttggtgactaatcgactgatctcacttcccttccgctccaagcaccagttccggtggtacgggggaataccagtgaaatagtttggttctccctgaagcatctgcatattgaaagaacgctttccccactgtgtgtcttctccccctcctccagtaaaaacagtcccggctgggtgctgtggctcacgtctgtaatcccagcactttgggaggccgaggtgggcggatcacctgaggtcgggagttcgagaccagcctggccaacatggtgaagccccgtctctactaaaaatacaaaaaaatttagccgtgcttggtggcacctgtaatcccagctacttgggaggctgaggcaggagaatcgcctgaacctgggagactaaggcaggagaatcgcctggacctgggaggcagaggttgcagtgagcccagacggcaccattgcactctagcctgggcaacaacacgaaactccgtccccaaaaaaaaaaaaaaaaaaatcccaaggggctgcagctgccaaacccaataccctctatttaacccctactctgttttacaagagaaataaaagaagtatcagcagagctcaggtgctaacacctgttgagggctgacctacaaaactctgcctacaaaactctcttagacaggtgaatatgccactagaagttaggttgctggtagacctgggggtccctgcgggagggtgatggtttctttaccaccccacaggagatttcagtggcaaggcatgcctgcagtgggctttgggccatgcatcttccaagtccataggtcttcacctgggtggcagtgagaaaaagtagaaagtaatgagcctcctgtgtctctggaaggttctagggatagggtagagggaagaagagaacaaacaagcctggcttgtgctgaagtgtggtaggcactaccctgtttgcgtgaagagaaaacaaagcacctgttagtagggaggctttagggggaagccccgtcttgggggcatttctgggcagattgtgaattggaggaatctctttaactgaagtactctggctggaccctgcccttgtgtgaccatgtctcctattgcaccagcatttgaattccatggctcaagagggttctggtaccatttattcacagactgtatcctcgagagagctgctatatatgggagtgtaccagccaactccttttccagtgtctgtaagtcacctcattaaagtataattagctgtctcctctgggagatcctaccccatcagacaagggcagtgagcccaagcagtgccagaggccctcagaaagggattagggtagatgattgcaactgaaacacaatcttctttctttgccagggtattttgggggttttgccccaaaatataccctgggcatagcattactgcagtcttggatgtctaccccaaacttccacaccatccttcgacccacagctgcacctttatttatttattttgctctgttgcccaggctggagtgcaatggcgtgatctcggctcactgcaacctctgcctcccgggttcaggtgatcctcctgccttagcctcccangtagctgggattacaggcacctgccaccacgcctggctagtttttgtatttttngtagagacgatgtttcaccatgttgaccaggctggtctcgaactcttgacctcaggtgatccgctcgcttcggcctcccaaagtgctgggattataggcgtgagccactgtgcccagcctcacagctgcatcttaaccttacctttgcctctgcctctcaagctggtacctcctaatttacatcctaagagtggaaccatgtgacaaggactggagtgccattggctgtggactgttcaggcagggaagtacaagaccactcttgtattcaggggcaaccaaaggagagaattacgtacttgttgagtacaaactgcaccaagccctggagacccattaccaccgttaaccctcaatacagctctgctagtaagggattcgtctccccaaatgaaaaaaaaaagtaatctcagaatgttggccgagcatggtggctcacacctgtagtcccagttatgcaggaggctgaggcaggagaatcgcttgatctcaggaggcggaggttgcagtgagtcgacatcacaccactgcactccagcctgggggacagagtgagacttcgtctcggaaaaaaaaaaaaaaagttgacaggatggccagacccaagtgggcgtattaagtggtggtgctaggattggaacccaagcgtgattaaaaccctatgcaggccctttcctctatattgtactgcctccttaacaaaggaagattgattaagcccctactttgtgccagtctctgttatcaagtccgttaaatgcatttaacgttaaattttttcttttttggtttaaaaaactctagtttcttaaactactagtttttagtgtcttgctaaaactatgtgctcttgaataggctacaacttatttcacactatctcattgaactctcctggtatgtgatagtgttataatgaaaaattgcataccaggacagctaagtctattttgcaaccatacagcgtttcataatttagcatttaaaatacagacagtccccgacttttggtggtttgatgtgggatttttggtggaaaagcagtatacattcagaatgcacctctacttatgatggggctacttcctggtaaacccattgtaatgtgcaaattacgggtttatcaggaggtgaccccatcggtaatggagaagtgctgggaggtaaatattagaaatggaagtatctaaatgagtaagaaacagcatgggagcataatttggccaaaatcaaacagaactaaagtagtcatgtcggtaagaatttgggactgcaggccagttacgatagctctcacctgtaatcccagcattttgggaggccgaggcaggcggatcacttgaggtcaggagttcaagaccagcctaaacaatatggcgaaacctcatctctaccaaaaaaatacaaagattagctgggcatggtgtctcatgcctgtagtcccagctacctatggggctgaggcaggaggatctcttgagcccaggaggtcgatgctgcattgagccgagattgtgccactgcactccagcgtgggcaacagagtgagactgtctcagggggaaaaaaaaagaggaaaacaaaaaagacgttgggagtgcagtttctctacctacagcatatctcaaaggttttttttaaaaaagtattttcttaactttttaccttcatttttcaaaacaattagggtacaatttacatatagtaaagttcactctttatagttttagttatgtgagtttgtacaaacatatacaggagtgaaccactaccacaatcgaaatatagttgcatcacccccctaaaactctccaggcccttttgtagtcaactcctacccccgaccctcagattctgctaaccactgatttgttttctgcccctatagttttgctttagtatgactgtcatatcaatagaatcatacaatgagtaggcttattttatgccttcaggttttaaaaattataaacatttacattacagtaaaattcactctggtatacagttctataaagctctgataaatgtgtagagttgtgtaaccaccaatgcaaccaaggtacagaacagtcctcttagcctctccctaccaaatttattcctgctactttgtagtcaaaaccagtcccctacacccaaaccctggcag

SEQ ID NO: 456689 - DNA, 4182 bp, Homo sapiens
ccccccgccccccccccccccccccaacataggcagtagaggccgggttaatcggcagagggtagtaagaaacttctctcctcttttctcacaatgtgcgctcacctagacggccgggcagttaggatcgtctattggatgtgaaaccagagatgcccgccaacctggaatagagaggaagagagcaagcagatttgaacctatctgctttcaagctggtcatcatgatgaaacttagacacaaaaataaaaagccaggtgaaggttccaagggccacaagaagataagttggccctaccctcagcctgcaaagcaaaatgggaagaaagcaacctccaaagtgccctctgcacctcattttgttcaccccaatgatcatgccaatcgagaggctgaattaaagaagaagtgggttgaggagatgagggagaagcagcaagccgcccgggagcaagaaagacaaaaacgcaggaccattgagagctactgtcaggatgtcctaagacgccaggaggagtttgagcataaggaggaagttttgcaggaattaaatatgtttcctcagctggatgacgaggccacgaggaaggcttattacaaggagttccgtaaggtggtggaatactctgatgtgattctggaagtcctggatgccagagacccattaggctgccgctgcttccaaatggaggaggctgtcctgcgagcacaaggcaacaagaagctggtcctggtcttgaacaagattgacctggtccccaaggaggttgtggagaaatggctggattaccttcggaatgagttgccaaccgtggctttcaaggccagtacccagcatcaggtcaaaaacctgaatcgttgcagtgtgccagtagatcaggcctctgagtcactgctgaaaagcaaagcctgctttggagctgaaaacctcatgagggttctggggaactattgccgccttggtgaagtgcgcacccacattcgtgtgggtgttgtgggtcttcccaatgttgggaagagcagcctgatcaatagcctgaagcgcagccgcgcatgcagcgtgggagctgttcctggaattaccaaattcatgcaggaggtctacctggacaagttcatccggctcttggatgctccaggcattgtcccagggcccaactcagaggtgggcaccatcctgcgtaactgcgtccacgtgcagaagctggcagaccctgtgaccccagtggagaccatcctgcagcgctgcaacctggaggagatttccaactattatggcgtctctgggttccagaccactgagcactttctgacggcagtggcccaccgtttggggaagaagaagaagggaggcttatatagtcaggaacaggcggccaaagctgtcctagctgactgggtgagcgggaagatcagcttctatataccaccaccagccactcacactctgcccacccatctcagtgctgagatcgttaaggaaatgaccgaggtctttgacatcgaggatactgagcaggccaatgaagacaccatggaatgcttggccaccggagaatctgatgagctgttgggtgacacggacccacttgaaatggagatcaagttgctccattctccgatgacgaaaatagcagatgccattgaaaataaaaccaccgtgtataagattggagatctcactgggtattgcaccaatccgaaccgtcatcagatggggtgggctaaacgcaatgtggaccaccgccctaagagcaacagtatggtggatgtctgctcagtggaccgccgctcagtgctgcagaggatcatggagacggaccccctgcaacagggccaggctctggcatctgccctgaaaaataagaagaagatgcagaaacgtgcagataaaatcgccagcaagctgtctgattccatgatgtctgctctcgacctctctggcaatgctgatgatggtgttggtgactaatcgactgatctcacttcccttccgctccaagcaccagttccggtggtacgggggaataccagtgaaatagtttggttctccctgaagcatctgcatattgaaagaacgctttccccactgtgtgtcttctccccccaaagtgctgggattataggcgtgagccactgtgcccagcctcacagctgcatcttaaccttacctttgcctctgcctctcaagctggtacctcctaatttacatcctaagagtggaaccatgtgacaaggactggagtgccattggctgtggactgttcaggcagggaagtacaagaccactcttgtattcaggggcaaccaaaggagagaattacgtacttgttgagtacaaactgcaccaagccctggagacccattaccaccgttaaccctcaatacagctctgctagtaagggattcgtctccccaaatgaaaaaaaaaagtaatctcagaatgttggccgagcatggtggctcacacctgtagtcccagttatgcaggaggctgaggcaggagaatcgcttgatctcaggaggcggaggttgcagtgagtcgacatcacaccactgcactccagcctgggggacagagtgagacttcgtctcggaaaaaaaaaaaaaaagttgacaggatggccagacccaagtgggcgtattaagtggtggtgctaggattggaacccaagcgtgattaaaaccctatgcaggccctttcctctatattgtactgcctccttaacaaaggaagattgattaagcccctactttgtgccagtctctgttatcaagtccgttaaatgcatttaacgttaaattttttcttttttggtttaaaaaactctagtttcttaaactactagtttttagtgtcttgctaaaactatgtgctcttgaataggctacaacttatttcacactatctcattgaactctcctggtatgtgatagtgttataatgaaaaattgcataccaggacagctaagtctattttgcaaccatacagcgtttcataatttagcatttaaaatacagacagtccccgacttttggtggtttgatgtgggatttttggtggaaaagcagtatacattcagaatgcacctctacttatgatggggctacttcctggtaaacccattgtaatgtgcaaattacgggtttatcaggaggtgaccccatcggtaatggagaagtgctgggaggtaaatattagaaatggaagtatctaaatgagtaagaaacagcatgggagcataatttggccaaaatcaaacagaactaaagtagtcatgtcggtaagaatttgggactgcaggccagttacgatagctctcacctgtaatcccagcattttgggaggccgaggcaggcggatcacttgaggtcaggagttcaagaccagcctaaacaatatggcgaaacctcatctctaccaaaaaaatacaaagattagctgggcatggtgtctcatgcctgtagtcccagctacctatggggctgaggcaggaggatctcttgagcccaggaggtcgatgctgcattgagccgagattgtgccactgcactccagcgtgggcaacagagtgagactgtctcagggggaaaaaaaaagaggaaaacaaaaaagacgttgggagtgcagtttctctacctacagcatatctcaaaggttttttttaaaaaagtattttcttaactttttaccttcatttttcaaaacaattagggtacaatttacatatagtaaagttcactctttatagttttagttatgtgagtttgtacaaacatatacaggagtgaaccactaccacaatcgaaatatagttgcatcacccccctaaaactctccaggcccttttgtagtcaactcctacccccgaccctcagattctgctaaccactgatttgttttctgcccctatagttttgctttagtatgactgtcatatcaatagaatcatacaatgagtaggcttattttatgccttcaggttttaaaaattataaacatttacattacagtaaaattcactctggtatacagttctataaagctctgataaatgtgtagagttgtgtaaccaccaatgcaaccaaggtacagaacagtcctcttagcctctccctaccaaatttattcctgctactttgtagtcaaaaccagtcccctacacccaaaccctggcag

SEQ ID NO: 456690 - DNA, 1929 bp, Homo sapiens
  misc_feature (1892)..(1893): n is a, c, g, or t
  misc_feature (1919)..(1919): n is a, c, g, or t
  misc_feature (1922)..(1922): n is a, c, g, or t
ccccccgccccccccccccccccccaacataggcagtagaggccgggttaatcggcagagggtagtaagaaacttctctcctcttttctcacaatgtgcgctcacctagacggccgggcagttaggatcgtctattggatgtgaaaccagagatgcccgccaacctggaatagagaggaagagagcaagcagatttgaacctatctgctttcaagctggtcatcatgatgaaacttagacacaaaaataaaaagccaggtgaaggttccaagggccacaagaagataagttggccctaccctcagcctgcaaagcaaaatgggaagaaagcaacctccaaagtgccctctgcacctcattttgttcaccccaatgatcatgccaatcgagaggctgaattaaagaagaagtgggttgaggagatgagggagaagcagcaagccgcccgggagcaagaaagacaaaaacgcaggaccattgagagctactgtcaggatgtcctaagacgccaggaggagtttgagcataaggaggaagttttgcaggaattaaatatgtttcctcagctggatgacgaggccacgaggaaggcttattacaaggagttccgtaaggtggtggaatactctgatgtgattctggaagtcctggatgccagagacccattaggctgccgctgcttccaaatggaggaggctgtcctgcgagcacaaggcaacaagaagctggtcctggtcttgaacaagattgacctggtccccaaggaggttgtggagaaatggctggattaccttcggaatgagttgccaaccgtggctttcaaggccagtacccagcatcaggtcaaaaacctgaatcgttgcagtgtgccagtagatcaggcctctgagtcactgctgaaaagcaaagcctgctttggagctgaaaacctcatgagggttctggggaactattgccgccttggtgaagtgcgcacccacattcgtgtgggtgttgtgggtcttcccaatgttgggaagagcagcctgatcaatagcctgaagcgcagccgcgcatgcagcgtgggagctgttcctggaattaccaaattcatgcaggaggtctacctggacaagttcatccggctcttggatgctccaggcattgtcccagggcccaactcagaggtgggcaccatcctgcgtaactgcgtccacgtgcagaagctggcagaccctgtgaccccagtggagaccatcctgcagcgctgcaacctggaggagatttccaactattatggcgtctctgggttccagaccactgagcactttctgacggcagtggcccaccgtttggggaagaagaagaagggaggcttatatagtcaggaacaggcggccaaagctgtcctagctgactgggtgagcgggaagatcagcttctatataccaccaccagccactcacactctgcccacccatctcagtgctgagatcgttaaggaaatgaccgaggtctttgacatcgaggatactgagcaggccaatgaagacaccatggaatgcttggccaccggagaatctgatgagctgttgggtgacacggacccacttgaaatggagatcaagttgctccattctccgatgacgaaaatagcagatgccattgaaaataaaaccaccgtgtataagattggagatctcactgggtattgcaccaatccgaaccgtcatcagatggggtgggctaaacgcaatgtggaccaccgccctaagagcaacagtatggtggatgtctgctcagtggaccgccgctcagtgctgcagaggatcatggagacggaccccctgcaacagggccaggctctggcatctgccctgaaaaataagaagaagatgcagaaacgtgcagannaatcccagcaagctgtggtgcagaantangatccgg

SEQ ID NO: 456691 - DNA, 7834 bp, Homo sapiens
ataatcagtggatgaaaggattttctcagacccttttttccgtgcttctggaggattaatccactacagtctgcaatttcagtggaaactgcaaggcacacgatgtggcaggagccgggagcgacttccgaattgttgtggacccttcctgtagcataggggagttttcacacttgcctccactcctccccttccccccaactccctccttctgatctcttctttttaatctgttcccattttccgagttaagttctatttccaaaactgttctctggagctataagtggattgccagaaatgagagattaggagctgggagaagaggaagcgccttgtgttgtgtctcctggaggctgccgacatgaagtgctttttcccggtgctgagctgtctggctgtgctgggtgtggtgtcagcacagcggcaggtcaccgttcaggaaggacccttgtaccgcacggagggctcccacatcactatctggtgcaatgtgagtggctaccagggaccttctgagcagaatttccagtggtccatttacctgccttcgtcgccagagcgagaggtgcagatcgtcagcaccatggactcttccttcccctatgccatctacacccagcgcgtccgcggagggaagatcttcatagaaagagtccaggggaactcaaccctattgcacatcacagatcttcaggcccgggatgccggggagtatgaatgccacacacccagcactgataagcaatactttgggagttacagtgcaaagatgaacctagtggtgatcccagactccctgcagaccactgccatgccccagactctgcacagagtggagcaggacccgctggagctcacttgtgaggtggcctcagagaccattcagcacagccacctgtctgtggcctggctccggcagaaagttggcgagaagcccgtggaggtcatctccctgagccgagatttcatgcttcactccagcagcgaatatgcccagaggcagagcctgggggaggtgcggctggacaagctggggaggaccaccttccgcctcaccatcttccacctgcagccttctgaccagggcgaattctactgcgaggccgccgagtggatccaggatccggatgggtcgtggtatgctatgacccgaaagcgttccgagggagccgtggtcaacgtccagccaactgacaaagaattcactgttcggctggagacagagaagcggctgcacacggtgggcgagccggtggagttcagatgcatcctggaggctcagaatgttcccgaccgttactttgctgtctcctgggccttcaacagctcgctcatcgccaccatgggtcctaacgctgtgcctgtcctcaacagcgaatttgctcaccgggaagccaggggacagcttaaggtggccaaagagagcgacagtgtctttgtgctgaagatctaccacctccgccaggaagatagcgggaaatacaactgccgggtgactgagcgagagaaaaccgtgaccggggaattcattgataaggagagcaagcgtcccaagaacatccccatcatagtcctccccctcacagataactgggtagttaaagtcccccagcaccaccagctcctgtcccaaggccacttggagagcagcatctccgtggaggtggccagcaatgccagcgtcatccttgagggcgaggacctgcgcttctcctgcagtgtccgcacggcaggcaggccgcagggtcgcttctctgtcatctggcagcttgtggacaggcagaaccgccgcagcaatatcatgtggctagaccgggatggcaccgtgcagccaggctcgtcctactgggagcgcagcagctttgggggcgtccagatggagcaggtgcagcccaactcgttcagcctgggcatcttcaacagcaggaaggaggacgagggccagtatgaatgccatgtgactgaatgggtgcgggcagtggatggcgagtggcagattgttggggagcgccgggccagcactcccatctccatcacagctcttgaaatgggcttcgcagtcacagccatctcccggacaccgggggtgacctacagcgactcctttgacttgcagtgtatcatcaaaccccactaccctgcctgggtccccgtgtcggtgacatggcggttccagccggtgggcacggtggagttccatgacttggtgaccttcacccgggacggaggggtccagtggggggacaggtcctccagcttccgaacccgaactgccatcgagaaggctgagtccagcaacaacgtccgcctaagcatcagccgagccagtgacacggaagcaggcaagtaccagtgtgtggcagagctgtggcggaagaactacaacaacacctggacgcgactggcggagaggacctccaacctgctggagatcagggtgctgcagccagtgacaaagctgcaggtgagcaaatcgaagaggaccctcaccctggtggaaaacaagcccattcagttgaactgctcagtcaagtctcagactagccagaactcccactttgcggtgctctggtatgtccacaagccctcggatgccgatggcaagcttatcctgaagaccacccacaactccgcctttgaatacggtacttacgccgaggaggagggcctgagagccaggctccagtttgagaggcatgtgtcggggggcctgttcagcctcaccgtccagagagccgaggtcagcgacagcggcagctactactgccacgtggaggagtggctgctgagccccaactacgcctggtacaagctggcagaggaggtttctgggcgcacagaagtcactgtgaaacagccagacagccgcctgaggctcagccaagcccaggggaacctgtcggttctggagacccggcaggtacagctggagtgtgtggttctcaaccgcaccagcataacctcccagctcatggtggaatggtttgtatggaagcccaaccaccctgagcgggagactgtggcccgcttgagccgtgacgccaccttccactatggagagcaggcagccaagaacaatctgaaggggcggctgcatttggagagtccttcccccggcgtgtaccgtctcttcatccagaacgtggctgtgcaggacagcgggacctacagctgccatgtggaggagtggctgcccagccccagtggcatgtggtataagcgggcagaggacaccgctgggcagacagctctgacagtcatgcgaccagatgcttccctgcaggtggacacagtggtccccaatgccacggtctctgagaaggcagctttccagctggactgtagcatcgtgtcccgctccagccaggactcccgcttcgctgtggcctggtattccctgaggactaaagctggggggaaaaggagcagccctggcctggaagaacaggaagaggaaagggaggaggaggaggaggaggacgacgacgacgacgacgacccaacagagcggacggccctgctgagcgtgggcccagatgctgtctttggcccagagggcagtccttgggagggcaggcttcgcttccagaggctctccccggtgctctaccggctcacagtgctgcaggcaagcccccaagatacaggcaattactcctgccatgtggaggagtggctgcccagccctcagaaggaatggtaccggctgacggaggaggagtcagcccccatcggcatccgtgttctagatacaagtcccaccctccagtccatcatctgctccaacgacgcactcttctacttcgtcttcttctaccctttccccatctttggcattcttatcatcaccatccttctggtgcgtttcaagagccggaactccagcaagaactctgatgggaagaatggggtgcctctgctgtggatcaaagagccacacctcaactactcccctacttgcctggagccccctgttctcagtatccatccaggggccatagactaagcgggtgatgccccagcggatgttggccacggaggagctgaggctctccctttctctgtgattggacagttgacagcacccaaactctggggtgcatgtgtgtggaaagttgtcagacttgaaaagtgttccaagttcccagtcagtcacagagacagactgcctctcggtggcagtcttggttggttagctatttgcgcgcaaatgttgtgatcctgccattatagatttcttgtttctgtttttagtaatgtagtgagtagctccaggtgccacatctactcacagatttatctagtattctcagatagatgttacagggcttcttattctttgtaatgtactctttttaaatccctttagtttaccctttttggattccttaatgtggacgaatttctcttacgtacaactgacagcaaaaggaagggcgaactttctagtgacaaggaatctcttccaagactttgtttttgcacatttgaaaatgccacccatggatcaaaatatacccaaacgttttttactttcttaacaagacttaagaattgtgtgtagtgtgggcaaaatttgtatgttgtcttttccctcagctggagttattggaaccactttgtagtcaagacgaaagcactgaattttgcttcaaagaactgtgtatgtacaagagaaatcctgcataaccccattaggagtagatggtgcccggcctatctgtcagggaggcaaaaaaggcttcatcccatccttgccaaaaaataagaaaactgtcttggagaatgggtcagaagccccaaacggcacacactttccaaattaaagtgggcaggggctgcttttagcagctgctgacctgcagatttgtcaaagccagtgactagagaaggaagggagaaaggctggctgttggcttgctctgagctgcaaggatggtctctaactgattaactgtgagcaggtgggcctgtgtcttcaggtgctttgccaaactcttaaaagaaagtgtccagtgaacttggaagtgggcccctgagctgagcacagggccaaagcagccatggcagacacctgacggagggcacggggctggctgacactaagtttggtgggacagtgaggggtgggaggggggtttccagggcctggtgttggagagtgcagagaaatatctacctccctggaggtgtgaagactaggtttttcttcttccttccaattagattttccttaattatagtgatgtcttccttattcatttttctctccctgcctctcactgccataagaatatcagcctgggggcagtccagacgcagccctttgtcatcctttctgtttgcctagtctcagcagactgtgatcacaaggcattgtctgtgggatttttcctttccctttcttgatctctcttgtggttctaggttgtttggttgttcattgttatggtggctttttattttaacgccccttgagccccatgatggctggtgtcaccctgttcttttacactgttgggccaggtgctgcttgtccttcttagggcatcatcaattgcaaatatttccttttgctccctttatgaagatgttcttatacccttgctttcccatatttttctggccaagcatgccatctcctttactctgggaacttacatcctgaatcccaagagggggtcacagtttggaaaaagtcatcagggattctggaactaagtctgataaaagattccagtgaagccctgttctgagaacgagcagactgcaggggaggccatgggattccccaggccagtgtctgtgctgatccttcaagggtctgcaggtatgcaggtggcctgggctgctcggcagatactttgctgattcccagctgaggggagcatggtggcgattgctcagccattttctgacagacacacagacctgccttttctcccccaagtataccgtaccctcctgtgagacagtgtgtgcaggcaccaccaccttaatcctgctgttgcctgacatgctgattctcatttattatgctgcatcaacacattagaggtacaggagcggctcagtcatgaaaaaagaaggtcttttgccccatttctttatttcagagatgtgggctttcagtgggaatttgctgactcctactttataggctgagtcaatgagggaagatgactggcgtttcctctgtctaaatgggaggttgccagagcgctggctgggactaggatgtgtaactaagatttcagtttgaaatcttagatttcagttcacggcgataaagaagtaggtgctgcacacaaatatgtaaagcaattgtaggaaatttgaaaggaaaaaaagaaaccgaagccagtattttaataattgctttttctgtgtattttgtattgggctgggggatagcatcaaaggttgaactttttgagctttctatgaaaaaccccaggaccttctttctttggccatttctatggaaatgcgatgtcagatggatggtaatggtgccctccagtggctgtgagacctcattgcgcattgtctactggagctttagtcttctgagacggaggaaaactgctgaatactctggattcatctatgtctacaatgttgcatttatgaaaaactacactgtgctaggcgcattctaggacatgaatatgaccacaccctctttcaccgggtgtttctgtagcaagttttcatattcttttcaaacaatggtttctctgcgttaattattgaggaaaaaaaaagatggggtaagaaaactacccatgcatgatgtagagagctgttgatttgtttctgtttttttaaaggaaaactatttgtaagatgttgcactaaaacattttatatacacttcagagacctgtagtaaattatgttgaaaataaaaaaaaaaaaaaaaaaaaaaaaaaaaaaacaaaaaaaaaaacaaacaaaaaaacaaaaaaagaaaaaacacaaaaaaaaaaaaaaacaaaaaaaaacgaaaaaaaaaaaaaaacacaaaaacaagggcggggggcggagagaaaggagagggggggaggagacggaagagagaaggagaggggggaggagagagggggaccggcagggggagggagataaaaggagagggcggggggcagacagaaagacgaagaggaaggaggggagagagagagaggcgagaaagatagaggaggcggaagaccgcaaaggaaaagggaggagggtgaactggaggagagaaggaacgaaagacacagaaagcagaagcgagacgggacagaggggccagagggaggaggatgggaatggagacaagagcgaaggaggggaaggaggggcaggtggaggtgaagtggatggaatgatgagagagagggagagcaggaagggggggcagggaagaggaagagcaacgagagcacagaagacaaaggaaagagccagaagaggaaaacaacggaaggagggggggggaaggcgaaagagaagagagaggagagaacagaaggaggcggggaaagggagaggccgaaagcaaggagaagaggaagagagaaggcgaagagggaaagaaaagaagaggaaggaaggagagaaagaaaagagaaaaacggggaagggcggaaacaaagagggagaggaaaactagcagagacgacaaagaaggaggagcggaacgaggagggagggaaggacagcaagagagaaacaaaggggaacgcacggagataagcgaggagatagacaggggcagaaagagaggagaagcgaaggaagagagacaaggaagcaaagagagaagaagaggtgcgtgtca

SEQ ID NO: 456692 - DNA, 7774 bp, Homo sapiens
ataatcagtggatgaaaggattttctcagacccttttttccgtgcttctggaggattaatccactacagtctgcaatttcagtggaaactgcaaggcacacgatgtggcaggagccgggagcgacttccgaattgttgtggacccttcctgtagcataggggagttttcacacttgcctccactcctccccttccccccaactccctccttctgatctcttctttttaatctgttcccattttccgagttaagttctatttccaaaactgttctctggagctataagtggattgccagaaatgagagattaggagctgggagaagaggaagcgccttgtgttgtgtctcctggaggctgccgacatgaagtgctttttcccggtgctgagctgtctggctgtgctgggtgtggtgtcagcacagcggcaggtcaccgttcaggaaggacccttgtaccgcacggagggctcccacatcactatctggtgcaatgtgagtggctaccagggaccttctgagcagaatttccagtggtccatttacctgccttcgtcgccagagcgagaggtgcagatcgtcagcaccatggactcttccttcccctatgccatctacacccagcgcgtccgcggagggaagatcttcatagaaagagtccaggggaactcaaccctattgcacatcacagatcttcaggcccgggatgccggggagtatgaatgccacacacccagcactgataagcaatactttgggagttacagtgcaaagatgaacctagtggtgatcccagactccctgcagaccactgccatgccccagactctgcacagagtggagcaggacccgctggagctcacttgtgaggtggcctcagagaccattcagcacagccacctgtctgtggcctggctccggcagaaagttggcgagaagcccgtggaggtcatctccctgagccgagatttcatgcttcactccagcagcgaatatgcccagaggcagagcctgggggaggtgcggctggacaagctggggaggaccaccttccgcctcaccatcttccacctgcagccttctgaccagggcgaattctactgcgaggccgccgagtggatccaggatccggatgggtcgtggtatgctatgacccgaaagcgttccgagggagccgtggtcaacgtccagccaactgacaaagaattcactgttcggctggagacagagaagcggctgcacacggtgggcgagccggtggagttcagatgcatcctggaggctcagaatgttcccgaccgttactttgctgtctcctgggccttcaacagctcgctcatcgccaccatgggtcctaacgctgtgcctgtcctcaacagcgaatttgctcaccgggaagccaggggacagcttaaggtggccaaagagagcgacagtgtctttgtgctgaagatctaccacctccgccaggaagatagcgggaaatacaactgccgggtgactgagcgagagaaaaccgtgaccggggaattcattgataaggagagcaagcgtcccaagaacatccccatcatagtcctccccctcaagagcagcatctccgtggaggtggccagcaatgccagcgtcatccttgagggcgaggacctgcgcttctcctgcagtgtccgcacggcaggcaggccgcagggtcgcttctctgtcatctggcagcttgtggacaggcagaaccgccgcagcaatatcatgtggctagaccgggatggcaccgtgcagccaggctcgtcctactgggagcgcagcagctttgggggcgtccagatggagcaggtgcagcccaactcgttcagcctgggcatcttcaacagcaggaaggaggacgagggccagtatgaatgccatgtgactgaatgggtgcgggcagtggatggcgagtggcagattgttggggagcgccgggccagcactcccatctccatcacagctcttgaaatgggcttcgcagtcacagccatctcccggacaccgggggtgacctacagcgactcctttgacttgcagtgtatcatcaaaccccactaccctgcctgggtccccgtgtcggtgacatggcggttccagccggtgggcacggtggagttccatgacttggtgaccttcacccgggacggaggggtccagtggggggacaggtcctccagcttccgaacccgaactgccatcgagaaggctgagtccagcaacaacgtccgcctaagcatcagccgagccagtgacacggaagcaggcaagtaccagtgtgtggcagagctgtggcggaagaactacaacaacacctggacgcgactggcggagaggacctccaacctgctggagatcagggtgctgcagccagtgacaaagctgcaggtgagcaaatcgaagaggaccctcaccctggtggaaaacaagcccattcagttgaactgctcagtcaagtctcagactagccagaactcccactttgcggtgctctggtatgtccacaagccctcggatgccgatggcaagcttatcctgaagaccacccacaactccgcctttgaatacggtacttacgccgaggaggagggcctgagagccaggctccagtttgagaggcatgtgtcggggggcctgttcagcctcaccgtccagagagccgaggtcagcgacagcggcagctactactgccacgtggaggagtggctgctgagccccaactacgcctggtacaagctggcagaggaggtttctgggcgcacagaagtcactgtgaaacagccagacagccgcctgaggctcagccaagcccaggggaacctgtcggttctggagacccggcaggtacagctggagtgtgtggttctcaaccgcaccagcataacctcccagctcatggtggaatggtttgtatggaagcccaaccaccctgagcgggagactgtggcccgcttgagccgtgacgccaccttccactatggagagcaggcagccaagaacaatctgaaggggcggctgcatttggagagtccttcccccggcgtgtaccgtctcttcatccagaacgtggctgtgcaggacagcgggacctacagctgccatgtggaggagtggctgcccagccccagtggcatgtggtataagcgggcagaggacaccgctgggcagacagctctgacagtcatgcgaccagatgcttccctgcaggtggacacagtggtccccaatgccacggtctctgagaaggcagctttccagctggactgtagcatcgtgtcccgctccagccaggactcccgcttcgctgtggcctggtattccctgaggactaaagctggggggaaaaggagcagccctggcctggaagaacaggaagaggaaagggaggaggaggaggaggaggacgacgacgacgacgacgacccaacagagcggacggccctgctgagcgtgggcccagatgctgtctttggcccagagggcagtccttgggagggcaggcttcgcttccagaggctctccccggtgctctaccggctcacagtgctgcaggcaagcccccaagatacaggcaattactcctgccatgtggaggagtggctgcccagccctcagaaggaatggtaccggctgacggaggaggagtcagcccccatcggcatccgtgttctagatacaagtcccaccctccagtccatcatctgctccaacgacgcactcttctacttcgtcttcttctaccctttccccatctttggcattcttatcatcaccatccttctggtgcgtttcaagagccggaactccagcaagaactctgatgggaagaatggggtgcctctgctgtggatcaaagagccacacctcaactactcccctacttgcctggagccccctgttctcagtatccatccaggggccatagactaagcgggtgatgccccagcggatgttggccacggaggagctgaggctctccctttctctgtgattggacagttgacagcacccaaactctggggtgcatgtgtgtggaaagttgtcagacttgaaaagtgttccaagttcccagtcagtcacagagacagactgcctctcggtggcagtcttggttggttagctatttgcgcgcaaatgttgtgatcctgccattatagatttcttgtttctgtttttagtaatgtagtgagtagctccaggtgccacatctactcacagatttatctagtattctcagatagatgttacagggcttcttattctttgtaatgtactctttttaaatccctttagtttaccctttttggattccttaatgtggacgaatttctcttacgtacaactgacagcaaaaggaagggcgaactttctagtgacaaggaatctcttccaagactttgtttttgcacatttgaaaatgccacccatggatcaaaatatacccaaacgttttttactttcttaacaagacttaagaattgtgtgtagtgtgggcaaaatttgtatgttgtcttttccctcagctggagttattggaaccactttgtagtcaagacgaaagcactgaattttgcttcaaagaactgtgtatgtacaagagaaatcctgcataaccccattaggagtagatggtgcccggcctatctgtcagggaggcaaaaaaggcttcatcccatccttgccaaaaaataagaaaactgtcttggagaatgggtcagaagccccaaacggcacacactttccaaattaaagtgggcaggggctgcttttagcagctgctgacctgcagatttgtcaaagccagtgactagagaaggaagggagaaaggctggctgttggcttgctctgagctgcaaggatggtctctaactgattaactgtgagcaggtgggcctgtgtcttcaggtgctttgccaaactcttaaaagaaagtgtccagtgaacttggaagtgggcccctgagctgagcacagggccaaagcagccatggcagacacctgacggagggcacggggctggctgacactaagtttggtgggacagtgaggggtgggaggggggtttccagggcctggtgttggagagtgcagagaaatatctacctccctggaggtgtgaagactaggtttttcttcttccttccaattagattttccttaattatagtgatgtcttccttattcatttttctctccctgcctctcactgccataagaatatcagcctgggggcagtccagacgcagccctttgtcatcctttctgtttgcctagtctcagcagactgtgatcacaaggcattgtctgtgggatttttcctttccctttcttgatctctcttgtggttctaggttgtttggttgttcattgttatggtggctttttattttaacgccccttgagccccatgatggctggtgtcaccctgttcttttacactgttgggccaggtgctgcttgtccttcttagggcatcatcaattgcaaatatttccttttgctccctttatgaagatgttcttatacccttgctttcccatatttttctggccaagcatgccatctcctttactctgggaacttacatcctgaatcccaagagggggtcacagtttggaaaaagtcatcagggattctggaactaagtctgataaaagattccagtgaagccctgttctgagaacgagcagactgcaggggaggccatgggattccccaggccagtgtctgtgctgatccttcaagggtctgcaggtatgcaggtggcctgggctgctcggcagatactttgctgattcccagctgaggggagcatggtggcgattgctcagccattttctgacagacacacagacctgccttttctcccccaagtataccgtaccctcctgtgagacagtgtgtgcaggcaccaccaccttaatcctgctgttgcctgacatgctgattctcatttattatgctgcatcaacacattagaggtacaggagcggctcagtcatgaaaaaagaaggtcttttgccccatttctttatttcagagatgtgggctttcagtgggaatttgctgactcctactttataggctgagtcaatgagggaagatgactggcgtttcctctgtctaaatgggaggttgccagagcgctggctgggactaggatgtgtaactaagatttcagtttgaaatcttagatttcagttcacggcgataaagaagtaggtgctgcacacaaatatgtaaagcaattgtaggaaatttgaaaggaaaaaaagaaaccgaagccagtattttaataattgctttttctgtgtattttgtattgggctgggggatagcatcaaaggttgaactttttgagctttctatgaaaaaccccaggaccttctttctttggccatttctatggaaatgcgatgtcagatggatggtaatggtgccctccagtggctgtgagacctcattgcgcattgtctactggagctttagtcttctgagacggaggaaaactgctgaatactctggattcatctatgtctacaatgttgcatttatgaaaaactacactgtgctaggcgcattctaggacatgaatatgaccacaccctctttcaccgggtgtttctgtagcaagttttcatattcttttcaaacaatggtttctctgcgttaattattgaggaaaaaaaaagatggggtaagaaaactacccatgcatgatgtagagagctgttgatttgtttctgtttttttaaaggaaaactatttgtaagatgttgcactaaaacattttatatacacttcagagacctgtagtaaattatgttgaaaataaaaaaaaaaaaaaaaaaaaaaaaaaaaaaacaaaaaaaaaaacaaacaaaaaaacaaaaaaagaaaaaacacaaaaaaaaaaaaaaacaaaaaaaaacgaaaaaaaaaaaaaaacacaaaaacaagggcggggggcggagagaaaggagagggggggaggagacggaagagagaaggagaggggggaggagagagggggaccggcagggggagggagataaaaggagagggcggggggcagacagaaagacgaagaggaaggaggggagagagagagaggcgagaaagatagaggaggcggaagaccgcaaaggaaaagggaggagggtgaactggaggagagaaggaacgaaagacacagaaagcagaagcgagacgggacagaggggccagagggaggaggatgggaatggagacaagagcgaaggaggggaaggaggggcaggtggaggtgaagtggatggaatgatgagagagagggagagcaggaagggggggcagggaagaggaagagcaacgagagcacagaagacaaaggaaagagccagaagaggaaaacaacggaaggagggggggggaaggcgaaagagaagagagaggagagaacagaaggaggcggggaaagggagaggccgaaagcaaggagaagaggaagagagaaggcgaagagggaaagaaaagaagaggaaggaaggagagaaagaaaagagaaaaacggggaagggcggaaacaaagagggagaggaaaactagcagagacgacaaagaaggaggagcggaacgaggagggagggaaggacagcaagagagaaacaaaggggaacgcacggagataagcgaggagatagacaggggcagaaagagaggagaagcgaaggaagagagacaaggaagcaaagagagaagaagaggtgcgtgtca

SEQ ID NO: 456693 - DNA, 6971 bp, Homo sapiens
agagtctggggcatggcagtggtctgcacagagtggagcaggacccgctggagctcacttgtgaggtggcctcagagaccattcagcacagccacctgtctgtggcctggctccggcagaaagttggcgagaagcccgtggaggtcatctccctgagccgagatttcatgcttcactccagcagcgaatatgcccagaggcagagcctgggggaggtgcggctggacaagctggggaggaccaccttccgcctcaccatcttccacctgcagccttctgaccagggcgaattctactgcgaggccgccgagtggatccaggatccggatgggtcgtggtatgctatgacccgaaagcgttccgagggagccgtggtcaacgtccagccaactgacaaagaattcactgttcggctggagacagagaagcggctgcacacggtgggcgagccggtggagttcagatgcatcctggaggctcagaatgttcccgaccgttactttgctgtctcctgggccttcaacagctcgctcatcgccaccatgggtcctaacgctgtgcctgtcctcaacagcgaatttgctcaccgggaagccaggggacagcttaaggtggccaaagagagcgacagtgtctttgtgctgaagatctaccacctccgccaggaagatagcgggaaatacaactgccgggtgactgagcgagagaaaaccgtgaccggggaattcattgataaggagagcaagcgtcccaagaacatccccatcatagtcctccccctcaagagcagcatctccgtggaggtggccagcaatgccagcgtcatccttgagggcgaggacctgcgcttctcctgcagtgtccgcacggcaggcaggccgcagggtcgcttctctgtcatctggcagcttgtggacaggcagaaccgccgcagcaatatcatgtggctagaccgggatggcaccgtgcagccaggctcgtcctactgggagcgcagcagctttgggggcgtccagatggagcaggtgcagcccaactcgttcagcctgggcatcttcaacagcaggaaggaggacgagggccagtatgaatgccatgtgactgaatgggtgcgggcagtggatggcgagtggcagattgttggggagcgccgggccagcactcccatctccatcacagctcttgaaatgggcttcgcagtcacagccatctcccggacaccgggggtgacctacagcgactcctttgacttgcagtgtatcatcaaaccccactaccctgcctgggtccccgtgtcggtgacatggcggttccagccggtgggcacggtggagttccatgacttggtgaccttcacccgggacggaggggtccagtggggggacaggtcctccagcttccgaacccgaactgccatcgagaaggctgagtccagcaacaacgtccgcctaagcatcagccgagccagtgacacggaagcaggcaagtaccagtgtgtggcagagctgtggcggaagaactacaacaacacctggacgcgactggcggagaggacctccaacctgctggagatcagggtgctgcagccagtgacaaagctgcaggtgagcaaatcgaagaggaccctcaccctggtggaaaacaagcccattcagttgaactgctcagtcaagtctcagactagccagaactcccactttgcggtgctctggtatgtccacaagccctcggatgccgatggcaagcttatcctgaagaccacccacaactccgcctttgaatacggtacttacgccgaggaggagggcctgagagccaggctccagtttgagaggcatgtgtcggggggcctgttcagcctcaccgtccagagagccgaggtcagcgacagcggcagctactactgccacgtggaggagtggctgctgagccccaactacgcctggtacaagctggcagaggaggtttctgggcgcacagaagtcactgtgaaacagccagacagccgcctgaggctcagccaagcccaggggaacctgtcggttctggagacccggcaggtacagctggagtgtgtggttctcaaccgcaccagcataacctcccagctcatggtggaatggtttgtatggaagcccaaccaccctgagcgggagactgtggcccgcttgagccgtgacgccaccttccactatggagagcaggcagccaagaacaatctgaaggggcggctgcatttggagagtccttcccccggcgtgtaccgtctcttcatccagaacgtggctgtgcaggacagcgggacctacagctgccatgtggaggagtggctgcccagccccagtggcatgtggtataagcgggcagaggacaccgctgggcagacagctctgacagtcatgcgaccagatgcttccctgcaggtggacacagtggtccccaatgccacggtctctgagaaggcagctttccagctggactgtagcatcgtgtcccgctccagccaggactcccgcttcgctgtggcctggtattccctgaggactaaagctggggggaaaaggagcagccctggcctggaagaacaggaagaggaaagggaggaggaggaggaggaggacgacgacgacgacgacgacccaacagagcggacggccctgctgagcgtgggcccagatgctgtctttggcccagagggcagtccttgggagggcaggcttcgcttccagaggctctccccggtgctctaccggctcacagtgctgcaggcaagcccccaagatacaggcaattactcctgccatgtggaggagtggctgcccagccctcagaaggaatggtaccggctgacggaggaggagtcagcccccatcggcatccgtgttctagatacaagtcccaccctccagtccatcatctgctccaacgacgcactcttctacttcgtcttcttctaccctttccccatctttggcattcttatcatcaccatccttctggtgcgtttcaagagccggaactccagcaagaactctgatgggaagaatggggtgcctctgctgtggatcaaagagccacacctcaactactcccctacttgcctggagccccctgttctcagtatccatccaggggccatagactaagcgggtgatgccccagcggatgttggccacggaggagctgaggctctccctttctctgtgattggacagttgacagcacccaaactctggggtgcatgtgtgtggaaagttgtcagacttgaaaagtgttccaagttcccagtcagtcacagagacagactgcctctcggtggcagtcttggttggttagctatttgcgcgcaaatgttgtgatcctgccattatagatttcttgtttctgtttttagtaatgtagtgagtagctccaggtgccacatctactcacagatttatctagtattctcagatagatgttacagggcttcttattctttgtaatgtactctttttaaatccctttagtttaccctttttggattccttaatgtggacgaatttctcttacgtacaactgacagcaaaaggaagggcgaactttctagtgacaaggaatctcttccaagactttgtttttgcacatttgaaaatgccacccatggatcaaaatatacccaaacgttttttactttcttaacaagacttaagaattgtgtgtagtgtgggcaaaatttgtatgttgtcttttccctcagctggagttattggaaccactttgtagtcaagacgaaagcactgaattttgcttcaaagaactgtgtatgtacaagagaaatcctgcataaccccattaggagtagatggtgcccggcctatctgtcagggaggcaaaaaaggcttcatcccatccttgccaaaaaataagaaaactgtcttggagaatgggtcagaagccccaaacggcacacactttccaaattaaagtgggcaggggctgcttttagcagctgctgacctgcagatttgtcaaagccagtgactagagaaggaagggagaaaggctggctgttggcttgctctgagctgcaaggatggtctctaactgattaactgtgagcaggtgggcctgtgtcttcaggtgctttgccaaactcttaaaagaaagtgtccagtgaacttggaagtgggcccctgagctgagcacagggccaaagcagccatggcagacacctgacggagggcacggggctggctgacactaagtttggtgggacagtgaggggtgggaggggggtttccagggcctggtgttggagagtgcagagaaatatctacctccctggaggtgtgaagactaggtttttcttcttccttccaattagattttccttaattatagtgatgtcttccttattcatttttctctccctgcctctcactgccataagaatatcagcctgggggcagtccagacgcagccctttgtcatcctttctgtttgcctagtctcagcagactgtgatcacaaggcattgtctgtgggatttttcctttccctttcttgatctctcttgtggttctaggttgtttggttgttcattgttatggtggctttttattttaacgccccttgagccccatgatggctggtgtcaccctgttcttttacactgttgggccaggtgctgcttgtccttcttagggcatcatcaattgcaaatatttccttttgctccctttatgaagatgttcttatacccttgctttcccatatttttctggccaagcatgccatctcctttactctgggaacttacatcctgaatcccaagagggggtcacagtttggaaaaagtcatcagggattctggaactaagtctgataaaagattccagtgaagccctgttctgagaacgagcagactgcaggggaggccatgggattccccaggccagtgtctgtgctgatccttcaagggtctgcaggtatgcaggtggcctgggctgctcggcagatactttgctgattcccagctgaggggagcatggtggcgattgctcagccattttctgacagacacacagacctgccttttctcccccaagtataccgtaccctcctgtgagacagtgtgtgcaggcaccaccaccttaatcctgctgttgcctgacatgctgattctcatttattatgctgcatcaacacattagaggtacaggagcggctcagtcatgaaaaaagaaggtcttttgccccatttctttatttcagagatgtgggctttcagtgggaatttgctgactcctactttataggctgagtcaatgagggaagatgactggcgtttcctctgtctaaatgggaggttgccagagcgctggctgggactaggatgtgtaactaagatttcagtttgaaatcttagatttcagttcacggcgataaagaagtaggtgctgcacacaaatatgtaaagcaattgtaggaaatttgaaaggaaaaaaagaaaccgaagccagtattttaataattgctttttctgtgtattttgtattgggctgggggatagcatcaaaggttgaactttttgagctttctatgaaaaaccccaggaccttctttctttggccatttctatggaaatgcgatgtcagatggatggtaatggtgccctccagtggctgtgagacctcattgcgcattgtctactggagctttagtcttctgagacggaggaaaactgctgaatactctggattcatctatgtctacaatgttgcatttatgaaaaactacactgtgctaggcgcattctaggacatgaatatgaccacaccctctttcaccgggtgtttctgtagcaagttttcatattcttttcaaacaatggtttctctgcgttaattattgaggaaaaaaaaagatggggtaagaaaactacccatgcatgatgtagagagctgttgatttgtttctgtttttttaaaggaaaactatttgtaagatgttgcactaaaacattttatatacacttcagagacctgtagtaaattatgttgaaaataaaaaaaaaaaaaaaaaaaaaaaaaaaaaaacaaaaaaaaaaacaaacaaaaaaacaaaaaaagaaaaaacacaaaaaaaaaaaaaaacaaaaaaaaacgaaaaaaaaaaaaaaacacaaaaacaagggcggggggcggagagaaaggagagggggggaggagacggaagagagaaggagaggggggaggagagagggggaccggcagggggagggagataaaaggagagggcggggggcagacagaaagacgaagaggaaggaggggagagagagagaggcgagaaagatagaggaggcggaagaccgcaaaggaaaagggaggagggtgaactggaggagagaaggaacgaaagacacagaaagcagaagcgagacgggacagaggggccagagggaggaggatgggaatggagacaagagcgaaggaggggaaggaggggcaggtggaggtgaagtggatggaatgatgagagagagggagagcaggaagggggggcagggaagaggaagagcaacgagagcacagaagacaaaggaaagagccagaagaggaaaacaacggaaggagggggggggaaggcgaaagagaagagagaggagagaacagaaggaggcggggaaagggagaggccgaaagcaaggagaagaggaagagagaaggcgaagagggaaagaaaagaagaggaaggaaggagagaaagaaaagagaaaaacggggaagggcggaaacaaagagggagaggaaaactagcagagacgacaaagaaggaggagcggaacgaggagggagggaaggacagcaagagagaaacaaaggggaacgcacggagataagcgaggagatagacaggggcagaaagagaggagaagcgaaggaagagagacaaggaagcaaagagagaagaagaggtgcgtgtca

SEQ ID NO: 456694 - DNA, 5049 bp, Homo sapiens
ataatcagtggatgaaaggattttctcagacccttttttccgtgcttctggaggattaatccactacagtctgcaatttcagtggaaactgcaaggcacacgatgtggcaggagccgggagcgacttccgaattgttgtggacccttcctgtagcataggggagttttcacacttgcctccactcctccccttccccccaactccctccttctgatctcttctttttaatctgttcccattttccgagttaagttctatttccaaaactgttctctggagctataagtggattgccagaaatgagagattaggagctgggagaagaggaagcgccttgtgttgtgtctcctggaggctgccgacatgaagtgctttttcccggtgctgagctgtctggctgtgctgggtgtggtgtcagcacagcggcaggtcaccgttcaggaaggacccttgtaccgcacggagggctcccacatcactatctggtgcaatgtgagtggctaccagggaccttctgagcagaatttccagtggtccatttacctgccttcgtcgccagagcgagaggtgcagatcgtcagcaccatggactcttccttcccctatgccatctacacccagcgcgtccgcggagggaagatcttcatagaaagagtccaggggaactcaaccctattgcacatcacagatcttcaggcccgggatgccggggagtatgaatgccacacacccagcactgataagcaatactttgggagttacagtgcaaagatgaacctagtggtgatcccagactccctgcagaccactgccatgccccagactctgcacagagtggagcaggacccgctggagctcacttgtgaggtggcctcagagaccattcagcacagccacctgtctgtggcctggctccggcagaaagttggcgagaagcccgtggaggtcatctccctgagccgagatttcatgcttcactccagcagcgaatatgcccagaggcagagcctgggggaggtgcggctggacaagctggggaggaccaccttccgcctcaccatcttccacctgcagccttctgaccagggcgaattctactgcgaggccgccgagtggatccaggatccggatgggtcgtggtatgctatgacccgaaagcgttccgagggagccgtggtcaacgtccagccaactgacaaagaattcactgttcggctggagacagagaagcggctgcacacggtgggcgagccggtggagttcagatgcatcctggaggctcagaatgttcccgaccgttactttgctgtctcctgggccttcaacagctcgctcatcgccaccatgggtcctaacgctgtgcctgtcctcaacagcgaatttgctcaccgggaagccaggggacagcttaaggtggccaaagagagcgacagtgtctttgtgctgaagatctaccacctccgccaggaagatagcgggaaatacaactgccgggtgactgagcgagagaaaaccgtgaccggggaattcattgataaggagagcaagcgtcccaagaacatccccatcatagtcctccccctcacagataactgggtagttaaagtcccccagcaccaccagctcctgtcccaaggccacttggagagcagcatctccgtggaggtggccagcaatgccagcgtcatccttgagggcgaggacctgcgcttctcctgcagtgtccgcacggcaggcaggccgcagggtcgcttctctgtcatctggcagcttgtggacaggcagaaccgccgcagcaatatcatgtggctagaccgggatggcaccgtgcagccaggctcgtcctactgggagcgcagcagctttgggggcgtccagatggagcaggtgcagcccaactcgttcagcctgggcatcttcaacagcaggaaggaggacgagggccagtatgaatgccatgtgactgaatgggtgcgggcagtggatggcgagtggcagattgttggggagcgccgggccagcactcccatctccatcacagctcttgaaatgggcttcgcagtcacagccatctcccggacaccgggggtgacctacagcgactcctttgacttgcagtgtatcatcaaaccccactaccctgcctgggtccccgtgtcggtgacatggcggttccagccggtgggcacggtggagttccatgacttggtgaccttcacccgggacggaggggtccagtggggggacaggtcctccagcttccgaacccgaactgccatcgagaaggctgagtccagcaacaacgtccgcctaagcatcagccgagccagtgacacggaagcaggcaagtaccagtgtgtggcagagctgtggcggaagaactacaacaacacctggacgcgactggcggagaggacctccaacctgctggagatcagggtgctgcagccagtgacaaagctgcaggtgagcaaatcgaagaggaccctcaccctggtggaaaacaagcccattcagttgaactgctcagtcaagtctcagactagccagaactcccactttgcggtgctctggtatgtccacaagccctcggatgccgatggcaagcttatcctgaagaccacccacaactccgcctttgaatacggtacttacgccgaggaggagggcctgagagccaggctccagtttgagaggcatgtgtcggggggcctgttcagcctcaccgtccagagagccgaggtcagcgacagcggcagctactactgccacgtggaggagtggctgctgagccccaactacgcctggtacaagctggcagaggaggtttctgggcgcacagaagtcactgtgaaacagccagacagccgcctgaggctcagccaagcccaggggaacctgtcggttctggagacccggcaggtacagctggagtgtgtggttctcaaccgcaccagcataacctcccagctcatggtggaatggtttgtatggaagcccaaccaccctgagcgggagactgtggcccgcttgagccgtgacgccaccttccactatggagagcaggcagccaagaacaatctgaaggggcggctgcatttggagagtccttcccccggcgtgtaccgtctcttcatccagaacgtggctgtgcaggacagcgggacctacagctgccatgtggaggagtggctgcccagccccagtggcatgtggtataagcgggcagaggacaccgctgggcagacagctctgacagtcatgcgaccagatgcttccctgcaggtggacacagtggtccccaatgccacggtctctgagaaggcagctttccagctggactgtagcatcgtgtcccgctccagccaggactcccgcttcgctgtggcctggtattccctgaggactaaagctggggggaaaaggagcagccctggcctggaagaacaggaagaggaaagggaggaggaggaggaggaggacgacgacgacgacgacgacccaacagagcggacggccctgctgagcgtgggcccagatgctgtctttggcccagagggcagtccttgggagggcaggcttcgcttccagaggctctccccggtgctctaccggctcacagtgctgcaggcaagcccccaagatacaggcaattactcctgccatgtggaggagtggctgcccagccctcagaaggaatggtaccggctgacggaggaggagtcagcccccatcggcatccgtgttctagatacaagtcccaccctccagtccatcatctgctccaacgacgcactcttctacttcgtcttcttctaccctttccccatctttggcattcttatcatcaccatccttctggtgcgtttcaagagccggaactccagcaagaactctgatgggaagaatggggtgcctctgctgtggatcaaagagccacacctcaactactcccctacttgcctggagccccctgttctcagtatccatccaggggccatagactaagcgggtgatgccccagcggatgttggccacggaggagctgaggctctccctttctctgtgattggacagttgacagcacccaaactctggggtgcatgtgtgtggaaagttgtcagacttgaaaagtgttccaagttcccagtcagtcacagagacagactgcctctcggtggcagtcttggttggttagctatttgcgcgcaaatgttgtgatcctgccattatagatttcttgtttctgtttttagtaatgtagtgagtagctccaggtgccacatctactcacagatttatctagtattctcagatagatgttacagggcttcttattctttgtaatgtactctttttaaatccctttagtttaccctttttggattccttaatgtggacgaatttctcttacgtacaactgacagcaaaaggaagggcgaactttctagtgacaaggaatctcttccaagactttgtttttgcacatttgaaaatgccacccatggatcaaaatatacccaaacgttttttactttcttaacaagacttaagaattgtgtgtagtgtgggcaaaatttgtatgttgtcttttccctcagctggagttattggaaccactttgtagtcaagacgaaagcactgaattttgcttcaaagaactgtgtatgtacaagagaaatcctgcataaccccattaggagtagatggtgcccggcctatctgtcagggaggcaaaaaaggcttcatcccatccttgccaaaaaataagaaaactgtcttggagaatgggtcagaagccccaaacggcacacactttccaaattaaagtgggcaggggctgcttttagcagctgctgacctgcagatttgtcaaagccagtgactagagaaggaagggagaatgttttgtggaccactttggttttcttttttgcgtgtggcagttttaagttattagtttttaaaatcagtactttttaatggaaacaacttgaccaaaaatttgtcacagaattttgagacccattaaaaaagttaaatgagaa

SEQ ID NO: 456695 - DNA, 7114 bp, Homo sapiens
ataatcagtggatgaaaggattttctcagacccttttttccgtgcttctggaggattaatccactacagtctgcaatttcagtggaaactgcaaggcacacgatgtggcaggagccgggagcgacttccgaattgttgtggacccttcctgtagcataggggagttttcacacttgcctccactcctccccttccccccaactccctccttctgatctcttctttttaatctgttcccattttccgagttaagttctatttccaaaactgttctctggagctataagtggattgccagaaatgagagattaggagctgggagaagaggaagcgccttgtgttgtgtctcctggaggctgccgacatgaagtgctttttcccggtgctgagctgtctggctgtgctgggtgtggtgtcagcacagcggcaggtcaccgttcaggaaggacccttgtaccgcacggagggctcccacatcactatctggtgcaatgtgagtggctaccagggaccttctgagcagaatttccagtggtccatttacctgccttcgtcgccagagcgagaggtgcagatcgtcagcaccatggactcttccttcccctatgccatctacacccagcgcgtccgcggagggaagatcttcatagaaagagtccaggggaactcaaccctattgcacatcacagatcttcaggcccgggatgccggggagtatgaatgccacacacccagcactgataagcaatactttgggagttacagtgcaaagatgaacctagtggtgatcccagactccctgcagaccactgccatgccccagactctgcacagagtggagcaggacccgctggagctcacttgtgaggtggcctcagagaccattcagcacagccacctgtctgtggcctggctccggcagaaagttggcgagaagcccgtggaggtcatctccctgagccgagatttcatgcttcactccagcagcgaatatgcccagaggcagagcctgggggaggtgcggctggacaagctggggaggaccaccttccgcctcaccatcttccacctgcagccttctgaccagggcgaattctactgcgaggccgccgagtggatccaggatccggatgggtcgtggtatgctatgacccgaaagcgttccgagggagccgtggtcaacgtccagccaactgacaaagaattcactgttcggctggagacagagaagcggctgcacacggtgggcgagccggtggagttcagatgcatcctggaggctcagaatgttcccgaccgttactttgctgtctcctgggccttcaacagctcgctcatcgccaccatgggtcctaacgctgtgcctgtcctcaacagcgaatttgctcaccgggaagccaggggacagcttaaggtggccaaagagagcgacagtgtctttgtgctgaagatctaccacctccgccaggaagatagcgggaaatacaactgccgggtgactgagcgagagaaaaccgtgaccggggaattcattgataaggagagcaagcgtcccaagaacatccccatcatagtcctccccctcacagataactgggtagttaaagtcccccagcaccaccagctcctgtcccaaggccacttggagagcagcatctccgtggaggtggccagcaatgccagcgtcatccttgagggcgaggacctgcgcttctcctgcagtgtccgcacggcaggcaggccgcagggtcgcttctctgtcatctggcagcttgtggacaggcagaaccgccgcagcaatatcatgtggctagaccgggatggcaccgtgcagccaggctcgtcctactgggagcgcagcagctttgggggcgtccagatggagcaggtgcagcccaactcgttcagcctgggcatcttcaacagcaggaaggaggacgagggccagtatgaatgccatgtgactgaatgggtgcgggcagtggatggcgagtggcagattgttggggagcgccgggccagcactcccatctccatcacagctcttgaaatgggcttcgcagtcacagccatctcccggacaccgggggtgacctacagcgactcctttgacttgcagtgtatcatcaaaccccactaccctgcctgggtccccgtgtcggtgacatggcggttccagccggtgggcacggtggagttccatgacttggtgaccttcacccgggacggaggggtccagtggggggacaggtcctccagcttccgaacccgaactgccatcgagaaggctgagtccagcaacaacgtccgcctaagcatcagccgagccagtgacacggaagcaggcaagtaccagtgtgtggcagagctgtggcggaagaactacaacaacacctggacgcgactggcggagaggacctccaacctgctggagatcagggtgctgcagccagtgacaaagctgcaggtgagcaaatcgaagaggaccctcaccctggtggaaaacaagcccattcagttgaactgctcagtcaagtctcagactagccagaactcccactttgcggtgctctggtatgtccacaagccctcggatgccgatggcaagcttatcctgaagaccacccacaactccgcctttgaatacggtacttacgccgaggaggagggcctgagagccaggctccagtttgagaggcatgtgtcggggggcctgttcagcctcaccgtccagagagccgaggtcagcgacagcggcagctactactgccacgtggaggagtggctgctgagccccaactacgcctggtacaagctggcagaggaggtttctgggcgcacagaagtcactgtgaaacagccagacagccgcctgaggctcagccaagcccaggggaacctgtcggttctggagacccggcaggtacagctggagtgtgtggttctcaaccgcaccagcataacctcccagctcatggtggaatggtttgtatggaagcccaaccaccctgagcgggagactgtggcccgcttgagccgtgacgccaccttccactatggagagcaggcagccaagaacaatctgaaggggcggctgcatttggagagtccttcccccggcgtgtaccgtctcttcatccagaacgtggctgtgcaggacagcgggacctacagctgccatgtggaggagtggctgcccagccccagtggcatgtggtataagcgggcagaggacaccgctgggcagacagctctgacagtcatgcgaccagatgcttccctgcaggtggacacagtggtccccaatgccacggtctctgagaaggcagctttccagctggactgtagcatcgtgtcccgctccagccaggactcccgcttcgctgtggcctggtattccctgaggactaaagctggggggaaaaggagcagccctggcctggaagaacaggaagaggaaagggaggaggaggaggaggaggacgacgacgacgacgacgacccaacagagcggacggccctgctgagcgtgggcccagatgctgtctttggcccagagggcagtccttgggagggcaggcttcgcttccagaggctctccccggtgctctaccggctcacagtgctgcaggcaagcccccaagatacaggcaattactcctgccatgtggaggagtggctgcccagccctcagaaggaatggtaccggctgacggaggaggagtcagcccccatcggcatccgtgttctagatacaagtcccaccctccagtccatcatctgctccaacgacgcactcttctacttcgtcttcttctaccctttccccatctttggcattcttatcatcaccatccttctggtgcgtttcaagagccggaactccagcaagaactctgatgggaagaatggggtgcctctgctgtggatcaaagagccacacctcaactactcccctacttgcctggagccccctgttctcagtatccatccaggggccatagactaagcgggtgatgccccagcggatgttggccacggaggagctgaggctctccctttctctgtgattggacagttgacagcacccaaactctggggtgcatgtgtgtggaaagttgtcagacttgaaaagtgttccaagttcccagtcagtcacagagacagactgcctctcggtggcagtcttggttggttagctatttgcgcgcaaatgttgtgatcctgccattatagatttcttgtttctgtttttagtaatgtagtgagtagctccaggtgccacatctactcacagatttatctagtattctcagatagatgttacagggcttcttattctttgtaatgtactctttttaaatccctttagtttaccctttttggattccttaatgtggacgaatttctcttacgtacaactgacagcaaaaggaagggcgaactttctagtgacaaggaatctcttccaagactttgtttttgcacatttgaaaatgccacccatggatcaaaatatacccaaacgttttttactttcttaacaagacttaagaattgtgtgtagtgtgggcaaaatttgtatgttgtcttttccctcagctggagttattggaaccactttgtagtcaagacgaaagcactgaattttgcttcaaagaactgtgtatgtacaagagaaatcctgcataaccccattaggagtagatggtgcccggcctatctgtcagggaggcaaaaaaggcttcatcccatccttgccaaaaaataagaaaactgtcttggagaatgggtcagaagccccaaacggcacacactttccaaattaaagtgggcaggggctgcttttagcagctgctgacctgcagatttgtcaaagccagtgactagagaaggaagggagaaaggctggctgttggcttgctctgagctgcaaggatggtctctaactgattaactgtgagcaggtgggcctgtgtcttcaggtgctttgccaaactcttaaaagaaagtgtccagtgaacttggaagtgggcccctgagctgagcacagggccaaagcagccatggcagacacctgacggagggcacggggctggctgacactaagtttggtgggacagtgaggggtgggaggggggtttccagggcctggtgttggagagtgcagagaaatatctacctccctggaggtgtgaagactaggtttttcttcttccttccaattagattttccttaattatagtgatgtcttccttattcatttttctctccctgcctctcactgccataagaatatcagcctgggggcagtccagacgcagccctttgtcatcctttctgtttgcctagtctcagcagactgtgatcacaaggcattgtctgtgggatttttcctttccctttcttgatctctcttgtggttctaggttgtttggttgttcattgttatggtggctttttattttaacgccccttgagccccatgatggctggtgtcaccctgttcttttacactgttgggccaggtgctgcttgtccttcttagggcatcatcaattgcaaatatttccttttgctccctttatgaagatgttcttatacccttgctttcccatatttttctggccaagcatgccatctcctttactctgggaacttacatcctgaatcccaagagggggtcacagtttggaaaaagtcatcagggattctggaactaagtctgataaaagattccagtgaagccctgttctgagaacgagcagactgcaggggaggccatgggattccccaggccagtgtctgtgctgatccttcaagggtctgcaggtatgcaggtggcctgggctgctcggcagatactttgctgattcccagctgaggggagcatggtggcgattgctcagccattttctgacagacacacagacctgccttttctcccccaagtataccgtaccctcctgtgagacagtgtgtgcaggcaccaccaccttaatcctgctgttgcctgacatgctgattctcatttattatgctgcatcaacacattagaggtacaggagcggctcagtcatgaaaaaagaaggtcttttgccccatttctttatttcagagatgtgggctttcagtgggaatttgctgactcctactttataggctgagtcaatgagggaagatgactggcgtttcctctgtctaaatgggaggttgccagagcgctggctgggactaggatgtgtaactaagatttcagtttgaaatcttagatttcagttcacggcgataaagaagtaggtgctgcacacaaatatgtaaagcaattgtaggaaatttgaaaggaaaaaaagaaaccgaagccagtattttaataattgctttttctgtgtattttgtattgggctgggggatagcatcaaaggttgaactttttgagctttctatgaaaaaccccaggaccttctttctttggccatttctatggaaatgcgatgtcagatggatggtaatggtgccctccagtggctgtgagacctcattgcgcattgtctactggagctttagtcttctgagacggaggaaaactgctgaatactctggattcatctatgtctacaatgttgcatttatgaaaaactacactgtgctaggcgcattctaggacatgaatatgaccacaccctctttcaccgggtgtttctgtagcaagttttcatattcttttcaaacaatggtttctctgcgttaattattgaggaaaaaaaaagatggggtaagaaaactacccatgcatgatgtagagagctgttgatttgtttctgtttttttaaaggaaaactatttgtaagatgttgcactaaaacattttatatacacttcagagacctgtagtaaattatgttgaaaatacggctgtttacatttactgcagtcttctatccttctttccccttactaaccagcccccttcctctgtggaactgtgctgtgggagcctacagttctgcccttggcattggcctgctaggctcaaggtctgtgaattgcagtctttattattacaccccataaccttcaaatgataaaaacacctcttcctcaagacacttc

SEQ ID NO: 456696 - DNA, 7145 bp, Homo sapiens
ataatcagtggatgaaaggattttctcagacccttttttccgtgcttctggaggattaatccactacagtctgcaatttcagtggaaactgcaaggcacacgatgtggcaggagccgggagcgacttccgaattgttgtggacccttcctgtagcataggggagttttcacacttgcctccactcctccccttccccccaactccctccttctgatctcttctttttaatctgttcccattttccgagttaagttctatttccaaaactgttctctggagctataagtggattgccagaaatgagagattaggagctgggagaagaggaagcgccttgtgttgtgtctcctggaggctgccgacatgaagtgctttttcccggtgctgagctgtctggctgtgctgggtgtggtgtcagcacagcggcaggtcaccgttcaggaaggacccttgtaccgcacggagggctcccacatcactatctggtgcaatgtgagtggctaccagggaccttctgagcagaatttccagtggtccatttacctgccttcgtcgccagagcgagaggtgcagatcgtcagcaccatggactcttccttcccctatgccatctacacccagcgcgtccgcggagggaagatcttcatagaaagagtccaggggaactcaaccctattgcacatcacagatcttcaggcccgggatgccggggagtatgaatgccacacacccagcactgataagcaatactttgggagttacagtgcaaagatgaacctagtggtgatcccagactccctgcagaccactgccatgccccagactctgcacagagtggagcaggacccgctggagctcacttgtgaggtggcctcagagaccattcagcacagccacctgtctgtggcctggctccggcagaaagttggcgagaagcccgtggaggtcatctccctgagccgagatttcatgcttcactccagcagcgaatatgcccagaggcagagcctgggggaggtgcggctggacaagctggggaggaccaccttccgcctcaccatcttccacctgcagccttctgaccagggcgaattctactgcgaggccgccgagtggatccaggatccggatgggtcgtggtatgctatgacccgaaagcgttccgagggagccgtggtcaacgtccagccaactgacaaagaattcactgttcggctggagacagagaagcggctgcacacggtgggcgagccggtggagttcagatgcatcctggaggctcagaatgttcccgaccgttactttgctgtctcctgggccttcaacagctcgctcatcgccaccatgggtcctaacgctgtgcctgtcctcaacagcgaatttgctcaccgggaagccaggggacagcttaaggtggccaaagagagcgacagtgtctttgtgctgaagatctaccacctccgccaggaagatagcgggaaatacaactgccgggtgactgagcgagagaaaaccgtgaccggggaattcattgataaggagagcaagcgtcccaagaacatccccatcatagtcctccccctcacagataactgggtagttaaagtcccccagcaccaccagctcctgtcccaaggccacttggagagcagcatctccgtggaggtggccagcaatgccagcgtcatccttgagggcgaggacctgcgcttctcctgcagtgtccgcacggcaggcaggccgcagggtcgcttctctgtcatctggcagcttgtggacaggcagaaccgccgcagcaatatcatgtggctagaccgggatggcaccgtgcagccaggctcgtcctactgggagcgcagcagctttgggggcgtccagatggagcaggtgcagcccaactcgttcagcctgggcatcttcaacagcaggaaggaggacgagggccagtatgaatgccatgtgactgaatgggtgcgggcagtggatggcgagtggcagattgttggggagcgccgggccagcactcccatctccatcacagctcttgaaatgggcttcgcagtcacagccatctcccggacaccgggggtgacctacagcgactcctttgacttgcagtgtatcatcaaaccccactaccctgcctgggtccccgtgtcggtgacatggcggttccagccggtgggcacggtggagttccatgacttggtgaccttcacccgggacggaggggtccagtggggggacaggtcctccagcttccgaacccgaactgccatcgagaaggctgagtccagcaacaacgtccgcctaagcatcagccgagccagtgacacggaagcaggcaagtaccagtgtgtggcagagctgtggcggaagaactacaacaacacctggacgcgactggcggagaggacctccaacctgctggagatcagggtgctgcagccagtgacaaagctgcaggtgagcaaatcgaagaggaccctcaccctggtggaaaacaagcccattcagttgaactgctcagtcaagtctcagactagccagaactcccactttgcggtgctctggtatgtccacaagccctcggatgccgatggcaagcttatcctgaagaccacccacaactccgcctttgaatacggtacttacgccgaggaggagggcctgagagccaggctccagtttgagaggcatgtgtcggggggcctgttcagcctcaccgtccagagagccgaggtcagcgacagcggcagctactactgccacgtggaggagtggctgctgagccccaactacgcctggtacaagctggcagaggaggtttctgggcgcacagaagtcactgtgaaacagccagacagccgcctgaggctcagccaagcccaggggaacctgtcggttctggagacccggcaggtacagctggagtgtgtggttctcaaccgcaccagcataacctcccagctcatggtggaatggtttgtatggaagcccaaccaccctgagcgggagactgtggcccgcttgagccgtgacgccaccttccactatggagagcaggcagccaagaacaatctgaaggggcggctgcatttggagagtccttcccccggcgtgtaccgtctcttcatccagaacgtggctgtgcaggacagcgggacctacagctgccatgtggaggagtggctgcccagccccagtggcatgtggtataagcgggcagaggacaccgctgggcagacagctctgacagtcatgcgaccagatgcttccctgcaggtggacacagtggtccccaatgccacggtctctgagaaggcagctttccagctggactgtagcatcgtgtcccgctccagccaggactcccgcttcgctgtggcctggtattccctgaggactaaagctggggggaaaaggagcagccctggcctggaagaacaggaagaggaaagggaggaggaggaggaggaggacgacgacgacgacgacgacccaacagagcggacggccctgctgagcgtgggcccagatgctgtctttggcccagagggcagtccttgggagggcaggcttcgcttccagaggctctccccggtgctctaccggctcacagtgctgcaggcaagcccccaagatacaggcaattactcctgccatgtggaggagtggctgcccagccctcagaaggaatggtaccggctgacggaggaggagtcagcccccatcggcatccgtgttctagatacaagtcccaccctccagtccatcatctgctccaacgacgcactcttctacttcgtcttcttctaccctttccccatctttggcattcttatcatcaccatccttctggtgcgtttcaagagccggaactccagcaagaactctgatgggaagaatggggtgcctctgctgtggatcaaagagccacacctcaactactcccctacttgcctggagccccctgttctcagtatccatccaggggccatagactaagcgggtgatgccccagcggatgttggccacggaggagctgaggctctccctttctctgtgattggacagttgacagcacccaaactctggggtgcatgtgtgtggaaagttgtcagacttgaaaagtgttccaagttcccagtcagtcacagagacagactgcctctcggtggcagtcttggttggttagctatttgcgcgcaaatgttgtgatcctgccattatagatttcttgtttctgtttttagtaatgtagtgagtagctccaggtgccacatctactcacagatttatctagtattctcagatagatgttacagggcttcttattctttgtaatgtactctttttaaatccctttagtttaccctttttggattccttaatgtggacgaatttctcttacgtacaactgacagcaaaaggaagggcgaactttctagtgacaaggaatctcttccaagactttgtttttgcacatttgaaaatgccacccatggatcaaaatatacccaaacgttttttactttcttaacaagacttaagaattgtgtgtagtgtgggcaaaatttgtatgttgtcttttccctcagctggagttattggaaccactttgtagtcaagacgaaagcactgaattttgcttcaaagaactgtgtatgtacaagagaaatcctgcataaccccattaggagtagatggtgcccggcctatctgtcagggaggcaaaaaaggcttcatcccatccttgccaaaaaataagaaaactgtcttggagaatgggtcagaagccccaaacggcacacactttccaaattaaagtgggcaggggctgcttttagcagctgctgacctgcagatttgtcaaagccagtgactagagaaggaagggagaaaggctggctgttggcttgctctgagctgcaaggatggtctctaactgattaactgtgagcaggtgggcctgtgtcttcaggtgctttgccaaactcttaaaagaaagtgtccagtgaacttggaagtgggcccctgagctgagcacagggccaaagcagccatggcagacacctgacggagggcacggggctggctgacactaagtttggtgggacagtgaggggtgggaggggggtttccagggcctggtgttggagagtgcagagaaatatctacctccctggaggtgtgaagactaggtttttcttcttccttccaattagattttccttaattatagtgatgtcttccttattcatttttctctccctgcctctcactgccataagaatatcagcctgggggcagtccagacgcagccctttgtcatcctttctgtttgcctagtctcagcagactgtgatcacaaggcattgtctgtgggatttttcctttccctttcttgatctctcttgtggttctaggttgtttggttgttcattgttatggtggctttttattttaacgccccttgagccccatgatggctggtgtcaccctgttcttttacactgttgggccaggtgctgcttgtccttcttagggcatcatcaattgcaaatatttccttttgctccctttatgaagatgttcttatacccttgctttcccatatttttctggccaagcatgccatctcctttactctgggaacttacatcctgaatcccaagagggggtcacagtttggaaaaagtcatcagggattctggaactaagtctgataaaagattccagtgaagccctgttctgagaacgagcagactgcaggggaggccatgggattccccaggccagtgtctgtgctgatccttcaagggtctgcaggtatgcaggtggcctgggctgctcggcagatactttgctgattcccagctgaggggagcatggtggcgattgctcagccattttctgacagacacacagacctgccttttctcccccaagtataccgtaccctcctgtgagacagtgtgtgcaggcaccaccaccttaatcctgctgttgcctgacatgctgattctcatttattatgctgcatcaacacattagaggtacaggagcggctcagtcatgaaaaaagaaggtcttttgccccatttctttatttcagagatgtgggctttcagtgggaatttgctgactcctactttataggctgagtcaatgagggaagatgactggcgtttcctctgtctaaatgggaggttgccagagcgctggctgggactaggatgtgtaactaagatttcagtttgaaatcttagatttcagttcacggcgataaagaagtaggtgctgcacacaaatatgtaaagcaattgtaggaaatttgaaaggaaaaaaagaaaccgaagccagtattttaataattgctttttctgtgtattttgtattgggctgggggatagcatcaaaggttgaactttttgagctttctatgaaaaaccccaggaccttctttctttggccatttctatggaaatgcgatgtcagatggatggtaatggtgccctccagtggctgtgagacctcattgcgcattgtctactggagctttagtcttctgagacggaggaaaactgctgaatactctggattcatctatgtctacaatgttgcatttatgaaaaactacactgtgctaggcgcattctaggacatgaatatgaccacaccctctttcaccgggtgtttctgtagcaagttttcatattcttttcaaacaatggtttctctgcgttaattattgaggaaaaaaaaagatggggtaagaaaactacccatgcatgatgtagagagctgttgatttgtttctgtttttttaaaggaaaactatttgtaagatgttgcactaaaacattttatatacacttcagaaaaacaacaagagatactaccaaacaaacaacacttgttcggggcccgttggggcctcaaaaagtgtttctaaacaccattcctgttgggggcgcgggcgcgcatattgtgtatctgcaacctttggccatacgcttggtcccaagagcgaccccgggcatagaacaactgcgtggttttctcccaattagaaaacccgccgggacacccaggtcgtttgaagaaatccaagaggttcaaagggcctaaggggtttacg

SEQ ID NO: 456697 - DNA, 7246 bp, Homo sapiens
gtgaactgattaccacattcaagtacagttaacacacactgatcacggtatctagttaccatttggtgtgataacatttgagagctactctgtaagcaaatttcaagtatacaatacagtatggttaaccatagttgccatgtgctacattagacccccagaacttgacaacaatcacatcatgaacaatcacatcatgaacaatcacatcatgaacaatcacatcatggtgattgtggcaaagatgaacctagtggtgatcccagactccctgcagaccactgccatgccccagactctgcacagagtggagcaggacccgctggagctcacttgtgaggtggcctcagagaccattcagcacagccacctgtctgtggcctggctccggcagaaagttggcgagaagcccgtggaggtcatctccctgagccgagatttcatgcttcactccagcagcgaatatgcccagaggcagagcctgggggaggtgcggctggacaagctggggaggaccaccttccgcctcaccatcttccacctgcagccttctgaccagggcgaattctactgcgaggccgccgagtggatccaggatccggatgggtcgtggtatgctatgacccgaaagcgttccgagggagccgtggtcaacgtccagccaactgacaaagaattcactgttcggctggagacagagaagcggctgcacacggtgggcgagccggtggagttcagatgcatcctggaggctcagaatgttcccgaccgttactttgctgtctcctgggccttcaacagctcgctcatcgccaccatgggtcctaacgctgtgcctgtcctcaacagcgaatttgctcaccgggaagccaggggacagcttaaggtggccaaagagagcgacagtgtctttgtgctgaagatctaccacctccgccaggaagatagcgggaaatacaactgccgggtgactgagcgagagaaaaccgtgaccggggaattcattgataaggagagcaagcgtcccaagaacatccccatcatagtcctccccctcaagagcagcatctccgtggaggtggccagcaatgccagcgtcatccttgagggcgaggacctgcgcttctcctgcagtgtccgcacggcaggcaggccgcagggtcgcttctctgtcatctggcagcttgtggacaggcagaaccgccgcagcaatatcatgtggctagaccgggatggcaccgtgcagccaggctcgtcctactgggagcgcagcagctttgggggcgtccagatggagcaggtgcagcccaactcgttcagcctgggcatcttcaacagcaggaaggaggacgagggccagtatgaatgccatgtgactgaatgggtgcgggcagtggatggcgagtggcagattgttggggagcgccgggccagcactcccatctccatcacagctcttgaaatgggcttcgcagtcacagccatctcccggacaccgggggtgacctacagcgactcctttgacttgcagtgtatcatcaaaccccactaccctgcctgggtccccgtgtcggtgacatggcggttccagccggtgggcacggtggagttccatgacttggtgaccttcacccgggacggaggggtccagtggggggacaggtcctccagcttccgaacccgaactgccatcgagaaggctgagtccagcaacaacgtccgcctaagcatcagccgagccagtgacacggaagcaggcaagtaccagtgtgtggcagagctgtggcggaagaactacaacaacacctggacgcgactggcggagaggacctccaacctgctggagatcagggtgctgcagccagtgacaaagctgcaggtgagcaaatcgaagaggaccctcaccctggtggaaaacaagcccattcagttgaactgctcagtcaagtctcagactagccagaactcccactttgcggtgctctggtatgtccacaagccctcggatgccgatggcaagcttatcctgaagaccacccacaactccgcctttgaatacggtacttacgccgaggaggagggcctgagagccaggctccagtttgagaggcatgtgtcggggggcctgttcagcctcaccgtccagagagccgaggtcagcgacagcggcagctactactgccacgtggaggagtggctgctgagccccaactacgcctggtacaagctggcagaggaggtttctgggcgcacagaagtcactgtgaaacagccagacagccgcctgaggctcagccaagcccaggggaacctgtcggttctggagacccggcaggtacagctggagtgtgtggttctcaaccgcaccagcataacctcccagctcatggtggaatggtttgtatggaagcccaaccaccctgagcgggagactgtggcccgcttgagccgtgacgccaccttccactatggagagcaggcagccaagaacaatctgaaggggcggctgcatttggagagtccttcccccggcgtgtaccgtctcttcatccagaacgtggctgtgcaggacagcgggacctacagctgccatgtggaggagtggctgcccagccccagtggcatgtggtataagcgggcagaggacaccgctgggcagacagctctgacagtcatgcgaccagatgcttccctgcaggtggacacagtggtccccaatgccacggtctctgagaaggcagctttccagctggactgtagcatcgtgtcccgctccagccaggactcccgcttcgctgtggcctggtattccctgaggactaaagctggggggaaaaggagcagccctggcctggaagaacaggaagaggaaagggaggaggaggaggaggaggacgacgacgacgacgacgacccaacagagcggacggccctgctgagcgtgggcccagatgctgtctttggcccagagggcagtccttgggagggcaggcttcgcttccagaggctctccccggtgctctaccggctcacagtgctgcaggcaagcccccaagatacaggcaattactcctgccatgtggaggagtggctgcccagccctcagaaggaatggtaccggctgacggaggaggagtcagcccccatcggcatccgtgttctagatacaagtcccaccctccagtccatcatctgctccaacgacgcactcttctacttcgtcttcttctaccctttccccatctttggcattcttatcatcaccatccttctggtgcgtttcaagagccggaactccagcaagaactctgatgggaagaatggggtgcctctgctgtggatcaaagagccacacctcaactactcccctacttgcctggagccccctgttctcagtatccatccaggggccatagactaagcgggtgatgccccagcggatgttggccacggaggagctgaggctctccctttctctgtgattggacagttgacagcacccaaactctggggtgcatgtgtgtggaaagttgtcagacttgaaaagtgttccaagttcccagtcagtcacagagacagactgcctctcggtggcagtcttggttggttagctatttgcgcgcaaatgttgtgatcctgccattatagatttcttgtttctgtttttagtaatgtagtgagtagctccaggtgccacatctactcacagatttatctagtattctcagatagatgttacagggcttcttattctttgtaatgtactctttttaaatccctttagtttaccctttttggattccttaatgtggacgaatttctcttacgtacaactgacagcaaaaggaagggcgaactttctagtgacaaggaatctcttccaagactttgtttttgcacatttgaaaatgccacccatggatcaaaatatacccaaacgttttttactttcttaacaagacttaagaattgtgtgtagtgtgggcaaaatttgtatgttgtcttttccctcagctggagttattggaaccactttgtagtcaagacgaaagcactgaattttgcttcaaagaactgtgtatgtacaagagaaatcctgcataaccccattaggagtagatggtgcccggcctatctgtcagggaggcaaaaaaggcttcatcccatccttgccaaaaaataagaaaactgtcttggagaatgggtcagaagccccaaacggcacacactttccaaattaaagtgggcaggggctgcttttagcagctgctgacctgcagatttgtcaaagccagtgactagagaaggaagggagaaaggctggctgttggcttgctctgagctgcaaggatggtctctaactgattaactgtgagcaggtgggcctgtgtcttcaggtgctttgccaaactcttaaaagaaagtgtccagtgaacttggaagtgggcccctgagctgagcacagggccaaagcagccatggcagacacctgacggagggcacggggctggctgacactaagtttggtgggacagtgaggggtgggaggggggtttccagggcctggtgttggagagtgcagagaaatatctacctccctggaggtgtgaagactaggtttttcttcttccttccaattagattttccttaattatagtgatgtcttccttattcatttttctctccctgcctctcactgccataagaatatcagcctgggggcagtccagacgcagccctttgtcatcctttctgtttgcctagtctcagcagactgtgatcacaaggcattgtctgtgggatttttcctttccctttcttgatctctcttgtggttctaggttgtttggttgttcattgttatggtggctttttattttaacgccccttgagccccatgatggctggtgtcaccctgttcttttacactgttgggccaggtgctgcttgtccttcttagggcatcatcaattgcaaatatttccttttgctccctttatgaagatgttcttatacccttgctttcccatatttttctggccaagcatgccatctcctttactctgggaacttacatcctgaatcccaagagggggtcacagtttggaaaaagtcatcagggattctggaactaagtctgataaaagattccagtgaagccctgttctgagaacgagcagactgcaggggaggccatgggattccccaggccagtgtctgtgctgatccttcaagggtctgcaggtatgcaggtggcctgggctgctcggcagatactttgctgattcccagctgaggggagcatggtggcgattgctcagccattttctgacagacacacagacctgccttttctcccccaagtataccgtaccctcctgtgagacagtgtgtgcaggcaccaccaccttaatcctgctgttgcctgacatgctgattctcatttattatgctgcatcaacacattagaggtacaggagcggctcagtcatgaaaaaagaaggtcttttgccccatttctttatttcagagatgtgggctttcagtgggaatttgctgactcctactttataggctgagtcaatgagggaagatgactggcgtttcctctgtctaaatgggaggttgccagagcgctggctgggactaggatgtgtaactaagatttcagtttgaaatcttagatttcagttcacggcgataaagaagtaggtgctgcacacaaatatgtaaagcaattgtaggaaatttgaaaggaaaaaaagaaaccgaagccagtattttaataattgctttttctgtgtattttgtattgggctgggggatagcatcaaaggttgaactttttgagctttctatgaaaaaccccaggaccttctttctttggccatttctatggaaatgcgatgtcagatggatggtaatggtgccctccagtggctgtgagacctcattgcgcattgtctactggagctttagtcttctgagacggaggaaaactgctgaatactctggattcatctatgtctacaatgttgcatttatgaaaaactacactgtgctaggcgcattctaggacatgaatatgaccacaccctctttcaccgggtgtttctgtagcaagttttcatattcttttcaaacaatggtttctctgcgttaattattgaggaaaaaaaaagatggggtaagaaaactacccatgcatgatgtagagagctgttgatttgtttctgtttttttaaaggaaaactatttgtaagatgttgcactaaaacattttatatacacttcagagacctgtagtaaattatgttgaaaataaaaaaaaaaaaaaaaaaaaaaaaaaaaaaacaaaaaaaaaaacaaacaaaaaaacaaaaaaagaaaaaacacaaaaaaaaaaaaaaacaaaaaaaaacgaaaaaaaaaaaaaaacacaaaaacaagggcggggggcggagagaaaggagagggggggaggagacggaagagagaaggagaggggggaggagagagggggaccggcagggggagggagataaaaggagagggcggggggcagacagaaagacgaagaggaaggaggggagagagagagaggcgagaaagatagaggaggcggaagaccgcaaaggaaaagggaggagggtgaactggaggagagaaggaacgaaagacacagaaagcagaagcgagacgggacagaggggccagagggaggaggatgggaatggagacaagagcgaaggaggggaaggaggggcaggtggaggtgaagtggatggaatgatgagagagagggagagcaggaagggggggcagggaagaggaagagcaacgagagcacagaagacaaaggaaagagccagaagaggaaaacaacggaaggagggggggggaaggcgaaagagaagagagaggagagaacagaaggaggcggggaaagggagaggccgaaagcaaggagaagaggaagagagaaggcgaagagggaaagaaaagaagaggaaggaaggagagaaagaaaagagaaaaacggggaagggcggaaacaaagagggagaggaaaactagcagagacgacaaagaaggaggagcggaacgaggagggagggaaggacagcaagagagaaacaaaggggaacgcacggagataagcgaggagatagacaggggcagaaagagaggagaagcgaaggaagagagacaaggaagcaaagagagaagaagaggtgcgtgtca

SEQ ID NO: 456698 - DNA, 3329 bp, Homo sapiens
ataatcagtggatgaaaggattttctcagacccttttttccgtgcttctggaggattaatccactacagtctgcaatttcagtggaaactgcaaggcacacgatgtggcaggagccgggagcgacttccgaattgttgtggacccttcctgtagcataggggagttttcacacttgcctccactcctccccttccccccaactccctccttctgatctcttctttttaatctgttcccattttccgagttaagttctatttccaaaactgttctctggagctataagtggattgccagaaatgagagattaggagctgggagaagaggaagcgccttgtgttgtgtctcctggaggctgccgacatgaagtgctttttcccggtgctgagctgtctggctgtgctgggtgtggtgtcagcacagcggcaggtcaccgttcaggaaggacccttgtaccgcacggagggctcccacatcactatctggtgcaatgtgagtggctaccagggaccttctgagcagaatttccagtggtccatttacctgccttcgtcgccagagcgagaggtgcagatcgtcagcaccatggactcttccttcccctatgccatctacacccagcgcgtccgcggagggaagatcttcatagaaagagtccaggggaactcaaccctattgcacatcacagatcttcaggcccgggatgccggggagtatgaatgccacacacccagcactgataagcaatactttgggagttacagtgcaaagatgaacctagtggtgatcccagactccctgcagaccactgccatgccccagactctgcacagagtggagcaggacccgctggagctcacttgtgaggtggcctcagagaccattcagcacagccacctgtctgtggcctggctccggcagaaagttggcgagaagcccgtggaggtcatctccctgagccgagatttcatgcttcactccagcagcgaatatgcccagaggcagagcctgggggaggtgcggctggacaagctggggaggaccaccttccgcctcaccatcttccacctgcagccttctgaccagggcgaattctactgcgaggccgccgagtggatccaggatccggatgggtcgtggtatgctatgacccgaaagcgttccgagggagccgtggtcaacgtccagccaactgacaaagaattcactgttcggctggagacagagaagcggctgcacacggtgggcgagccggtggagttcagatgcatcctggaggctcagaatgttcccgaccgttactttgctgtctcctgggccttcaacagctcgctcatcgccaccatgggtcctaacgctgtgcctgtcctcaacagcgaatttgctcaccgggaagccaggggacagcttaaggtggccaaagagagcgacagtgtctttgtgctgaagatctaccacctccgccaggaagatagcgggaaatacaactgccgggtgactgagcgagagaaaaccgtgaccggggaattcattgataaggagagcaagcgtcccaagaacatccccatcatagtcctccccctcaagagcagcatctccgtggaggtggccagcaatgccagcgtcatccttgagggcgaggacctgcgcttctcctgcagtgtccgcacggcaggcaggccgcagggtcgcttctctgtcatctggcagcttgtggacaggcagaaccgccgcagcaatatcatgtggctagaccgggatggcaccgtgcagccaggctcgtcctactgggagcgcagcagctttgggggcgtccagatggagcaggtgcagcccaactcgttcagcctgggcatcttcaacagcaggaaggaggacgagggccagtatgaatgccatgtgactgaatgggtgcgggcagtggatggcgagtggcagattgttggggagcgccgggccagcactcccatctccatcacagctcttgaaatgggcttcgcagtcacagccatctcccggacaccgggggtgacctacagcgactcctttgacttgcagtgtatcatcaaaccccactaccctgcctgggtccccgtgtcggtgacatggcggttccagccggtgggcacggtggagttccatgacttggtgaccttcacccgggacggaggggtccagtggggggacaggtcctccagcttccgaacccgaactgccatcgagaaggctgagtccagcaacaacgtccgcctaagcatcagccgagccagtgacacggaagcaggcaagtaccagtgtgtggcagagctgtggcggaagaactacaacaacacctggacgcgactggcggagaggacctccaacctgctggagatcagggtgctgcagccagtgacaaagctgcaggtgagcaaatcgaagaggaccctcaccctggtggaaaacaagcccattcagttgaactgctcagtcaagtctcagactagccagaactcccactttgcggtgctctggtatgtccacaagccctcggatgccgatggcaagcttatcctgaagaccacccacaactccgcctttgaatacggtacttacgccgaggaggagggcctgagagccaggctccagtttgagaggcatgtgtcggggggcctgttcagcctcaccgtccagagagccgaggtcagcgacagcggcagctactactgccacgtggaggagtggctgctgagccccaactacgcctggtacaagctggcagaggaggtttctgggcgcacagaagtcactgtgaaacagccagacagccgcctgaggctcagccaagcccaggggaacctgtcggttctggagacccggcaggtacagctggagtgtgtggttctcaaccgcaccagcataacctcccagctcatggtggaatggtttgtatggaagcccaaccaccctgagcgggagactgtggcccgcttgagccgtgacgccaccttccactatggagagcaggcagccaagaacaatctgaaggggcggctgcatttggagagtccttcccccggcgtgtaccgtctcttcatccagaacgtggctgtgcaggacagcgggacctacagctgccatgtggaggagtggctgcccagccccagtggcatgtggtataagcgggcagaggacaccgctgggcagacagctctgacagtcatgcgaccaggtgagggtccacgtccccaagcttccactccctctggtgtttcccatttaagtatactgttttatgcactggataaaattagtttattaataaattatttgcagttaaataaaaaaa

SEQ ID NO: 456699 - DNA, 1006 bp, Homo sapiens
cctcgacactgttggcccactcgattccacgttcttaactgttccattttccgtatctgcttcgggcttccacctcatttttttcgctttgcccattctgtttcagccagtcgccaagaatcatgaaagtcgccagtggcagcaccgccaccgccgccgcgggccccagctgcgcgctgaaggccggcaagacagcgagcggtgcgggcgaggtggtgcgctgtctgtctgagcagagcgtggccatctcgcgctgcgccgggggcgccggggcgcgcctgcctgccctgctggacgagcagcaggtaaacgtgctgctctacgacatgaacggctgttactcacgcctcaaggagctggtgcccaccctgccccagaaccgcaaggtgagcaaggtggagattctccagcacgtcatcgactacatcagggaccttcagttggagctgaactcggaatccgaagttggaacccccgggggccgagggctgccggtccgggctccgctcagcaccctcaacggcgagatcagcgccctgacggccgaggcggcatgcgttcctgcggacgatcgcatcttgtgtcgctgaagcgcctcccccagggaccggcggaccccagccatccagggggcaagaggaattacgtgctctgtgggtctcccccaacgcgcctcgccggatctgagggagaacaagaccgatcggcggccactgcgcccttaactgcatccagcctggggctgaggctgaggcactggcgaggagagggcgctcctctctgcacacctactagtcaccagagactttagggggtgggattccactcgtgtgtttctattttttgaaaagcagacattttaaaaaatggtcacgtttggtgcttctcagatttctgaggaaattgctttgtattgtatattacaatgatcaccgactgaaaatattgttttacaatagttctgtggggctgtttttttgttattaaacaaataatttagatggtg

SEQ ID NO: 456700 - DNA, 408 bp, Homo sapiens
  misc_feature (2)..(2): n is a, c, g, or t
  misc_feature (46)..(46): n is a, c, g, or t
  misc_feature (49)..(49): n is a, c, g, or t
tnccggtcccggggcccgctcagcaccccctcaacggccgagaatncancccgcgggccgccggtgaaatacccactactcggatctgagggagaacaagaccgatcggcggccactgcgcccttaactgcatccagcctggggctgaggctgaggcactggcgaggagagggcgctcctctctgcacacctactagtcaccagagactttagggggtgggattccactcgtgtgtttctattttttgaaaagcagacattttaaaaaatggtcacgtttggtgcttctcagatttctgaggaaattgctttgtattgtatattacaatgatcaccgactgaaaatattgttttacaatagttctgtggggctgtttttttgttattaaacaaataatttagatggtg

SEQ ID NO: 456701 - DNA, 1244 bp, Homo sapiens
cctcgacactgttggcccactcgattccacgttcttaactgttccattttccgtatctgcttcgggcttccacctcatttttttcgctttgcccattctgtttcagccagtcgccaagaatcatgaaagtcgccagtggcagcaccgccaccgccgccgcgggccccagctgcgcgctgaaggccggcaagacagcgagcggtgcgggcgaggtggtgcgctgtctgtctgagcagagcgtggccatctcgcgctgcgccgggggcgccggggcgcgcctgcctgccctgctggacgagcagcaggtaaacgtgctgctctacgacatgaacggctgttactcacgcctcaaggagctggtgcccaccctgccccagaaccgcaaggtgagcaaggtggagattctccagcacgtcatcgactacatcagggaccttcagttggagctgaactcggaatccgaagttggaacccccgggggccgagggctgccggtccgggctccgctcagcaccctcaacggcgagatcagcgccctgacggccgaggtgagatccagatccgaccactagatcatccttataccgacggggaaacggaggccagagagggcgtgggcgcttgcaccacttccgtcccatccttgcgggtacctggctatgcgggggtgcctaaggagcctggaaaaagcgctcccccgtcgtgcttcctggggaagggggcgttcgctgcgctcggagcggcgtcccttccaacccgccggtctcatttcttctcgttttcacagcggcatgcgttcctgcggacgatcgcatcttgtgtcgctgaagcgcctcccccagggaccggcggaccccagccatccagggggcaagaggaattacgtgctctgtgggtctcccccaacgcgcctcgccggatctgagggagaacaagaccgatcggcggccactgcgcccttaactgcatccagcctggggctgaggctgaggcactggcgaggagagggcgctcctctctgcacacctactagtcaccagagactttagggggtgggattccactcgtgtgtttctattttttgaaaagcagacattttaaaaaatggtcacgtttggtgcttctcagatttctgaggaaattgctttgtattgtatattacaatgatcaccgactgaaaatattgttttacaatagttctgtggggctgtttttttgttattaaacaaataatttagatggtg

SEQ ID NO: 456702 - DNA, 967 bp, Homo sapiens
cctcgacactgttggcccactcgattccacgttcttaactgttccattttccgtatctgcttcgggcttccacctcatttttttcgctttgcccattctgtttcagccagtcgccaagaatcatgaaagtcgccagtggcagcaccgccaccgccgccgcgggccccagctgcgcgctgaaggccggcaagacagcgagcggtgcgggcgaggtggtgcgctgtctgtctgagcagagcgtggccatctcgcgctgcgccgggggcgccggggcgcgcctgcctgccctgctggacgagcagcaggtaaacgtgctgctctacgacatgaacggctgttactcacgcctcaaggagctggtgcccaccctgccccagaaccgcaaggtgagcaaggtggagattctccagcacgtcatcgactacatcagggaccttcagttggagctgaactcggaatccgaagttggaacccccgggggccgagggctgccggtccgggctccgctcagcaccctcaacggcgagatcagcgccctgacggccgaggcggcatgcgttcctgcggacgatcgcatcttgtgtcgctgaagcgcctcccccagggaccggcggaccccagccatccagggggcaagaggaattacgtgctctgtgggtctcccccaacgcgcctcgccggatctgagggagaacaagaccgatcggcggccactgcgcccttaactgcatccagcctggggctgaggctgaggcactggcgaggagagggcgctcctctctgcacacctactagtcaccagagactttagggggcgcccccccattcccccccctctatccttcccccaagggtgtcttctttggatggtcggggcccggccccccgggggggatagtgagggggctatgggtgtgtgtttcaaaaaacaaaaactgggggggttttttgccctttttcctttgga

SEQ ID NO: 456703 - DNA, 749 bp, Homo sapiens
cctcgacactgttggcccactcgattccacgttcttaactgttccattttccgtatctgcttcgggcttccacctcatttttttcgctttgcccattctgtttcagccagtcgccaagaatcatgaaagtcgccagtggcagcaccgccaccgccgccgcgggccccagctgcgcgctgaaggccggcaagacagcgagcggtgcgggcgaggtggtgcgctgtctgtctgagcagagcgtggccatctcgcgctgcgccgggggcgccggggcgcgcctgcctgccctgctggacgagcagcaggtaaacgtgctgctctacgacatgaacggctgttactcacgcctcaaggagctggtgcccaccctgccccagaaccgcaaggtgagcaaggtggagattctccagcacgtcatcgactacatcagggacgaacaagaccgatcggcggccactgcgcccttaactgcatccagcctggggctgaggctgaggcactggcgaggagagggcgctcctctctgcacacctactagtcaccagagactttagggggtgggattccactcgtgtgtttctattttttgaaaagcagacattttaaaaaatggtcacgtttggtgcttctcagatttctgaggaaattgctttgtattgtatattacaatgatcaccgactgaaaatattgttttacaatagttctgtggggctgtttttttgttattaaacaaataatttagatggtg

SEQ ID NO: 456704 - DNA, 1214 bp, Homo sapiens
cctcgacactgttggcccactcgattccacgttcttaactgttccattttccgtatctgcttcgggcttccacctcatttttttcgctttgcccattctgtttcagccagtcgccaagaatcatgaaagtcgccagtggcagcaccgccaccgccgccgcgggccccagctgcgcgctgaaggccggcaagacagcgagcggtgcgggcgaggtggtgcgctgtctgtctgagcagagcgtggccatctcgcgctgcgccgggggcgccggggcgcgcctgcctgccctgctggacgagcagcaggtaaacgtgctgctctacgacatgaacggctgttactcacgcctcaaggagctggtgcccaccctgccccagaaccgcaaggtgagcaaggtggagattctccagcacgtcatcgactacatcagggaccttcagttggagctgaactcggaatccgaagttggaacccccgggggccgagggctgccggtccgggctccgctcagcaccctcaacggcgagatcagcgccctgacggccgaggcggcatgcgttcctgcggacgatcgcatcttgtgtcgctgaagcgcctcccccagggaccggcggaccccagccatccagggggcaagaggaattacgtgctctgtgggtctcccccaacgcgcctcgccggatctgagggagaacaagaccgatcggcggccactgcgcccttaactgcatccagcctggggctgaggctgaggcactggcgaggagagggcgctcctctctgcacacctactagtcaccagagactttagggggtgggattccactcgtgtgtttctattttttgaaaagcagacattttaaaaaatggtcacgtttggtgcttctcagatttctgaggaaattgctttgtattgtatattacaatgatcaccgactgaaaatattgttttacaatagttctgtggggctgtttttttgttattaaacaaataatttagatggtgaaaaaaaaaaaaaaaaaaaaaaaagtggggtggccccaagggggcaaacaggcttgcgacaagtagagcgccgccacaaaggcccagggcacacagacgacgcccaggcacagacggtgcgcacgggaaggccgacacaaggtgaccacaagtggcactcagacacgagagccacgatcaccgagcaggcgcccagacagttgccgca

SEQ ID NO: 456705 - DNA, 1186 bp, Homo sapiens
cctcgacactgttggcccactcgattccacgttcttaactgttccattttccgtatctgcttcgggcttccacctcatttttttcgctttgcccattctgtttcagccagtcgccaagaatcatgaaagtcgccagtggcagcaccgccaccgccgccgcgggccccagctgcgcgctgaaggccggcaagacagcgagcggtgcgggcgaggtggtgcgctgtctgtctgagcagagcgtggccatctcgcgctgcgccgggggcgccggggcgcgcctgcctgccctgctggacgagcagcaggtaaacgtgctgctctacgacatgaacggctgttactcacgcctcaaggagctggtgcccaccctgccccagaaccgcaaggtgagcaaggtggagattctccagcacgtcatcgactacatcagggaccttcagttggagctgaactcggaatccgaagttggaacccccgggggccgagggctgccggtccgggctccgctcagcaccctcaacggcgagatcagcgccctgacggccgaggtgagatccagatccgaccactagatcatccttataccgacggggaaacggaggccagagagggcgtgggcgcttgcaccacttccgtcccatccttgcgggtacctggctatgcgggggtgcctaaggagcctggaaaaagcgctcccccgtcgtgcttcctggggaagggggcgttcggcggcatgcgttcctgcggacgatcgcatcttgtgtcgctgaagcgcctcccccagggaccggcggaccccagccatccagggggcaagaggaattacgtgctctgtgggtctcccccaacgcgcctcgccggatctgagggagaacaagaccgatcggcggccactgcgcccttaactgcatccagcctggggctgaggctgaggcactggcgaggagagggcgctcctctctgcacacctactagtcaccagagactttagggggtgggattccactcgtgtgtttctattttttgaaaagcagacattttaaaaaatggtcacgtttggtgcttctcagatttctgaggaaattgctttgtattgtatattacaatgatcaccgactgaaaatattgttttacaatagttctgtggggctgtttttttgttattaaacaaataatttagatggtg

SEQ ID NO: 456706 - DNA, 844 bp, Homo sapiens
cctcgacactgttggcccactcgattccacgttcttaactgttccattttccgtatctgcttcgggcttccacctcatttttttcgctttgcccattctgtttcagccagtcgccaagaatcatgaaagtcgccagtggcagcaccgccaccgccgccgcgggccccagctgcgcgctgaaggccggcaagacagcgagcggtgcgggcgaggtggtgcgctgtctgtctgagcagagcgtggccatctcgcgctgcgccgggggcgccggggcgcgcctgcctgccctgctggacgagcagcaggtaaacgtgctgctctacgacatgaacggctgttactcacgcctcaaggagctggtgcccaccctgccccagaaccgcaaggtgagcaaggtggagattctccagcacgtcatcgactacatcagggaccttcagttggagctgaactcggaatccgaagttggaacccccgggggccgagggctgccggtccgggctccgctcagcaccctcaacggcgagatcagcgccctgacggccgaggcggcatgcgttcctgcggacgatcgcatcttgtgtcgctgaggcactggcgaggagagggcgctcctctctgcacacctactagtcaccagagactttagggggtgggattccactcgtgtgtttctattttttgaaaagcagacattttaaaaaatggtcacgtttggtgcttctcagatttctgaggaaattgctttgtattgtatattacaatgatcaccgactgaaaatattgttttacaatagttctgtggggctgtttttttgttattaaacaaataatttagatggtg

SEQ ID NO: 456707 - DNA, 4634 bp, Homo sapiens
gtcacgccccgggcagcttggctggggctaggcttccggggctctgcggtcctcggcctgtgctggcagcctcggagcccaccgagccgggcggctgggatgatgaaccggacgacccccgaccaggagctggtgccggcgtcggagcccgtgtgggagcggccgtggtcggtggaggagatccgcaggagcagccagagctggtcgctggcggccgacgcgggcctactacagtttctacaggaattctcacagcaaactatctctaggacccatgaaatcaagaaacaagtggacggactaatccgggaaaccaaagccacagattgtcgcctgcataatgtcttcaatgacttccttatgctctctaatacccagttcatagagaatcgtgtatatgatgaagaagtggaggagccagtactcaaggctgaggcagaaaaaacagagcaggagaagacacgagagcagaaagaagtagatctcattcctaaagtccaggaggctgtgaactatggcttacaagtattggacagtgcctttgagcaacttgatatcaaagcaggaaactcagactccgaggaagatgatgctaatgggcgggtggaactgatccttgaaccaaaggatctatacattgatcgtcctttaccatatctcattgggtcaaagctgttcatggaacaagaagatgtaggtcttggagagctgtccagtgaagaaggctctgtaggcagtgatcgtggcagtattgtggacactgaggaagagaaagaagaggaggagtcagatgaagattttgcccatcacagtgacaatgaacaaaaccagcacaccacacaaatgagtgatgaggaagaggatgatgatggctgtgacctttttgctgactctgagaaggaggaggaagatattgaggacattgaagaaaatactagacctaaaagaagcagacctacatcgtttgcagatgagctggctgcccgcatcaagggggatgccatgggtcgagtggacgaggagccgacaaccttaccctcaggagaagcaaaacctcggaagacactcaaagagaagaaggaaaggagaactccttcagacgatgaagaggataacttattcgcaccccccaagctgaccgacgaggacttctcgccatttggctctggaggtggcctgttcagtggcggcaaggggctatttgatgatgaggacgaggagagtgacctcttcacggaagccccccaggatcggcaagctggagcctctgttaaggaggagtcttcatcatccaaacctggaaagaaaatcccagcaggagctgtttctgtatttttaggagacacggatgtgtttggtgctgcctccgttccatcactgaaggagccacagaagcctgagcagcccactccaaggaaaagcccctatggtccccctcccactggcctctttgatgatgatgatggtgatgatgatgacgactttttctcggcaccccacagcaaaccttctaaaacacgcaaagtccaatccactgccgatatctttggtgacgaagaaggagatctgttcaaagaaaaagccgtagcatcgccagaagccactgtgagtcagacagatgaaaataaagcaagagcagaaaaaaaggttaccttatcttccagcaagaatctcaagccctcatcagaaacaaagactcaaaaaggcttattttcagatgaggaggactctgaggatttgttttcttctcaaagtgcgagtaacttaaaaggtgcatctctgctgcctggcaagctccccacgtcggtttccctgtttgatgatgaagatgaagaggataatctttttgggggtacagctgctaagaagcagacattgtctctacaagctcagagagaagagaaagcaaaagcctccgagctctccaaaaagaaagcatctgccctgttgttcagcagtgatgaggaggaccagtggaatattcctgcttcacagacccacttagcatctgacagcaggtctaaaggagaacccagggattctgggaccctccagagccaggaggccaaggctgtgaaaaagaccagtctctttgaggaagacaaagaagatgatctttttgccattgccaaggacagccaaaagaagacccagagagtgtcactcctctttgaagacgatgttgatagcggaggctctctgtttggctctcctcccacatctgttcctcctgcaacaaagaaaaaagagactgtctctgaggcaccacctttgctgttcagcgatgaagaagagaaggaggcacaacttggagtgaagtctgtggataagaaggttgagagtgccaaggagtcattaaaatttgggagaactgatgtggctgagtcagaaaaggaaggacttttgactagatctgctcaggaaacagtcaagcattctgatttattttcttcatcatccccatgggacaaaggaaccaagcctagaaccaaaactgttcttagcttgtttgatgaggaagaggataaaatggaagatcaaaacattatccaggctccacagaaagaagtaggaaagggctgcgatcctgatgcccaccccaagagcacaggtgtcttccaggatgaagagctgcttttcagccacaagctccaaaaggacaatgacccagatgttgacctttttgctggcaccaaaaaaaccaagctgttagagccaagtgttgggagcctgtttggggatgatgaagatgatgatcttttcagctctgccaagtcccagcctttggtacaagagaaaaagagagtagtgaaaaaagaccactctgttaactctttcaaaaaccagaaacatcctgaatccattcaaggtagtaaagaaaaaggcatatggaagccggaaacacctcaggcaaatttagcgatcaacccagcggccttgctgcccacagcggcttcccagatctctgaagtaaagcctgttttgccagaattggcttttccttcatctgaacacagaaggagccacggtctggaaagtgtgcctgtccttcccgggagtggggaggccggtgtgagttttgatcttccagctcaggcagacaccttacacagtgcaaacaagagccgtgtcaagatgagagggaagcgtagaccgcagacccgtgcagctaggcggctggctgctcaggagtccagcgaggctgaggacatgagcgtccccagaggacccattgcacagtgggctgatggcgccatttccccaaatggccatcggccacagctcagagcagccagtggagaagacagcactgaggaggccctggcagctgccgctgcaccttgggaaggtggtcctgtgcctggagtggacacaagcccctttgcaaagtctctgggtcattccagaggggaggctgacctttttgattctggggacattttttccacgggcactggatctcagtccgtggagagaacaaaacccaaggcaaagatagcagagaatcctgccaacccaccagtgggtggtaaagcaaagagccccatgtttcctgctctaggcgaggccagcagtgatgatgatctctttcagtctgctaaaccaaaaccagcaaagaaaacaaatccctttcctctcctggaagatgaggatgacctctttacagatcagaaagtcaagaagaatgagacaaaatccagtagtcagcaggatgtcatattaacaacacaagatatttttgaggatgatatatttgctacggaagcaattaaaccctctcagaaaaccagagagaaggagaaaacattggaatctaatttatttgatgataacattgatatctttgctgacttaactgtaaaaccaaaagaaaagtccaaaaagaaagtggaagccaagtctatatttgatgatgatatggatgacatcttctccactggtatccaggctaagacaaccaaaccaaaaagccgatctgcacaggccgcacctgaaccaagatttgaacacaaggtgtccaacatctttgatgatcccctgaatgcctttggaggccagtagagcacacagggtatccacatgttaccctgcagctacattgttgagttagtgatgatattgtatatgctcatggtcttaactggattacaaaaagcaaatactagaacagctagctcatcttttacccaatgtacttagtatttttctgcactggtttaatcatgcttaatactacaaaacaaaaataaatatttcacagtggttggtttgttttgtttttaaaccacagtttgatttagttagccttgctggggccataatatgcttcagggtgtgtaaaagaagaaatctctttgtggctttcatgggcagggaatctcagagatagcaaatgccacctgaccagaagtctttgttatatggatgggaaccctaacttagggcttgggcaggggaaagagaaagaagatgagagattatacttcatgagtcttagcaatatgggagcaggttttcactgaattctgagggtgcctctgcatgtcctccaaggcaaagtttggcaaactgtggcccccccactgtcatattttgttaataaaattttattggaacacaatcacaaaaaaatg

SEQ ID NO: 456708 - DNA, 397 bp, Homo sapiens
cggcacgaggagagaggacagaactggttggtttgttttgtttttaaaccacagtttgatttagttagccttgctggggccataatatgcttcagggtgtgtaaaagaagaaatctctttgtggctttcatgggcagggaatctcagagatagcaaatgccacctgaccagaagtctttgttatatggatgggaaccctaacttagggcttgggcaggggaaagagaaagaagatgagagattatacttcatgagtcttagcaatatgggagcaggttttcactgaattctgagggtgcctctgcatgtcctccaaggcaaagtttggcaaactgtggcccccccactgtcatattttgttaataaaattttattggaacacaatcacaaaaaaatg

SEQ ID NO: 456709 - DNA, 4697 bp, Homo sapiens
gtcacgccccgggcagcttggctggggctaggcttccggggctctgcggtcctcggcctgtgctggcagcctcggagcccaccgagccgggcggctgggatgatgaaccggacgacccccgaccaggagctggtgccggcgtcggagcccgtgtgggagcggccgtggtcggtggaggagatccgcaggagcagccagagctggtcgctggcggccgacgcgggcctactacagtttctacaggaattctcacagcaaactatctctaggacccatgaaatcaagaaacaagtggacggactaatccgggaaaccaaagccacagattgtcgcctgcataatgtcttcaatgacttccttatgctctctaatacccagttcatagagaatcgtgtatatgatgaagaagtggaggagccagtactcaaggctgaggcagaaaaaacagagcaggagaagacacgagagcagaaagaagtagatctcattcctaaagtccaggaggctgtgaactatggcttacaagtattggacagtgcctttgagcaacttgatatcaaagcaggaaactcagactccgaggaagatgatgctaatgggcgggtggaactgatccttgaaccaaaggatctatacattgatcgtcctttaccatatctcattgggtcaaagctgttcatggaacaagaagatgtaggtcttggagagctgtccagtgaagaaggctctgtaggcagtgatcgtggcagtattgtggacactgaggaagagaaagaagaggaggagtcagatgaagattttgcccatcacagtgacaatgaacaaaaccagcacaccacacaaatgagtgatgaggaagaggatgatgatggctgtgacctttttgctgactctgagaaggaggaggaagatattgaggacattgaagaaaatactagacctaaaagaagcagacctacatcgtttgcagatgagctggctgcccgcatcaagggggatgccatgggtcgagtggacgaggagccgacaaccttaccctcaggagaagcaaaacctcggaagacactcaaagagaagaaggaaaggagaactccttcagacgatgaagaggataacttattcgcaccccccaagctgaccgacgaggacttctcgccatttggctctggaggtggcctgttcagtggcggcaaggggctatttgatgatgaggacgaggagagtgacctcttcacggaagccccccaggatcggcaagctggagcctctgttaaggaggagtcttcatcatccaaacctggaaagaaaatcccagcaggagctgtttctgtatttttaggagacacggatgtgtttggtgctgcctccgttccatcactgaaggagccacagaagcctgagcagcccactccaaggaaaagcccctatggtccccctcccactggcctctttgatgatgatgatggtgatgatgatgacgactttttctcggcaccccacagcaaaccttctaaaacacgcaaagtccaatccactgccgatatctttggtgacgaagaaggagatctgttcaaagaaaaagccgtagcatcgccagaagccactgtgagtcagacagatgaaaataaagcaagagcagaaaaaaaggttaccttatcttccagcaagaatctcaagccctcatcagaaacaaagactcaaaaaggcttattttcagatgaggaggactctgaggatttgttttcttctcaaagtgcgagtaacttaaaaggtgcatctctgctgcctggcaagctccccacgtcggtttccctgtttgatgatgaagatgaagaggataatctttttgggggtacagctgctaagaagcagacattgtctctacaagctcagagagaagagaaagcaaaagcctccgagctctccaaaaagaaagcatctgccctgttgttcagcagtgatgaggaggaccagtggaatattcctgcttcacagacccacttagcatctgacagcaggtctaaaggagaacccagggattctgggaccctccagagccaggaggccaaggctgtgaaaaagaccagtctctttgaggaagacaaagaagatgatctttttgccattgccaaggacagccaaaagaagacccagagagtgtcactcctctttgaagacgatgttgatagcggaggctctctgtttggctctcctcccacatctgttcctcctgcaacaaagaaaaaagagactgtctctgaggcaccacctttgctgttcagcgatgaagaagagaaggaggcacaacttggagtgaagtctgtggataagaaggttgagagtgccaaggagtcattaaaatttgggagaactgatgtggctgagtcagaaaaggaaggacttttgactagatctgctcaggaaacagtcaagcattctgatttattttcttcatcatccccatgggacaaaggaaccaagcctagaaccaaaactgttcttagcttgtttgatgaggaagaggataaaatggaagatcaaaacattatccaggctccacagaaagaagtaggaaagggctgcgatcctgatgcccaccccaagagcacaggtgtcttccaggatgaagagctgcttttcagccacaagctccaaaaggacaatgacccagatgttgacctttttgctggcaccaaaaaaaccaagctgttagagccaagtgttgggagcctgtttggggatgatgaagatgatgatcttttcagctctgccaagtcccagcctttggtacaagagaaaaagagagtagtgaaaaaagaccactctgttaactctttcaaaaaccagaaacatcctgaatccattcaaggtagtaaagaaaaaggcatatggaagccggaaacacctcaggactcatcaggtctcgctccatttaaaaccaaagaaccatccactcggatcgggaagatacaagcaaatttagcgatcaacccagcggccttgctgcccacagcggcttcccagatctctgaagtaaagcctgttttgccagaattggcttttccttcatctgaacacagaaggagccacggtctggaaagtgtgcctgtccttcccgggagtggggaggccggtgtgagttttgatcttccagctcaggcagacaccttacacagtgcaaacaagagccgtgtcaagatgagagggaagcgtagaccgcagacccgtgcagctaggcggctggctgctcaggagtccagcgaggctgaggacatgagcgtccccagaggacccattgcacagtgggctgatggcgccatttccccaaatggccatcggccacagctcagagcagccagtggagaagacagcactgaggaggccctggcagctgccgctgcaccttgggaaggtggtcctgtgcctggagtggacacaagcccctttgcaaagtctctgggtcattccagaggggaggctgacctttttgattctggggacattttttccacgggcactggatctcagtccgtggagagaacaaaacccaaggcaaagatagcagagaatcctgccaacccaccagtgggtggtaaagcaaagagccccatgtttcctgctctaggcgaggccagcagtgatgatgatctctttcagtctgctaaaccaaaaccagcaaagaaaacaaatccctttcctctcctggaagatgaggatgacctctttacagatcagaaagtcaagaagaatgagacaaaatccagtagtcagcaggatgtcatattaacaacacaagatatttttgaggatgatatatttgctacggaagcaattaaaccctctcagaaaaccagagagaaggagaaaacattggaatctaatttatttgatgataacattgatatctttgctgacttaactgtaaaaccaaaagaaaagtccaaaaagaaagtggaagccaagtctatatttgatgatgatatggatgacatcttctccactggtatccaggctaagacaaccaaaccaaaaagccgatctgcacaggccgcacctgaaccaagatttgaacacaaggtgtccaacatctttgatgatcccctgaatgcctttggaggccagtagagcacacagggtatccacatgttaccctgcagctacattgttgagttagtgatgatattgtatatgctcatggtcttaactggattacaaaaagcaaatactagaacagctagctcatcttttacccaatgtacttagtatttttctgcactggtttaatcatgcttaatactacaaaacaaaaataaatatttcacagtggttggtttgttttgtttttaaaccacagtttgatttagttagccttgctggggccataatatgcttcagggtgtgtaaaagaagaaatctctttgtggctttcatgggcagggaatctcagagatagcaaatgccacctgaccagaagtctttgttatatggatgggaaccctaacttagggcttgggcaggggaaagagaaagaagatgagagattatacttcatgagtcttagcaatatgggagcaggttttcactgaattctgagggtgcctctgcatgtcctccaaggcaaagtttggcaaactgtggcccccccactgtcatattttgttaataaaattttattggaacacaatcacaaaaaaatg

SEQ ID NO: 456710 - DNA, 3650 bp, Homo sapiens
tgatcgtccagaggatccccgtcgtccagcatctggggatgcatgggtcgagtggacgaggagccgacaaccttaccctcaggagaagcaaaacctcggaagacactcaaagagaagaaggaaaggagaactccttcagacgatgaagaggataacttattcgcaccccccaagctgaccgacgaggacttctcgccatttggctctggaggtggcctgttcagtggcggcaaggggctatttgatgatgaggacgaggagagtgacctcttcacggaagccccccaggatcggcaagctggagcctctgttaaggaggagtcttcatcatccaaacctggaaagaaaatcccagcaggagctgtttctgtatttttaggagacacggatgtgtttggtgctgcctccgttccatcactgaaggagccacagaagcctgagcagcccactccaaggaaaagcccctatggtccccctcccactggcctctttgatgatgatgatggtgatgatgatgacgactttttctcggcaccccacagcaaaccttctaaaacacgcaaagtccaatccactgccgatatctttggtgacgaagaaggagatctgttcaaagaaaaagccgtagcatcgccagaagccactgtgagtcagacagatgaaaataaagcaagagcagaaaaaaaggatttgttttcttctcaaagtgcgagtaacttaaaaggtgcatctctgctgcctggcaagctccccacgtcggtttccctgtttgatgatgaagatgaagaggataatctttttgggggtacagctgctaagaagcagacattgtctctacaagctcagagagaagagaaagcaaaagcctccgagctctccaaaaagaaagcatctgccctgttgttcagcagtgatgaggaggaccagtggaatattcctgcttcacagacccacttagcatctgacagcaggtctaaaggagaacccagggattctgggaccctccagagccaggaggccaaggctgtgaaaaagaccagtctctttgaggaagacaaagaagatgatctttttgccattgccaaggacagccaaaagaagacccagagagtgtcactcctctttgaagacgatgttgatagcggaggctctctgtttggctctcctcccacatctgttcctcctgcaacaaagaaaaaagagactgtctctgaggcaccacctttgctgttcagcgatgaagaagagaaggaggcacaacttggagtgaagtctgtggataagaaggttgagagtgccaaggagtcattaaaatttgggagaactgatgtggctgagtcagaaaaggaaggacttttgactagatctgctcaggaaacagtcaagcattctgatttattttcttcatcatccccatgggacaaaggaaccaagcctagaaccaaaactgttcttagcttgtttgatgaggaagaggataaaatggaagatcaaaacattatccaggctccacagaaagaagtaggaaagggctgcgatcctgatgcccaccccaagagcacaggtgtcttccaggatgaagagctgcttttcagccacaagctccaaaaggacaatgacccagatgttgacctttttgctggcaccaaaaaaaccaagctgttagagccaagtgttgggagcctgtttggggatgatgaagatgatgatcttttcagctctgccaagtcccagcctttggtacaagagaaaaagagagtagtgaaaaaagaccactctgttaactctttcaaaaaccagaaacatcctgaatccattcaaggtagtaaagaaaaaggcatatggaagccggaaacacctcaggactcatcaggtctcgctccatttaaaaccaaagaaccatccactcggatcgggaagatacaagcaaatttagcgatcaacccagcggccttgctgcccacagcggcttcccagatctctgaagtaaagcctgttttgccagaattggcttttccttcatctgaacacagaaggagccacggtctggaaagtgtgcctgtccttcccgggagtggggaggccggtgtgagttttgatcttccagctcaggcagacaccttacacagtgcaaacaagagccgtgtcaagatgagagggaagcgtagaccgcagacccgtgcagctaggcggctggctgctcaggagtccagcgaggctgaggacatgagcgtccccagaggacccattgcacagtgggctgatggcgccatttccccaaatggccatcggccacagctcagagcagccagtggagaagacagcactgaggaggccctggcagctgccgctgcaccttgggaaggtggtcctgtgcctggagtggacacaagcccctttgcaaagtctctgggtcattccagaggggaggctgacctttttgattctggggacattttttccacgggcactggatctcagtccgtggagagaacaaaacccaaggcaaagatagcagagaatcctgccaacccaccagtgggtggtaaagcaaagagccccatgtttcctgctctaggcgaggccagcagtgatgatgatctctttcagtctgctaaaccaaaaccagcaaagaaaacaaatccctttcctctcctggaagatgaggatgacctctttacagatcagaaagtcaagaagaatgagacaaaatccagtagtcagcaggatgtcatattaacaacacaagatatttttgaggatgatatatttgctacggaagcaattaaaccctctcagaaaaccagagagaaggagaaaacattggaatctaatttatttgatgataacattgatatctttgctgacttaactgtaaaaccaaaagaaaagtccaaaaagaaagtggaagccaagtctatatttgatgatgatatggatgacatcttctccactggtatccaggctaagacaaccaaaccaaaaagccgatctgcacaggccgcacctgaaccaagatttgaacacaaggtgtccaacatctttgatgatcccctgaatgcctttggaggccagtagagcacacagggtatccacatgttaccctgcagctacattgttgagttagtgatgatattgtatatgctcatggtcttaactggattacaaaaagcaaatactagaacagctagctcatcttttacccaatgtacttagtatttttctgcactggtttaatcatgcttaatactacaaaacaaaaataaatatttcacagtggttggtttgttttgtttttaaaccacagtttgatttagttagccttgctggggccataatatgcttcagggtgtgtaaaagaagaaatctctttgtggctttcatgggcagggaatctcagagatagcaaatgccacctgaccagaagtctttgttatatggatgggaaccctaacttagggcttgggcaggggaaagagaaagaagatgagagattatacttcatgagtcttagcaatatgggagcaggttttcactgaattctgagggtgcctctgcatgtcctccaaggcaaagtttggcaaactgtggcccccccactgtcatattttgttaataaaattttattggaacacaatcacaaaaaaatg

SEQ ID NO: 456711 - DNA, 4324 bp, Homo sapiens
gtcacgccccgggcagcttggctggggctaggcttccggggctctgcggtcctcggcctgtgctggcagcctcggagcccaccgagccgggcggctgggatgatgaaccggacgacccccgaccaggagctggtgccggcgtcggagcccgtgtgggagcggccgtggtcggtggaggagatccgcaggagcagccagagctggtcgctggcggccgacgcgggcctactacagtttctacaggaattctcacagcaaactatctctaggacccatgaaatcaagaaacaagtggacggactaatccgggaaaccaaagccacagattgtcgcctgcataatgtcttcaatgacttccttatgctctctaatacccagttcatagagaatcgtgtatatgatgaagaagtggaggagccagtactcaaggctgaggcagaaaaaacagagcaggagaagacacgagagcagaaagaagtagatctcattcctaaagtccaggaggctgtgaactatggcttacaagtattggacagtgcctttgagcaacttgatatcaaagcaggaaactcagactccgaggaagatgatgctaatgggcgggtggaactgatccttgaaccaaaggatctatacattgatcgtcctttaccatatctcattgggtcaaagctgttcatggaacaagaagatgtaggtcttggagagctgtccagtgaagaaggctctgtaggcagtgatcgtggcagtattgtggacactgaggaagagaaagaagaggaggagtcagatgaagattttgcccatcacagtgacaatgaacaaaaccagcacaccacacaaatgagtgatgaggaagaggatgatgatggctgtgacctttttgctgactctgagaaggaggaggaagatattgaggacattgaagaaaatactagacctaaaagaagcagacctacatcgtttgcagatgagctggctgcccgcatcaagggggatgccatgggtcgagtggacgaggagccgacaaccttaccctcaggagaagcaaaacctcggaagacactcaaagagaagaaggaaaggagaactccttcagacgatgaagaggataacttattcgcaccccccaagctgaccgacgaggacttctcgccatttggctctggaggtggcctgttcagtggcggcaaggggctatttgatgatgaggacgaggagagtgacctcttcacggaagccccccaggatcggcaagctggagcctctgttaaggaggagtcttcatcatccaaacctggaaagaaaatcccagcaggagctgtttctgtatttttaggagacacggatgtgtttggtgctgcctccgttccatcactgaaggagccacagaagcctgagcagcccactccaaggaaaagcccctatggtccccctcccactggcctctttgatgatgatgatggtgatgatgatgacgactttttctcggcaccccacagcaaaccttctaaaacacgcaaagtccaatccactgccgatatctttggtgacgaagaaggagatctgttcaaagaaaaagccgtagcatcgccagaagccactgtgagtcagacagatgaaaataaagcaagagcagaaaaaaaggttaccttatcttccagcaagaatctcaagccctcatcagaaacaaagactcaaaaaggcttattttcagatgaggaggactctgaggatttgttttcttctcaaagtgcgagtaacttaaaaggtgcatctctgctgcctggcaagctccccacgtcggtttccctgtttgatgatgaagatgaagaggataatctttttgggggtacagctgctaagaagcagacattgtctctacaagctcagagagaagagaaagcaaaagcctccgagctctccaaaaagaaagcatctgccctgttgttcagcagtgatgaggaggaccagtggaatattcctgcttcacagacccacttagcatctgacagcaggtctaaaggagaacccagggattctgggaccctccagagccaggaggccaaggctgtgaaaaagaccagtctctttgaggaagacaaagaagatgatctttttgccattgccaaggacagccaaaagaagacccagagagtgtcactcctctttgaagacgatgttgatagcggaggctctctgtttggctctcctcccacatctgttcctcctgcaacaaagaaaaaagagactgtctctgaggcaccacctttgctgttcagcgatgaagaagagaaggaggcacaacttggagtgaagtctgtggataagaaggttgagagtgccaaggagtcattaaaatttgggagaactgatgtggctgagtcagaaaaggaaggacttttgactagatctgctcaggaaacagtcaagcattctgatttattttcttcatcatccccatgggacaaaggaaccaagcctagaaccaaaactgttcttagcttgtttgatgaggaagaggataaaatggaagatcaaaacattatccaggctccacagaaagaagtaggaaagggctgcgatcctgatgcccaccccaagagcacaggtgtcttccaggatgaagagctgcttttcagccacaagctccaaaaggacaatgacccagatgttgacctttttgctggcaccaaaaaaaccaagctgttagagccaagtgttgggagcctgtttggggatgatgaagatgatgatcttttcagctctgccaagtcccagcctttggtacaagagaaaaagagagtagtgaaaaaagaccactctgttaactctttcaaaaaccagaaacatcctgaatccattcaaggtagtaaagaaaaaggcatatggaagccggaaacacctcaggactcatcaggtctcgctccatttaaaaccaaagaaccatccactcggatcgggaagatacaagcaaatttagcgatcaacccagcggccttgctgcccacagcggcttcccagatctctgaagtaaagcctgttttgccagaattggcttttccttcatctgaacacagaaggagccacggtctggaaagtgtgcctgtccttcccgggagtggggaggccggtgtgagttttgatcttccagctcaggcagacaccttacacagtgcaaacaagagccgtgtcaagatgagagggaagcgtagaccgcagacccgtgcagctaggcggctggctgctcaggagtccagcgaggctgaggacatgagcgtccccagaggacccattgcacagtgggctgatggcgccatttccccaaatggccatcggccacagctcagagcagccagtggagaagacagcactgaggaggccctggcagctgccgctgcaccttgggaaggtggtcctgtgcctggagtggacacaagcccctttgcaaagtctctgggtcattccagaggggaggctgacctttttgattctggggacattttttccacgggcactggatctcagtccgtggagagaacaaaacccaaggcaaagatagcagagaatcctgccaacccaccagtgggtggtaaagcaaagagccccatgtttcctgctctaggcgaggccagcagtgatgatgatctctttcagtctgctaaaccaaaaccagcaaagaaaacaaatccctttcctctcctggaagatgaggatgacctctttacagatcagaaagtcaagaagaatgagacaaaatccagtagtcagcaggatgtcatattaacaacacaagatatttttgaggatgatatatttgctacggaagcaattaaaccctctcagaaaaccagagagaaggagaaaacattggaatctaatttatttgatgataacattgatatctttgctgacttaactgtaaaaccaaaagaaaagtccaaaaagaaagtggaagccaagtctatatttgatgatgatatggatgacatcttctccactggtatccaggctaagacaaccaaaccaaaaagccgatctgcacaggccgcacctgaaccaagatttgaacacaaggtgtccaacatctttgatgatcccctgaatgcctttggaggccagtagagcacacagggtatccacatgttaccctgcagctacattgttgagttagtgatgatattgtatatgctcatggtcttaactggattacaaaaagcaaatactagaacagctagctcatcttttacccaatgtacttagtatttttctgcactggtttaatcatgcttaatactacaaaacaaaaataaatatttcacag

SEQ ID NO: 456712 - DNA, 4656 bp, Homo sapiens
gtcacgccccgggcagcttggctggggctaggcttccggggctctgcggtcctcggcctgtgctggcagcctcggagcccaccgagccgggcggctgggatgatgaaccggacgacccccgaccaggagctggtgccggcgtcggagcccgtgtgggagcggccgtggtcggtggaggagatccgcaggagcagccagagctggtcgctggcggccgacgcgggcctactacagtttctacaggaattctcacagcaaactatctctaggacccatgaaatcaagaaacaagtggacggactaatccgggaaaccaaagccacagattgtcgcctgcataatgtcttcaatgacttccttatgctctctaatacccagttcatagagaatcgtgtatatgatgaagaagtggaggagccagtactcaaggctgaggcagaaaaaacagagcaggagaagacacgagagcagaaagaagtagatctcattcctaaagtccaggaggctgtgaactatggcttacaagtattggacagtgcctttgagcaacttgatatcaaagcaggaaactcagactccgaggaagatgatgctaatgggcgggtggaactgatccttgaaccaaaggatctatacattgatcgtcctttaccatatctcattgggtcaaagctgttcatggaacaagaagatgtaggtcttggagagctgtccagtgaagaaggctctgtaggcagtgatcgtggcagtattgtggacactgaggaagagaaagaagaggaggagtcagatgaagattttgcccatcacagtgacaatgaacaaaaccagcacaccacacaaatgagtgatgaggaagaggatgatgatggctgtgacctttttgctgactctgagaaggaggaggaagatattgaggacattgaagaaaatactagacctaaaagaagcagacctacatcgtttgcagatgagctggctgcccgcatcaagggggatgccatgggtcgagtggacgaggagccgacaaccttaccctcaggagaagcaaaacctcggaagacactcaaagagaagaaggaaaggagaactccttcagacgatgaagaggataacttattcgcaccccccaagctgaccgacgaggacttctcgccatttggctctggaggtggcctgttcagtggcggcaaggggctatttgatgatgaggacgaggagagtgacctcttcacggaagccccccaggatcggcaagctggagcctctgttaaggaggagtcttcatcatccaaacctggaaagaaaatcccagcaggagctgtttctgtatttttaggagacacggatgtgtttggtgctgcctccgttccatcactgaaggagccacagaagcctgagcagcccactccaaggaaaagcccctatggtccccctcccactggcctctttgatgatgatgatggtgatgatgatgacgactttttctcggcaccccacagcaaaccttctaaaacacgcaaagtccaatccactgccgatatctttggtgacgaagaaggagatctgttcaaagaaaaagccgtagcatcgccagaagccactgtgagtcagacagatgaaaataaagcaagagcagaaaaaaaggttaccttatcttccagcaagaatctcaagccctcatcagaaacaaagactcaaaaaggcttattttcagatgaggaggactctgaggatttgttttcttctcaaagtgcgagtaacttaaaaggtgcatctctgctgcctggcaagctccccacgtcggtttccctgtttgatgatgaagatgaagaggataatctttttgggggtacagctgctaagaagcagacattgtctctacaagctcagagagaagagaaagcaaaagcctccgagctctccaaaaagaaagcatctgccctgttgttcagcagtgatgaggaggaccagtggaatattcctgcttcacagacccacttagcatctgacagcaggtctaaaggagaacccagggattctgggaccctccagagccaggaggccaaggctgtgaaaaagaccagtctctttgaggaagacaaagaagatgatctttttgccattgccaaggacagccaaaagaagacccagagagtgtcactcctctttgaagacgatgttgatagcggaggctctctgtttggctctcctcccacatctgttcctcctgcaacaaagaaaaaagagactgtctctgaggcaccacctttgctgttcagcgatgaagaagagaaggaggcacaacttggagtgaagtctgtggataagaaggttgagagtgccaaggagtcattaaaatttgggagaactgatgtggctgagtcagaaaaggaaggacttttgactagatctgctcaggaaacagtcaagcattctgatttattttcttcatcatccccatgggacaaaggaaccaagcctagaaccaaaactgttcttagcttgtttgatgaggaagaggataaaatggaagatcaaaacattatccaggctccacagaaagaagtaggaaagggctgcgatcctgatgcccaccccaagagcacaggtgtcttccaggatgaagagctgcttttcagccacaagctccaaaaggacaatgacccagatgttgacctttttgctggcaccaaaaaaaccaagctgttagagccaagtgttgggagcctgtttggggatgatgaagatgatgatcttttcagctctgccaagtcccagcctttggtacaagagaaaaagagagtagtgaaaaaagaccactctgttaactctttcaaaaaccagaaacatcctgaatccattcaaggtagtaaagaaaaaggcatatggaagccggaaacacctcaggactcatcaggtctcgctccatttaaaaccaaagaaccatccactcggatcgggaagatacaagcaaatttagcgatcaacccagcggccttgctgcccacagcggcttcccagatctctgaagtaaagcctgttttgccagaattggcttttccttcatctgaacacagaaggagccacggtctggaaagtgtgcctgtccttcccgggagtggggaggccggtgtgagttttgatcttccagctcaggcagacaccttacacagtgcaaacaagagccgtgtcaagatgagagggaagcgtagaccgcagacccgtgcagctaggcggctggctgctcaggagtccagcgaggctgaggacatgagcgtccccagaggacccattgcacagtgggctgatggcgccatttccccaaatggccatcggccacagctcagagcagccagtggagaagacagcactgaggaggccctggcagctgccgctgcaccttgggaaggtggtcctgtgcctggagtggacacaagcccctttgcaaagtctctgggtcattccagaggggaggctgacctttttgattctggggacattttttccacgggcactggatctcagtccgtggagagaacaaaacccaaggcaaagatagcagagaatcctgccaacccaccagtgggtggtaaagcaaagagccccatgtttcctgctctaggcgaggccagcagtgatgatgatctctttcagtctgctaaaccaaaaccagcaaagaaaacaaatccctttcctctcctggaagatgaggatgacctctttacagatcagaaagtcaagaagaatgagacaaaatccagtagatgatatatttgctacggaagcaattaaaccctctcagaaaaccagagagaaggagaaaacattggaatctaatttatttgatgataacattgatatctttgctgacttaactgtaaaaccaaaagaaaagtccaaaaagaaagtggaagccaagtctatatttgatgatgatatggatgacatcttctccactggtatccaggctaagacaaccaaaccaaaaagccgatctgcacaggccgcacctgaaccaagatttgaacacaaggtgtccaacatctttgatgatcccctgaatgcctttggaggccagtagagcacacagggtatccacatgttaccctgcagctacattgttgagttagtgatgatattgtatatgctcatggtcttaactggattacaaaaagcaaatactagaacagctagctcatcttttacccaatgtacttagtatttttctgcactggtttaatcatgcttaatactacaaaacaaaaataaatatttcacagtggttggtttgttttgtttttaaaccacagtttgatttagttagccttgctggggccataatatgcttcagggtgtgtaaaagaagaaatctctttgtggctttcatgggcagggaatctcagagatagcaaatgccacctgaccagaagtctttgttatatggatgggaaccctaacttagggcttgggcaggggaaagagaaagaagatgagagattatacttcatgagtcttagcaatatgggagcaggttttcactgaattctgagggtgcctctgcatgtcctccaaggcaaagtttggcaaactgtggcccccccactgtcatattttgttaataaaattttattggaacacaatcacaaaaaaatg

SEQ ID NO: 456713 - DNA, 770 bp, Homo sapiens
ctccacactggtatccagtggaaagtggtagccaagtctatatttgatgatgatatggatgacatcttctccactggtatccaggctaagacaaccaaaccaaaaagccgatctgcacaggccgcacctgaaccaagatttgaacacaaggtgtccaacatctttgatgatcccctgaatgcctttggaggccagtagagcacacagggtatccacatgttaccctgcagctacattgttgagttagtgatgatattgtatatgctcatggtcttaactggattacaaaaagcaaatactagaacagctagctcatcttttacccaatgtacttagtatttttctgcactggtttaatcatgcttaatactacaaaacaaaaataaatatttcacagtggttggtttgttttgtttttaaaccacagtttgatttagttagccttgctggggccataatatgcttcagggtgtgtaaaagaagaaatctctttgtggctttcatgggcagggaatctcagagatagcaaatgccacctgaccagaagtctttgttatatggatgggaaccctaacttagggcttgggcaggggaaagagaaagaagatgagagattatacttcatgagtcttagcaatatgggagcaggttttcactgaattctgagggtgcctctgcatgtcctccaaggcaaagtttggcaaactgtggcccccccactgtcatattttgttaataaaattttattggaacacaatcacaaaaaaatg

SEQ ID NO: 456714 - DNA, 336 bp, Homo sapiens
atctgatgccatttctcagcctttctttgctttttatgaccctgacatctttaaagagtacaagcaagttttttttttatttgtaatgaataatttttggggggagagatacttcaagactacataaatatgtaattcctcaccataatgacactttcaattccagtaagtgggtatagatggttttatcaagatctctgtgatgctgttgtatggtggtttgtgattttgagctaaggacattttcttgtgaatattggtgtggtgacccttatctctcttctcaacagaaggctctgtaggcagtgatcgtggcagtattgtggacactgagga

SEQ ID NO: 456715 - DNA, 141 bp, Homo sapiens
ccatgctgttacgagagctgggtctttggtggtttgcttgcatgtgtcttaaaagtacctttctccacccctcttcagcaactgtttttcttttttctttctaaagatgacatcttctccactggtatccaggctaagaca

SEQ ID NO: 456716 - DNA, 556 bp, Homo sapiens
gtccttcccgggagtggggaggccggtgtgagttttgatcttccagctcaggcagacaccttacacagtgcaaacaaggtgatgaaaccatctttgcttccttgctctcttcttttaaccagaacatgcatatgcttctttctagtttatcagttgcatacacagcagtctttgactctccttttgaaggaggtgcctcatccttccttcagccgctcccccctccattctccccacccccctcatcctgcacctgcttttccatggcctgcatttggtacatttgcattctgctcagtagccacagtaacgtctcaccactttggctggtgtctgacacctgcaggtttccagcactgccacctgggggtcttctaaccacagagcagatcatgcccctcctgctggcgcttcctcactactccaaggagagcattcgggctcctgggtttggtatgaaacccctttgcaatcggtgccagcccatgtgtgcagcttcctcactagtcacttcacactttccagcctgactccaggcacaccaggtgccactccc

SEQ ID NO: 456717 - DNA, 429 bp, Homo sapiens
agtatcagtatattggagacccatactgcatggtatttattttgtaggagaagacacgagagcagaaagaagtagatctcattcctaaagtccaggaggctgtgaactatggcttacaagtattggacagtgcctttgagcaacttgatatcaaagcaggaaactcagactccgaggaagatgatgctaatgggcgggtggaactgatccttgaaccaaaggtgaagacattcaacttaaatatttattgcacaactattatgtttgggctactttaattgggcacacgattagtaagtcatggacttaacctctgggaagtgagtatgtcacttagtagtctcacattgactccaccagaaagactcgctttacctgagcactgatggagtacttgtgaggtgcaaggcaacatgtcaagttggggtg

SEQ ID NO: 456718 - DNA, 441 bp, Homo sapiens
acccgcctctgcagcgttcctggcgtcagcccctatcctccagcttcctccgccccaacctagggtagaaccccaaactccagtcccagtccacttccgcagcttcctcccctcagcatcgcaggtcggatcacgtgcgggttctgtcacgtgacatcaggtcacgtgaggccggtcacgccccgggcagcttggctggggctaggcttccggggctctgcggtcctcggcctgtgctggcagcctcggagcccaccgagccgggcggctgggatggtgagggcggcgggccggagaggggccggcctgggctggggccgccgtccctgccgccctcaggctcagcctctcttctcgtttttttcgctgcagatgaaccggacgacccccgaccaggagctggtgccggcgtcggagcccgtgtgggagcggccgtggtcg

SEQ ID NO: 456719 - DNA, 2977 bp, Homo sapiens
agtcatctcccctctcctcactccacacgccagagtttcatgaatctatactttaatagttagtgttttttgatgccatgccagatttgactctgaagtggagttaaggtaggatgaagaatcttcttcccactaaagaatttatttctccctctggatttccttggaatagaattaaaatagaaataaatataaattacatctgatttcctgcctgctctcagtgttgcctctcccgaggtcattgctgttgggccgtactctgcagcagtcttctcagaacgctgtggagctcctcctgggaacagcccaggagctggagagcgagtgacagttccacgtgcaggtgtcccagggtgtctcactgaagccttagtgtcctgagccgtaaacctgaggcacttggacgaacacatcaccactgacccttcctggggctcagatcttttgcttttagagccagtgcattaggctatggttgaatttttgtgtgctccttgaaatttctatttgataaccaacatggtaattttgcctgctggtcagttttaggtgctctgataaactgtgactcttgggaatcttactcatcttgtattccttgactccatatctgatctggcagctttccacttatgtgacagaggaggaggcatacgtgaagtagtgctagtgaaacatcaggccccaggagagatttgaatgcctttcccattaaagagctacagaaagtgacagttttgctccatcacagatttatttacaggcataagaaacacttgtctttctgtttcccaaatggatttttaactggatgtaatcttacacaggactcatcaggtctcgctccatttaaaaccaaagaaccatccactcggatcgggaagatacaagtaattaaaacactggaatcttcattgcctgccctgtggcatctataaacttttttgggtttcctactcttgtcagctgctgccaaacatcttctcatctcttcccccgcctcccctcccctgcacctagttgttgtctcctgtgtgctgcgtctttaacatctattctttgagcccagtggtgggcataggtgtaagacgctctgttttaattctgagactagattgggcgattttcctacgtttctctactcctctcgtattatacattatgtgtaccgaatcttgtcatgtgtcacaataaagataatagactgctgtgttgaagaacaaatacagagtttcatttttcttctttaggcaaatttagcgatcaacccagcggccttgctgcccacagcggcttcccagatctctgaagtaaagcctgttttgccagaattggcttttccttcatctgaacacagaaggagccacggtctggaaagtgtgcctgtccttcccgggagtggggaggccggtgtgagttttgatcttccagctcaggcagacaccttacacagtgcaaacaagagccgtgtcaagatgagagggaagcgtagaccgcagacccgtgcagctaggcggctggctgctcaggagtccagcgaggctgaggacatgagcgtccccagaggacccattgcacagtgggctgatggcgccatttccccaaatggccatcggccacagctcagagcagccagtggagaagacagcactgaggaggccctggcagctgccgctgcaccttgggaaggtggtcctgtgcctggagtggacacaagcccctttgcaaagtctctgggtcattccagaggggaggctgacctttttgattctggggacattttttccacgggcactggatctcagtccgtggagagaacaaaacccaaggcaaagatagcagagaatcctgccaacccaccagtgggtggtaaagcaaagagccccatgtttcctgctctaggcgaggccagcagtgatgatgatctctttcagtctgctaaaccaaaaccagcaaagaaaacaaatccctttcctctcctggaagatgaggatgacctctttacagatcagaaagtcaagaagaatgagacaaaatccagtagtcagcaggatgtcatattaacaacacaagatatttttgaggatgatatatttgctacggaagcaattaaaccctctcagaaaaccagagagaaggagaaaacattggaatctaatttatttgatgataacattgatatctttgctgacttaactgtaaaaccaaaagaaaagtccaaaaagaaagtggaagccaagtctatatttgatgatgatatggatgacatcttctccactggtatccaggctaagacaaccaaaccaaaaagccgatctgcacaggccgcacctgaaccaagatttgaacacaaggtgtccaacatctttgatgatcccctgaatgcctttggaggccagtagagcacacagggtatccacatgttaccctgcagctacattgttgagttagtgatgatattgtatatgctcatggtcttaactggattacaaaaagcaaatactagaacagctagctcatcttttacccaatgtacttagtatttttctgcactggtttaatcatgcttaatactacaaaacaaaaataaatatttcacagtggttggtttgttttgtttttaaaccacagtttgatttagttagccttgctggggccataatatgcttcagggtgtgtaaaagaagaaatctctttgtggctttcatgggcagggaatctcagagatagcaaatgccacctgaccagaagtctttgttatatggatgggaaccctaacttagggcttgggcaggggaaagagaaagaagatgagagattatacttcatgagtcttagcaatatgggagcaggttttcactgaattctgagggtgcctctgcatgtcctccaaggcaaagtttggcaaactgtggcccccccactgtcatattttgttaataaaattttattggaacacaatcacaaaaaaatg

SEQ ID NO: 456720 - DNA, 4499 bp, Homo sapiens
gtcacgccccgggcagcttggctggggctaggcttccggggctctgcggtcctcggcctgtgctggcagcctcggagcccaccgagccgggcggctgggatgatgaaccggacgacccccgaccaggagctggtgccggcgtcggagcccgtgtgggagcggccgtggtcggtggaggagatccgcaggagcagccagagctggtcgctggcggccgacgcgggcctactacagtttctacaggaattctcacagcaaactatctctaggacccatgaaatcaagaaacaagtggacggactaatccgggaaaccaaagccacagattgtcgcctgcataatgtcttcaatgacttccttatgctctctaatacccagttcatagagaatcgtgtatatgatgaagaagtggaggagccagtactcaaggctgaggcagaaaaaacagagcaggagaagacacgagagcagaaagaagtagatctcattcctaaagtccaggaggctgtgaactatggcttacaagtattggacagtgcctttgagcaacttgatatcaaagcaggaaactcagactccgaggaagatgatgctaatgggcgggtggaactgatccttgaaccaaaggatctatacattgatcgtcctttaccatatctcattgggtcaaagctgttcatggaacaagaagatgtaggtcttggagagctgtccagtgaagaaggctctgtaggcagtgatcgtggcagtattgtggacactgaggaagagaaagaagaggaggagtcagatgaagattttgcccatcacagtgacaatgaacaaaaccagaaaagaagcagacctacatcgtttgcagatgagctggctgcccgcatcaagggggatgccatgggtcgagtggacgaggagccgacaaccttaccctcaggagaagcaaaacctcggaagacactcaaagagaagaaggaaaggagaactccttcagacgatgaagaggataacttattcgcaccccccaagctgaccgacgaggacttctcgccatttggctctggaggtggcctgttcagtggcggcaaggggctatttgatgatgaggacgaggagagtgacctcttcacggaagccccccaggatcggcaagctggagcctctgttaaggaggagtcttcatcatccaaacctggaaagaaaatcccagcaggagctgtttctgtatttttaggagacacggatgtgtttggtgctgcctccgttccatcactgaaggagccacagaagcctgagcagcccactccaaggaaaagcccctatggtccccctcccactggcctctttgatgatgatgatggtgatgatgatgacgactttttctcggcaccccacagcaaaccttctaaaacacgcaaagtccaatccactgccgatatctttggtgacgaagaaggagatctgttcaaagaaaaagccgtagcatcgccagaagccactgtgagtcagacagatgaaaataaagcaagagcagaaaaaaaggatttgttttcttctcaaagtgcgagtaacttaaaaggtgcatctctgctgcctggcaagctccccacgtcggtttccctgtttgatgatgaagatgaagaggataatctttttgggggtacagctgctaagaagcagacattgtctctacaagctcagagagaagagaaagcaaaagcctccgagctctccaaaaagaaagcatctgccctgttgttcagcagtgatgaggaggaccagtggaatattcctgcttcacagacccacttagcatctgacagcaggtctaaaggagaacccagggattctgggaccctccagagccaggaggccaaggctgtgaaaaagaccagtctctttgaggaagacaaagaagatgatctttttgccattgccaaggacagccaaaagaagacccagagagtgtcactcctctttgaagacgatgttgatagcggaggctctctgtttggctctcctcccacatctgttcctcctgcaacaaagaaaaaagagactgtctctgaggcaccacctttgctgttcagcgatgaagaagagaaggaggcacaacttggagtgaagtctgtggataagaaggttgagagtgccaaggagtcattaaaatttgggagaactgatgtggctgagtcagaaaaggaaggacttttgactagatctgctcaggaaacagtcaagcattctgatttattttcttcatcatccccatgggacaaaggaaccaagcctagaaccaaaactgttcttagcttgtttgatgaggaagaggataaaatggaagatcaaaacattatccaggctccacagaaagaagtaggaaagggctgcgatcctgatgcccaccccaagagcacaggtgtcttccaggatgaagagctgcttttcagccacaagctccaaaaggacaatgacccagatgttgacctttttgctggcaccaaaaaaaccaagctgttagagccaagtgttgggagcctgtttggggatgatgaagatgatgatcttttcagctctgccaagtcccagcctttggtacaagagaaaaagagagtagtgaaaaaagaccactctgttaactctttcaaaaaccagaaacatcctgaatccattcaaggtagtaaagaaaaaggcatatggaagccggaaacacctcaggactcatcaggtctcgctccatttaaaaccaaagaaccatccactcggatcgggaagatacaagcaaatttagcgatcaacccagcggccttgctgcccacagcggcttcccagatctctgaagtaaagcctgttttgccagaattggcttttccttcatctgaacacagaaggagccacggtctggaaagtgtgcctgtccttcccgggagtggggaggccggtgtgagttttgatcttccagctcaggcagacaccttacacagtgcaaacaagagccgtgtcaagatgagagggaagcgtagaccgcagacccgtgcagctaggcggctggctgctcaggagtccagcgaggctgaggacatgagcgtccccagaggacccattgcacagtgggctgatggcgccatttccccaaatggccatcggccacagctcagagcagccagtggagaagacagcactgaggaggccctggcagctgccgctgcaccttgggaaggtggtcctgtgcctggagtggacacaagcccctttgcaaagtctctgggtcattccagaggggaggctgacctttttgattctggggacattttttccacgggcactggatctcagtccgtggagagaacaaaacccaaggcaaagatagcagagaatcctgccaacccaccagtgggtggtaaagcaaagagccccatgtttcctgctctaggcgaggccagcagtgatgatgatctctttcagtctgctaaaccaaaaccagcaaagaaaacaaatccctttcctctcctggaagatgaggatgacctctttacagatcagaaagtcaagaagaatgagacaaaatccagtagtcagcaggatgtcatattaacaacacaagatatttttgaggatgatatatttgctacggaagcaattaaaccctctcagaaaaccagagagaaggagaaaacattggaatctaatttatttgatgataacattgatatctttgctgacttaactgtaaaaccaaaagaaaagtccaaaaagaaagtggaagccaagtctatatttgatgatgatatggatgacatcttctccactggtatccaggctaagacaaccaaaccaaaaagccgatctgcacaggccgcacctgaaccaagatttgaacacaaggtgtccaacatctttgatgatcccctgaatgcctttggaggccagtagagcacacagggtatccacatgttaccctgcagctacattgttgagttagtgatgatattgtatatgctcatggtcttaactggattacaaaaagcaaatactagaacagctagctcatcttttacccaatgtacttagtatttttctgcactggtttaatcatgcttaatactacaaaacaaaaataaatatttcacagtggttggtttgttttgtttttaaaccacagtttgatttagttagccttgctggggccataatatgcttcagggtgtgtaaaagaagaaatctctttgtggctttcatgggcagggaatctcagagatagcaaatgccacctgaccagaagtctttgttatatggatgggaaccctaacttagggcttgggcaggggaaagagaaagaagatgagagattatacttcatgagtcttagcaatatgggagcaggttttcactgaattctgagggtgcctctgcatgtcctccaaggcaaagtttggcaaactgtggcccccccactgtcatattttgttaataaaattttattggaacacaatcacaaaaaaatg

SEQ ID NO: 456721 - DNA, 3689 bp, Homo sapiens
agggtgtcagtggactgtgccaggggtttagtgtgaaattcatcagactgcctcacactttgttaaatagtgtcagataaactccatgccagtttggagacacagcagatgccaacccgggaatttgagttctggacccatctttaatactccctgcaaaacattgctttctgtttgctagatgaagaggataacttattcgcaccccccaagctgaccgacgaggacttctcgccatttggctctggaggtggcctgttcagtggcggcaaggggctatttgatgatgaggacgaggagagtgacctcttcacggaagccccccaggatcggcaagctggagcctctgttaaggaggagtcttcatcatccaaacctggaaagaaaatcccagcaggagctgtttctgtatttttaggagacacggatgtgtttggtgctgcctccgttccatcactgaaggagccacagaagcctgagcagcccactccaaggaaaagcccctatggtccccctcccactggcctctttgatgatgatgatggtgatgatgatgacgactttttctcggcaccccacagcaaaccttctaaaacacgcaaagtccaatccactgccgatatctttggtgacgaagaaggagatctgttcaaagaaaaagccgtagcatcgccagaagccactgtgagtcagacagatgaaaataaagcaagagcagaaaaaaaggatttgttttcttctcaaagtgcgagtaacttaaaaggtgcatctctgctgcctggcaagctccccacgtcggtttccctgtttgatgatgaagatgaagaggataatctttttgggggtacagctgctaagaagcagacattgtctctacaagctcagagagaagagaaagcaaaagcctccgagctctccaaaaagaaagcatctgccctgttgttcagcagtgatgaggaggaccagtggaatattcctgcttcacagacccacttagcatctgacagcaggtctaaaggagaacccagggattctgggaccctccagagccaggaggccaaggctgtgaaaaagaccagtctctttgaggaagacaaagaagatgatctttttgccattgccaaggacagccaaaagaagacccagagagtgtcactcctctttgaagacgatgttgatagcggaggctctctgtttggctctcctcccacatctgttcctcctgcaacaaagaaaaaagagactgtctctgaggcaccacctttgctgttcagcgatgaagaagagaaggaggcacaacttggagtgaagtctgtggataagaaggttgagagtgccaaggagtcattaaaatttgggagaactgatgtggctgagtcagaaaaggaaggacttttgactagatctgctcaggaaacagtcaagcattctgatttattttcttcatcatccccatgggacaaaggaaccaagcctagaaccaaaactgttcttagcttgtttgatgaggaagaggataaaatggaagatcaaaacattatccaggctccacagaaagaagtaggaaagggctgcgatcctgatgcccaccccaagagcacaggtgtcttccaggatgaagagctgcttttcagccacaagctccaaaaggacaatgacccagatgttgacctttttgctggcaccaaaaaaaccaagctgttagagccaagtgttgggagcctgtttggggatgatgaagatgatgatcttttcagctctgccaagtcccagcctttggtacaagagaaaaagagagtagtgaaaaaagaccactctgttaactctttcaaaaaccagaaacatcctgaatccattcaaggtagtaaagaaaaaggcatatggaagccggaaacacctcaggactcatcaggtctcgctccatttaaaaccaaagaaccatccactcggatcgggaagatacaagcaaatttagcgatcaacccagcggccttgctgcccacagcggcttcccagatctctgaagtaaagcctgttttgccagaattggcttttccttcatctgaacacagaaggagccacggtctggaaagtgtgcctgtccttcccgggagtggggaggccggtgtgagttttgatcttccagctcaggcagacaccttacacagtgcaaacaagagccgtgtcaagatgagagggaagcgtagaccgcagacccgtgcagctaggcggctggctgctcaggagtccagcgaggctgaggacatgagcgtccccagaggacccattgcacagtgggctgatggcgccatttccccaaatggccatcggccacagctcagagcagccagtggagaagacagcactgaggaggccctggcagctgccgctgcaccttgggaaggtggtcctgtgcctggagtggacacaagcccctttgcaaagtctctgggtcattccagaggggaggctgacctttttgattctggggacattttttccacgggcactggatctcagtccgtggagagaacaaaacccaaggcaaagatagcagagaatcctgccaacccaccagtgggtggtaaagcaaagagccccatgtttcctgctctaggcgaggccagcagtgatgatgatctctttcagtctgctaaaccaaaaccagcaaagaaaacaaatccctttcctctcctggaagatgaggatgacctctttacagatcagaaagtcaagaagaatgagacaaaatccagtagtcagcaggatgtcatattaacaacacaagatatttttgaggatgatatatttgctacggaagcaattaaaccctctcagaaaaccagagagaaggagaaaacattggaatctaatttatttgatgataacattgatatctttgctgacttaactgtaaaaccaaaagaaaagtccaaaaagaaagtggaagccaagtctatatttgatgatgatatggatgacatcttctccactggtatccaggctaagacaaccaaaccaaaaagccgatctgcacaggccgcacctgaaccaagatttgaacacaaggtgtccaacatctttgatgatcccctgaatgcctttggaggccagtagagcacacagggtatccacatgttaccctgcagctacattgttgagttagtgatgatattgtatatgctcatggtcttaactggattacaaaaagcaaatactagaacagctagctcatcttttacccaatgtacttagtatttttctgcactggtttaatcatgcttaatactacaaaacaaaaataaatatttcacagtggttggtttgttttgtttttaaaccacagtttgatttagttagccttgctggggccataatatgcttcagggtgtgtaaaagaagaaatctctttgtggctttcatgggcagggaatctcagagatagcaaatgccacctgaccagaagtctttgttatatggatgggaaccctaacttagggcttgggcaggggaaagagaaagaagatgagagattatacttcatgagtcttagcaatatgggagcaggttttcactgaattctgagggtgcctctgcatgtcctccaaggcaaagtttggcaaactgtggcccccccactgtcatattttgttaataaaattttattggaacacaatcacaaaaaaatg

SEQ ID NO: 456722 - DNA, 1949 bp, Homo sapiens
atcatcttcatcatccccaaacaggctcccaacacttggctctacctgtttggggatgatgaagatgatgatcttttcagctctgccaagtcccagcctttggtacaagagaaaaagagagtagtgaaaaaagaccactctgttaactctttcaaaaaccagaaacatcctgaatccattcaaggtagtaaagaaaaaggcatatggaagccggaaacacctcaggcaaatttagcgatcaacccagcggccttgctgcccacagcggcttcccagatctctgaagtaaagcctgttttgccagaattggcttttccttcatctgaacacagaaggagccacggtctggaaagtgtgcctgtccttcccgggagtggggaggccggtgtgagttttgatcttccagctcaggcagacaccttacacagtgcaaacaagagccgtgtcaagatgagagggaagcgtagaccgcagacccgtgcagctaggcggctggctgctcaggagtccagcgaggctgaggacatgagcgtccccagaggacccattgcacagtgggctgatggcgccatttccccaaatggccatcggccacagctcagagcagccagtggagaagacagcactgaggaggccctggcagctgccgctgcaccttgggaaggtggtcctgtgcctggagtggacacaagcccctttgcaaagtctctgggtcattccagaggggaggctgacctttttgattctggggacattttttccacgggcactggatctcagtccgtggagagaacaaaacccaaggcaaagatagcagagaatcctgccaacccaccagtgggtggtaaagcaaagagccccatgtttcctgctctaggcgaggccagcagtgatgatgatctctttcagtctgctaaaccaaaaccagcaaagaaaacaaatccctttcctctcctggaagatgaggatgacctctttacagatcagaaagtcaagaagaatgagacaaaatccagtagtcagcaggatgtcatattaacaacacaagatatttttgaggatgatatatttgctacggaagcaattaaaccctctcagaaaaccagagagaaggagaaaacattggaatctaatttatttgatgataacattgatatctttgctgacttaactgtaaaaccaaaagaaaagtccaaaaagaaagtggaagccaagtctatatttgatgatgatatggatgacatcttctccactggtatccaggctaagacaaccaaaccaaaaagccgatctgcacaggccgcacctgaaccaagatttgaacacaaggtgtccaacatctttgatgatcccctgaatgcctttggaggccagtagagcacacagggtatccacatgttaccctgcagctacattgttgagttagtgatgatattgtatatgctcatggtcttaactggattacaaaaagcaaatactagaacagctagctcatcttttacccaatgtacttagtatttttctgcactggtttaatcatgcttaatactacaaaacaaaaataaatatttcacagtggttggtttgttttgtttttaaaccacagtttgatttagttagccttgctggggccataatatgcttcagggtgtgtaaaagaagaaatctctttgtggctttcatgggcagggaatctcagagatagcaaatgccacctgaccagaagtctttgttatatggatgggaaccctaacttagggcttgggcaggggaaagagaaagaagatgagagattatacttcatgagtcttagcaatatgggagcaggttttcactgaattctgagggtgcctctgcatgtcctccaaggcaaagtttggcaaactgtggcccccccactgtcatattttgttaataaaattttattggaacacaatcacaaaaaaatg

SEQ ID NO: 456723 - DNA, 1196 bp, Homo sapiens
gcaacgccggggccagagtcttaaaaccgagggcccgcaggggtccccgcggccgccgcgatgcagaaatacgagaaactggaaaagattggggaaggcacctacggaactgtgttcaaggccaaaaaccgggagactcatgagatcgtggctctgaaacgggtgaggctggatgacgatgatgagggtgtgccgagttccgccctccgggagatctgcctactcaaggagctgaagcacaagaacatcgtcaggcttcatgacgtcctgcacagcgacaagaagctgactttggtttttgaattctgtgaccaggacctgaagaagtattttgacagttgcaatggtgacctcgatcctgagattgtaaagtcattcctcttccagctactaaaagggctgggattctgtcatagccgcaatgtgctacacagggacctgaagccccagaacctgctaataaacaggaatggggagctgaaattggctgattttggcctggctcgagcctttgggattcccgtccgctgttactcagctgaggtggtcacactgtggtaccgcccaccggatgtcctctttggggccaagctgtactccacgtccatcgacatgtggtcagccggctgcatctttgcagagctggccaatgctgggcggcctctttttcccggcaatgatgtcgatgaccagttgaagaggatcttccgactgctggggacgcccaccgaggagcagtggccctctatgaccaagctgccagactataagccctatccgatgtacccggccacaacatccctggtgaacgtcgtgcccaaactcaatgccacagggagggatctgctgcagaaccttctgaagtgtaaccctgtccagcgtatctcagcagaagaggccctgcagcacccctacttctccgacttctgtccgccctaggccccgggacccccggcctccaggctggggcctggcctatttaagccccctcttgagaggggtgagacagtgggggtgcctggtgcgctgtgctccagcagtgctgggcccagccggggtggggtgcctgagcccgaatttctcactccctttgtggactttatttaatttcataaattggctcctttcccacaaaaaaaaaagggggcggacaaagaatcctcgagggccagtagagtaccgttttgtcaagggtc

SEQ ID NO: 456724 - DNA, 1133 bp, Homo sapiens
gcaacgccggggccagagtcttaaaaccgagggcccgcaggggtccccgcggccgccgcgatgcagaaatacgagaaactggaaaagattggggaaggcacctacggaactgtgttcaaggccaaaaaccgggagactcatgagatcgtggctctgaaacgggtgaggctggatgacgatgatgagggtgtgccgagttccgccctccgggagatctgcctactcaaggagctgaagcacaagaacatcgtcaggcttcatgacgtcctgcacagcgacaagaagctgactttggtttttgaattctgtgaccaggacctgaagaagtattttgacagttgcaatggtgacctcgatcctgagattgtaaagtcattcctcttccagctactaaaagggctgggattctgtcatagccgcaatgtgctacacagggacctgaagccccagaacctgctaataaacaggaatggggagctgaaattggctgattttggcctggctcgagcctttgggattcccgtccgctgttactcagctgaggtggtcacactgtggtaccgcccaccggatgtcctctttggggccaagctgtactccacgtccatcgacatgtggtcagccggctgcatctttgcagagctggccaatgctgggcggcctctttttcccggcaatgatgtcgatgaccagttgaagaggatcttccgactgctggggacgcccaccgaggagcagtggccctctatgaccaagctgccagactataagccctatccgatgtacccggccacaacatccctggtgaacgtcgtgcccaaactcaatgccacagggagggatctgctgcagaaccttctgaagtgtaaccctgtccagcgtatctcagcagaagaggccctgcagcacccctacttctccgacttctgtccgccctaggccccgggacccccggcctccaggctggggcctggcctatttaagccccctcttgagaggggtgagacagtgggggtgcctggtgcgctgtgctccagcagtgctgggcccagccggggtggggtgcctgagcccgaatttctcactccctttgtggactttatttaatttcataaattggctcctttcccaca

SEQ ID NO: 456725 - DNA, 543 bp, Homo sapiens
gcaacgccggggccagagtcttaaaaccgagggcccgcaggggtccccgcggccgccgcgatgcagaaatacgagaaactggaaaagattggggaaggcacctacggaactgtgttcaaggccaaaaaccgggagactcatgagatcgtggctctgaaacgggtgaggctggatgacgatgatgagggtgtgccgagttccgccctccgggagatctgcctactcaaggagctgaagcacaagaacatcgtcaggcttcatgacgtcctgcacagcgacaagaagctgactttggtttttgaattctgtgaccaggacctgaagaagtattttgacagttgcaatggtgacctcgatcctgagattgtaacttcccttcagaacttgaagtttctcccactgcctcctctccagtggtctcccaggtgccagacccaaaagcttttcctacagtgataccctttatttttacttccccttgactcatatgttttaacatgattttaacaaactgcacttattaagaaatgtgtttgccctgta

SEQ ID NO: 456726 - DNA, 1172 bp, Homo sapiens
gcaacgccggggccagagtcttaaaaccgagggcccgcaggggtccccgcggccgccgcgatgcagaaatacgagaaactggaaaagattggggaaggcacctacggaactgtgttcaaggccaaaaaccgggagactcatgagatcgtggctctgaaacggggtgtgccgagttccgccctccgggagatctgcctactcaaggagctgaagcacaagaacatcgtcaggcttcatgacgtcctgcacagcgacaagaagctgactttggtttttgaattctgtgaccaggacctgaagaagtattttgacagttgcaatggtgacctcgatcctgagattgtaaagtcattcctcttccagctactaaaagggctgggattctgtcatagccgcaatgtgctacacagggacctgaagccccagaacctgctaataaacaggaatggggagctgaaattggctgattttggcctggctcgagcctttgggattcccgtccgctgttactcagctgaggtggtcacactgtggtaccgcccaccggatgtcctctttggggccaagctgtactccacgtccatcgacatgtggtcagccggctgcatctttgcagagctggccaatgctgggcggcctctttttcccggcaatgatgtcgatgaccagttgaagaggatcttccgactgctggggacgcccaccgaggagcagtggccctctatgaccaagctgccagactataagccctatccgatgtacccggccacaacatccctggtgaacgtcgtgcccaaactcaatgccacagggagggatctgctgcagaaccttctgaagtgtaaccctgtccagcgtatctcagcagaagaggccctgcagcacccctacttctccgacttctgtccgccctaggccccgggacccccggcctccaggctggggcctggcctatttaagccccctcttgagaggggtgagacagtgggggtgcctggtgcgctgtgctccagcagtgctgggcccagccggggtggggtgcctgagcccgaatttctcactccctttgtggactttatttaatttcataaattggctcctttcccacaaaaaaaaaagggggcggacaaagaatcctcgagggccagtagagtaccgttttgtcaagggtc

SEQ ID NO: 456727 - DNA, 7044 bp, Homo sapiens
gggggaagggtagtggagagagaggaagcaggagggagggagaaaaagagagagactgactgtatctggggattctggcaaggtgaagagctggtctgtttggcaggaccttcccatctgggatccatctgtgtttccctggaatgggacaggcagctctagtcagtgagaaatcgcagatgtgagagagctgacacatgtccagctaatgaaaggaggaggaaggctggtctccgattgagctttgaagattaggaggagaaaaagaggagctttggaatatctatttcaaataaatttggtgtatttaagaatctggattgtttataatttgggcatttgggaggtggggttttgccatgttgcccaggtgggtctcaaactcctgggctaaagcgatcttcccatgttggctgcccaaagtgctgggattacaggcaagagccaccataccagttcctgtctagatattatgatgaagattgaggatggtagtttttgtggagcacaatcctgactgtacctgtgatgttgcattcatcttttggaacataagcagatcaccaggtgaatggctaaagaatctggaataagcttgaaagaaatacaggtcctggcaaggcaatggaaagggtctcaccctgtcactcaggctggagcacagtggtgtgatcacagctcactgcagcctcgacctcctggactcagttggtcctgagaaaagggtgccagcgatgcctggatcgcctgtggaagtgaagatacagtccagatcctcacctcccaccatgccacccctcccaccaataaatcctggaggaccgaggccagtgtccttcactcctactgcattaagcaatggcatcaaccattctcctcctaccctgaatggtgccccatcaccgccacagagattcagcaatggtcctgcctcctccacatcatctgcactcacaaatcagcaattgccagccacttgtggtgctcgacaactcagcaagttgaaacgctttcttaccactctgcaacagtttggcaatgacatctcccctgagattggggagaaggtgcggactcttgttcttgcactggtgaactcaacagtgacaattgaggaattccactgtaagctccaagaagccacaaactttccccttcgtccttttgtgattccatttctcaaggccaacctgcccctgctgcagcgggaactgctgcactgcgctcgggcggccaagcagaccccatcccagtacctggctcagcacgaacaccttctgctcaacacaagcattgcatcgcctgctgactcgtcagagttgctcatggaggtgcacggaaatgggaagaggcccagtccagagaggagagaagagaatagttttgatagagacacaattgctcctgagcctcctgccaagagagtatgtaccatcagccctgctcctcggcacagtcctgctctcactgtgcccctcatgaatcccgggggccaattccatcctacccctccacctcttcagcattacaccttagaggatattgcaacttctcacctgtatcgggaacccaacaagatgctagagcatcgagaagttcgtgatagacaccacagtcttggtctaaatggaggctatcaagatgagttggtagatcatcgtttgacagaaagggaatgggctgatgaatggaaacatcttgaccatgcgctgaattgcattatggaaatggtagagaaaacaaggcgctctatggcagttctgcggcgctgtcaggaatcagatcgtgaagaactcaactactggaaaagacggtacaatgaaaacacagagctgaggaaaacggggaccgagttggtctccaggcagcacagccctgggagtgcagattctctcagcaatgattctcagagagagttcaacagcaggccaggtacaggatacgtacctgtggagttttggaaaaaaacagaagaagctgtgaataaggtgaaaattcaggccatgtcagaagtacagaaggccgtcgctgaggcagagcagaaagcctttgaagtgattgcaacagagagagcacgaatggagcaaaccatagcggatgtcaagcggcaggccgcagaggatgctttcctcgtcatcaatgagcaagaggagtccacggagaactgctggaactgtggccgcaaagccagcgagacatgcagtggctgcaatatcgcgcgatactgtggctctttctgccagcacaaggactgggagcggcaccaccgcctctgtggtcagaacctgcatggccagagcccccacggccagggccggccgctgcttcctgtaggcaggggctcctctgccaggtccgccgactgcagcgtgcccagcccagccctcgacaagacctcggcaaccacatcgcgttcctcaacacctgcttctgtgacagctatcgacaccaacggactctgagccccggactctgcttaccctgatggctgctcagcaccacagagtgcttgggctgagggactgactgttggaacccgtgcatgtagctgccgggtcatcagcaagaaatgaattggaggcaggaagagtccaagcctgaataataacaccccacagcctctctgtgcacttgctgtctgcggagccagtgtgccattctctgcacatgggcagccagcctgagctgcctcctccatggctttcctggtttgttcctctctccactgaagctgacttagccggccccttttcagtgtagaccaccagctcccctccccatctccttgagtcagcagactgtccaatgtgctcagccaggctggaggcggcaggcggcaggcagcaggctgtggaggaggcccctcggtcagggagcggcctgcctcacccctgaatagctccttcggccccatctccatcctcagcagatgacactgattggcctcacggggacttgggtaagcaacaggcggcattcaggactcttctcaaccctgctgttcagacttgataagatctcagagtccacaggaaagaagtcactgttgcaataaaagcacccgtagtagcaaaaacataaaacaaataaaacttcccccacatcacagatgattttggacaagattttccaaccttgctggctactttagtttgggacctgttttttttctcatttgattttgcttgtgcagaaaatagtttccagcacatggattgatctgagagagaatgaggctcagttgtggatagtctgttttctctgagcatgttggccaactagtatcgtcaaattattgagtggatcatctcttggaaatgcagaacttctgccaccacttggctatttgcacagtcatcttgttctgtgtccttttatctctcagaccacacacatctggaacgctgtgggcatcttctgcccatgggctccatttggcacctgctgagccacagttgtcctgctggatgtgctgtgcaggttggtaggacttgcccccactgtcaaggcctggtctcatctgaaaagccctcctggacctcaaagaattcttcagacctcatagttacaggtcattatatctactatgttgatttatcatcaggcacacaacttctgtttccttctcttgtgttatctgatagcgtccctccttgagctcatcagaaaggttttatgaaatgtgaaccattttgggaaaagctgatcaatttttcttcctagcttcccattttcaaatgggacatcactcatatccctttcagaatgttaggaactgcctcccacattcttccctgtctttttgggttttgttttttgttgttgttgtggttttttaacacaaagcctgggcaacagagcaaaactctgtctcaaaaaaaaaaaaaaaaaggcaaaattaaagaatttcaagtccctaatttactctaaccaagcattttcagtcttacaaagaaatctagtgcacgacacctttaaaatgcctagatttccattgcctaaagtaaggtgtgaccagtgaaacaacagcagagaatcatgttcctttgctgtggaacacataagccccacagttttccagtcagcctaatacatgggtatcccccgaccccatctgcctccttaagccacagtccttggtggggaactctaagggggacggagtcagtaccccggacagggccacatttgcatgagacatggctgtctcacaggtcacagagccattacaacagcttactagtttttcatggatttgttggattaacaccttaagcaggttttttattgttattttgtttgtttgtttgttttgagacgggagtttctctcttgtctcccaggctggagtgcaatcgcgcaatctcggctcacggtaacctctgcctcccaggttcgggcgagtctcctgcctcagccttctgagtagctgggattgcaggcatgcgccaccacgcccaactgattttgtatttttagtagagacggggtttctccttgttggtcaggctggtctcaaaccccggacctcaggtgatccccccaccttggcctcccaaagtgccaggattacaggcatgagccactgtgtccggtcttgagcaggtttttaaaatctccagtggccataaaactagccagggtagctcatgcttttactggttggaataaggagccaaaaccaacaaaataatatttattagggctcgatgcccatttctgtggctaaggcttaggtttggtgtgcagagcctggcctgctcttgtgggctgtggttgctgtgacagtttcgttttctgaatctttgtaatgctcttccaccctgctcgtgctgcccagaggctgatctgcaaacctgggcagtattccacactgaagctcagtttgcaaaccttctgctgtgttaattctggtcagtttcacacagaagtcacgagggcctctgcccaggaccttctattcacatttcaagaatccctttctgaaattctccaactctctggtcaggaggaggagcaccattggggcggggtaggcagctagaggcgcaggagcgaatccaggttccttgcgtggttcccagcctctgctgacagcacctcagctaccaggtggggagtggaaattcagcctgcttagaggactgacctctacagttcatatttgcagtgacataaaaggcaaagaggagctggcatggtggtacagaaggtatcagtcaagcgcaggctcttcagaaacctagaaactaaaaagagatgcaacatgtgactggccatcagccagacatgtctagggtgagaccagtgctcagcaccacccgccaaggaacactgatgagttgtgggacattatggtcggccaagtgaggaatgattgcagggaccagagaagaccaaagatgccagatgtccccagagtttcttgagggctgggtttcacgtctttgcttgtcctttttgtccccacttgcctgcaccgtgcctgactcatccagtggggaaggtgactcaagaagttgtttaagcctaggcctaggcagtccacttcgggaggtgggggcactccacactggggggccctgcagctccagggctggtgctctagcagatccgctcaggcacggttgggtgaccgtggggtcaccgattgcgtagattatttctagggcagtgctgggttagaaatgtctgtctggaaacaggacacatcttgccaccacaagtccacacctggccttggctgctgcccgctctctgcagcgtggatttcctttgcccatttgggccagaaggtcaccaggagttcatcactgcttagtgtcaacttgacatcttcagcttccagacagaaaacccatgctttactttgtacagccctgtcccagagttagtaagcctcggcttgtcacctgcttgcaaagggtatagacatcattctgggtagttctagaggatatcgcaacaagtgcgtttgaaggttcagcacagctggaattgtacggtagtgagctcttcaaaatgaaaacagaatgaccggatggccatctgtcctggaaactgtagaattgaataaatcactgaaaatagaacacttcttggaggctttcttcagaactgaactagaaacaaggtttccaggctcccaggtcagtagaccaaaccaacttccttagatttttttttttaagctgtttgcagaaaactgggtggtagcgtgtctgaaccaaacggaagaatagccagcggagcatggactgttccagcacgggccagatggccagctgtcgagagcagccctgcccagattgcggtgggggctgtgccagcggctccgcagggcccttccaactctggagtgtctgtagttcttgtgaaaccaaaacgttgactacctgcctctttcctcgggcatcgacgtgctcatttccaaagatgatggtgcaggtgaccttttccatcgtgagctaagagaaggttaggaggcctgaggggcgggccttgtgtcccctcctccccctccacagcccctgaggtggagcttccctcacagaccccatctggtcgagcctacggctgcccagtgtacactcagtgatgcttataccaaatagggcatgtgcgctggtgtctgttggggacagccccatccctaccttggagtcggcagagaagcagcaataagcattaggcgaatgattgaaagggctgctgcgccaagaggccttcagtccccttaacgtggctttccaacttcctgacgaggctacaaaggctccgctcacaaaagaaagccaataatgtaaataaatagaaaacgaagcctccacgcgtggtttttaaagggggatgatgaatgtgacaccacccacagaatgcattagaatctggtttttctgtgctttgtcattttactctgataggaatttttgttacctaactctgtgcataacttatttaatgtactgtataaatgaaccaaaactgttaaatatgtatttagtttgttctacttaaagtagtcaataaaaaggctatattcct

SEQ ID NO: 456728 - DNA, 691 bp, Homo sapiens
tgaccagctaatgtttgtttgtttgtttgtttgtttgtttgtttgtttgtttttggagagatgaggttttaccatgttgcccaggctggtctcaaacttgtgagctcaagagatctgcccgcctcaacctcccaaagtgctgggattatatggatgtgagccaccatgcccagcccaatgtctcagactttctgtggttatttttgctttattccaatacctagctgcataatacatctaaaatctatgggagtagcttccagacatgagtatttttcgggaactcttcagatgcctgcacacccggtaagaaactctactctagagaatttatgggtcgactgttccagaagcctcaggagtacagttctgccttttccttgatgctgtttgtagaaagaattggaaaaaaaaaaaaaagaaaagaaaagaaaaaacaaaaaaaaagaaatacaatctgccaaatgccttttatgtcaaacgcatttttttctgatctgagaagttttgaaaaagtatagcaattaattattaatatttgccaatgactcacctttactgagattaaaattaatatgaatttattttagaaaactccctatgagtggctatcaaaatattctatgggttatcaaagaaggcaatatcaacaatagtggataggctttaatgacatttttttaaaagtaaa

SEQ ID NO: 456729 - DNA, 6968 bp, Homo sapiens
gggggaagggtagtggagagagaggaagcaggagggagggagaaaaagagagagactgactgtatctggggattctggcaaggtgaagagctggtctgtttggcaggaccttcccatctgggatccatctgtgtttccctggaatgggacaggcagctctagtcagtgagaaatcgcagatgtgagagagctgacacatgtccagctaatgaaaggaggaggaaggctggtctccgattgagctttgaagattaggaggagaaaaagaggagctttggaatatctatttcaaataaatttggtgtatttaagaatctggattgtttataatttgggcatttgggaggtggggttttgccatgttgcccaggtgggtctcaaactcctgggctaaagcgatcttcccatgttggctgcccaaagtgctgggattacaggcaagagccaccataccagttcctgtctagatattatgatgaagattgaggatggtagtttttgtggagcacaatcctgactgtacctgtgatgttgcattcatcttttggaacataagcagatcaccaggtgaatggctaaagaatctggaataagcttgaaagaaatacaggtcctggcaaggcaatggaaagttggtcctgagaaaagggtgccagcgatgcctggatcgcctgtggaagtgaagatacagtccagatcctcacctcccaccatgccacccctcccaccaataaatcctggaggaccgaggccagtgtccttcactcctactgcattaagcaatggcatcaaccattctcctcctaccctgaatggtgccccatcaccgccacagagattcagcaatggtcctgcctcctccacatcatctgcactcacaaatcagcaattgccagccacttgtggtgctcgacaactcagcaagttgaaacgctttcttaccactctgcaacagtttggcaatgacatctcccctgagattggggagaaggtgcggactcttgttcttgcactggtgaactcaacagtgacaattgaggaattccactgtaagctccaagaagccacaaactttccccttcgtccttttgtgattccatttctcaaggccaacctgcccctgctgcagcgggaactgctgcactgcgctcgggcggccaagcagaccccatcccagtacctggctcagcacgaacaccttctgctcaacacaagcattgcatcgcctgctgactcgtcagagttgctcatggaggtgcacggaaatgggaagaggcccagtccagagaggagagaagagaatagttttgatagagacacaattgctcctgagcctcctgccaagagagtatgtaccatcagccctgctcctcggcacagtcctgctctcactgtgcccctcatgaatcccgggggccaattccatcctacccctccacctcttcagcattacaccttagaggatattgcaacttctcacctgtatcgggaacccaacaagatgctagagcatcgagaagttcgtgatagacaccacagtcttggtctaaatggaggctatcaagatgagttggtagatcatcgtttgacagaaagggaatgggctgatgaatggaaacatcttgaccatgcgctgaattgcattatggaaatggtagagaaaacaaggcgctctatggcagttctgcggcgctgtcaggaatcagatcgtgaagaactcaactactggaaaagacggtacaatgaaaacacagagctgaggaaaacggggaccgagttggtctccaggcagcacagccctgggagtgcagattctctcagcaatgattctcagagagagttcaacagcaggccaggtacaggatacgtacctgtggagttttggaaaaaaacagaagaagctgtgaataaggtgaaaattcaggccatgtcagaagtacagaaggccgtcgctgaggcagagcagaaagcctttgaagtgattgcaacagagagagcacgaatggagcaaaccatagcggatgtcaagcggcaggccgcagaggatgctttcctcgtcatcaatgagcaagaggagtccacggagaactgctggaactgtggccgcaaagccagcgagacatgcagtggctgcaatatcgcgcgatactgtggctctttctgccagcacaaggactgggagcggcaccaccgcctctgtggtcagaacctgcatggccagagcccccacggccagggccggccgctgcttcctgtaggcaggggctcctctgccaggtccgccgactgcagcgtgcccagcccagccctcgacaagacctcggcaaccacatcgcgttcctcaacacctgcttctgtgacagctatcgacaccaacggactctgagccccggactctgcttaccctgatggctgctcagcaccacagagtgcttgggctgagggactgactgttggaacccgtgcatgtagctgccgggtcatcagcaagaaatgaattggaggcaggaagagtccaagcctgaataataacaccccacagcctctctgtgcacttgctgtctgcggagccagtgtgccattctctgcacatgggcagccagcctgagctgcctcctccatggctttcctggtttgttcctctctccactgaagctgacttagccggccccttttcagtgtagaccaccagctcccctccccatctccttgagtcagcagactgtccaatgtgctcagccaggctggaggcggcaggcggcaggcagcaggctgtggaggaggcccctcggtcagggagcggcctgcctcacccctgaatagctccttcggccccatctccatcctcagcagatgacactgattggcctcacggggacttgggtaagcaacaggcggcattcaggactcttctcaaccctgctgttcagacttgataagatctcagagtccacaggaaagaagtcactgttgcaataaaagcacccgtagtagcaaaaacataaaacaaataaaacttcccccacatcacagatgattttggacaagattttccaaccttgctggctactttagtttgggacctgttttttttctcatttgattttgcttgtgcagaaaatagtttccagcacatggattgatctgagagagaatgaggctcagttgtggatagtctgttttctctgagcatgttggccaactagtatcgtcaaattattgagtggatcatctcttggaaatgcagaacttctgccaccacttggctatttgcacagtcatcttgttctgtgtccttttatctctcagaccacacacatctggaacgctgtgggcatcttctgcccatgggctccatttggcacctgctgagccacagttgtcctgctggatgtgctgtgcaggttggtaggacttgcccccactgtcaaggcctggtctcatctgaaaagccctcctggacctcaaagaattcttcagacctcatagttacaggtcattatatctactatgttgatttatcatcaggcacacaacttctgtttccttctcttgtgttatctgatagcgtccctccttgagctcatcagaaaggttttatgaaatgtgaaccattttgggaaaagctgatcaatttttcttcctagcttcccattttcaaatgggacatcactcatatccctttcagaatgttaggaactgcctcccacattcttccctgtctttttgggttttgttttttgttgttgttgtggttttttaacacaaagcctgggcaacagagcaaaactctgtctcaaaaaaaaaaaaaaaaaggcaaaattaaagaatttcaagtccctaatttactctaaccaagcattttcagtcttacaaagaaatctagtgcacgacacctttaaaatgcctagatttccattgcctaaagtaaggtgtgaccagtgaaacaacagcagagaatcatgttcctttgctgtggaacacataagccccacagttttccagtcagcctaatacatgggtatcccccgaccccatctgcctccttaagccacagtccttggtggggaactctaagggggacggagtcagtaccccggacagggccacatttgcatgagacatggctgtctcacaggtcacagagccattacaacagcttactagtttttcatggatttgttggattaacaccttaagcaggttttttattgttattttgtttgtttgtttgttttgagacgggagtttctctcttgtctcccaggctggagtgcaatcgcgcaatctcggctcacggtaacctctgcctcccaggttcgggcgagtctcctgcctcagccttctgagtagctgggattgcaggcatgcgccaccacgcccaactgattttgtatttttagtagagacggggtttctccttgttggtcaggctggtctcaaaccccggacctcaggtgatccccccaccttggcctcccaaagtgccaggattacaggcatgagccactgtgtccggtcttgagcaggtttttaaaatctccagtggccataaaactagccagggtagctcatgcttttactggttggaataaggagccaaaaccaacaaaataatatttattagggctcgatgcccatttctgtggctaaggcttaggtttggtgtgcagagcctggcctgctcttgtgggctgtggttgctgtgacagtttcgttttctgaatctttgtaatgctcttccaccctgctcgtgctgcccagaggctgatctgcaaacctgggcagtattccacactgaagctcagtttgcaaaccttctgctgtgttaattctggtcagtttcacacagaagtcacgagggcctctgcccaggaccttctattcacatttcaagaatccctttctgaaattctccaactctctggtcaggaggaggagcaccattggggcggggtaggcagctagaggcgcaggagcgaatccaggttccttgcgtggttcccagcctctgctgacagcacctcagctaccaggtggggagtggaaattcagcctgcttagaggactgacctctacagttcatatttgcagtgacataaaaggcaaagaggagctggcatggtggtacagaaggtatcagtcaagcgcaggctcttcagaaacctagaaactaaaaagagatgcaacatgtgactggccatcagccagacatgtctagggtgagaccagtgctcagcaccacccgccaaggaacactgatgagttgtgggacattatggtcggccaagtgaggaatgattgcagggaccagagaagaccaaagatgccagatgtccccagagtttcttgagggctgggtttcacgtctttgcttgtcctttttgtccccacttgcctgcaccgtgcctgactcatccagtggggaaggtgactcaagaagttgtttaagcctaggcctaggcagtccacttcgggaggtgggggcactccacactggggggccctgcagctccagggctggtgctctagcagatccgctcaggcacggttgggtgaccgtggggtcaccgattgcgtagattatttctagggcagtgctgggttagaaatgtctgtctggaaacaggacacatcttgccaccacaagtccacacctggccttggctgctgcccgctctctgcagcgtggatttcctttgcccatttgggccagaaggtcaccaggagttcatcactgcttagtgtcaacttgacatcttcagcttccagacagaaaacccatgctttactttgtacagccctgtcccagagttagtaagcctcggcttgtcacctgcttgcaaagggtatagacatcattctgggtagttctagaggatatcgcaacaagtgcgtttgaaggttcagcacagctggaattgtacggtagtgagctcttcaaaatgaaaacagaatgaccggatggccatctgtcctggaaactgtagaattgaataaatcactgaaaatagaacacttcttggaggctttcttcagaactgaactagaaacaaggtttccaggctcccaggtcagtagaccaaaccaacttccttagatttttttttttaagctgtttgcagaaaactgggtggtagcgtgtctgaaccaaacggaagaatagccagcggagcatggactgttccagcacgggccagatggccagctgtcgagagcagccctgcccagattgcggtgggggctgtgccagcggctccgcagggcccttccaactctggagtgtctgtagttcttgtgaaaccaaaacgttgactacctgcctctttcctcgggcatcgacgtgctcatttccaaagatgatggtgcaggtgaccttttccatcgtgagctaagagaaggttaggaggcctgaggggcgggccttgtgtcccctcctccccctccacagcccctgaggtggagcttccctcacagaccccatctggtcgagcctacggctgcccagtgtacactcagtgatgcttataccaaatagggcatgtgcgctggtgtctgttggggacagccccatccctaccttggagtcggcagagaagcagcaataagcattaggcgaatgattgaaagggctgctgcgccaagaggccttcagtccccttaacgtggctttccaacttcctgacgaggctacaaaggctccgctcacaaaagaaagccaataatgtaaataaatagaaaacgaagcctccacgcgtggtttttaaagggggatgatgaatgtgacaccacccacagaatgcattagaatctggtttttctgtgctttgtcattttactctgataggaatttttgttacctaactctgtgcataacttatttaatgtactgtataaatgaaccaaaactgttaaatatgtatttagtttgttctacttaaagtagtcaataaaaaggctatattcct

SEQ ID NO: 456730 - DNA, 7484 bp, Homo sapiens
gggggaagggtagtggagagagaggaagcaggagggagggagaaaaagagagagactgactgtatctggggattctggcaaggtgaagagctggtctgtttggcaggaccttcccatctgggatccatctgtgtttccctggaatgggacaggcagctctagtcagtgagaaatcgcagatgtgagagagctgacacatgtccagctaatgaaaggaggaggaaggctggtctccgattgagctttgaagattaggaggagaaaaagaggagctttggaatatctatttcaaataaatttggtgtatttaagaatctggattgtttataatttgggcatttgggttggtcctgagaaaagggtgccagcgatgcctggatcgcctgtggaagtgaagatacagtccagatcctcacctcccaccatgccacccctcccaccaataaatcctggaggaccgaggccagtgtccttcactcctactgcattaagcaatggcatcaaccattctcctcctaccctgaatggtgccccatcaccgccacagagattcagcaatggtcctgcctcctccacatcatctgcactcacaaatcagcaattgccagccacttgtggtgctcgacaactcagcaagttgaaacgctttcttaccactctgcaacagtttggcaatgacatctcccctgagattggggagaaggtgcggactcttgttcttgcactggtgaactcaacagtgacaattgaggaattccactgtaagctccaagaagccacaaactttccccttcgtccttttgtgattccatttctcaaggccaacctgcccctgctgcagcgggaactgctgcactgcgctcgggcggccaagcagaccccatcccagtacctggctcagcacgaacaccttctgctcaacacaagcattgcatcgcctgctgactcgtcagagttgctcatggaggtgcacggaaatgggaagaggcccagtccagagaggagagaagagaatagttttgatagagacacaattgctcctgagcctcctgccaagagagtatgtaccatcagccctgctcctcggcacagtcctgctctcactgtgcccctcatgaatcccgggggccaattccatcctacccctccacctcttcagcattacaccttagaggatattgcaacttctcacctgtatcgggaacccaacaagatgctagagcatcgagaagttcgtgatagacaccacagtcttggtctaaatggaggctatcaagatgagttggtagatcatcgtttgacagaaagggaatgggctgatgaatggaaacatcttgaccatgcgctgaattgcattatggaaatggtagagaaaacaaggcgctctatggcagttctgcggcgctgtcaggaatcagatcgtgaagaactcaactactggaaaagacggtacaatgaaaacacagagctgaggaaaacggggaccgagttggtctccaggcagcacagccctgggagtgcagattctctcagcaatgattctcagagagagttcaacagcaggccaggtacaggatacgtacctgtggagttttggaaaaaaacagaagaagctgtgaataaggtgaaaattcaggccatgtcagaagtacagaaggccgtcgctgaggcagagcagaaagcctttgaagtgattgcaacagagagagcacgaatggagcaaaccatagcggatgtcaagcggcaggccgcagaggatgctttcctcgtcatcaatgagcaagaggagtccacggagaactgctggaactgtggccgcaaagccagcgagacatgcagtggctgcaatatcgcgcgatactgtggctctttctgccagcacaaggactgggagcggcaccaccgcctctgtggtcagaacctgcatggccagagcccccacggccagggccggccgctgcttcctgtaggcaggggctcctctgccaggtccgccgactgcagcgtgcccagcccagccctcgacaagacctcggcaaccacatcgcgttcctcaacacctgcttctgtgacagctatcgacaccaacggactctgagccccggactctgcttaccctgatggctgctcagcaccacagagtgcttgggctgagggactgactgttggaacccgtgcatgtagctgccgggtcatcagcaagaaatgaattggaggcaggaagagtccaagcctgaataataacaccccacagcctctctgtgcacttgctgtctgcggagccagtgtgccattctctgcacatgggcagccagcctgagctgcctcctccatggctttcctggtttgttcctctctccactgaagctgacttagccggccccttttcagtgtagaccaccagctcccctccccatctccttgagtcagcagactgtccaatgtgctcagccaggctggaggcggcaggcggcaggcagcaggctgtggaggaggcccctcggtcagggagcggcctgcctcacccctgaatagctccttcggccccatctccatcctcagcagatgacactgattggcctcacggggacttgggtaagcaacaggcggcattcaggactcttctcaaccctgctgttcagacttgataagatctcagagtccacaggaaagaagtcactgttgcaataaaagcacccgtagtagcaaaaacataaaacaaataaaacttcccccacatcacagatgattttggacaagattttccaaccttgctggctactttagtttgggacctgttttttttctcatttgattttgcttgtgcagaaaatagtttccagcacatggattgatctgagagagaatgaggctcagttgtggatagtctgttttctctgagcatgttggccaactagtatcgtcaaattattgagtggatcatctcttggaaatgcagaacttctgccaccacttggctatttgcacagtcatcttgttctgtgtccttttatctctcagaccacacacatctggaacgctgtgggcatcttctgcccatgggctccatttggcacctgctgagccacagttgtcctgctggatgtgctgtgcaggttggtaggacttgcccccactgtcaaggcctggtctcatctgaaaagccctcctggacctcaaagaattcttcagacctcatagttacaggtcattatatctactatgttgatttatcatcaggcacacaacttctgtttccttctcttgtgttatctgatagcgtccctccttgagctcatcagaaaggttttatgaaatgtgaaccattttgggaaaagctgatcaatttttcttcctagcttcccattttcaaatgggacatcactcatatccctttcagaatgttaggaactgcctcccacattcttccctgtctttttgggttttgttttttgttgttgttgtggttttttaacacaaagctcactctgttgcccaggctggagtgcagtggcatgatcttggctcactgcaacctctgccttccaggttcaagcaattctcctgcctcgagcctcccgagtagctgagattacaggcgcccaccaccacgcccagctagatttttgtattttttagtagagacagggtttcaccatgttggccaggctgatctcgaactcctgacctcaggtgacctgccttggcctcccaaagtgcagggattacaagcgtgagccaccatgcccggcctgtctttttggttttgatgggagtctgaggaccccgacccctcctgctctccatctttgagcctctggcatcctctcacacccagaaatcagttggagtaagtttaattggccctgctccagctggcctttgaagcacaagtttaaatctccaccttctgtgcactgaccagagtctaaaataaaagttgtcagtaccataaaggaaaagggatccacacaggtagccttctccttggatacaggtacatcttactgtaagaatttcaagtcctggctgggcgcagtggctcactcctgtaatcccagcactttgagagaccgaggcaggcagatcacttgaggtcaggaattcaagaccaacctggccaacatggtgaaaccctgtctctaataaaaaaaaaatagaaaaatcagccgggtgtggtggcacacacctgtaatcctagctactcaggaggctgaggcaagagaatctcttgaacctgtgagccagaggttgcagtgagccgagattccaccactgcactccagcctgggcaacagagcaaaactctgtctcaaaaaaaaaaaaaaaaaggcaaaattaaagaatttcaagtccctaatttactctaaccaagcattttcagtcttacaaagaaatctagtgcacgacacctttaaaatgcctagatttccattgcctaaagtaaggtgtgaccagtgaaacaacagcagagaatcatgttcctttgctgtggaacacataagccccacagttttccagtcagcctaatacatgggtatcccccgaccccatctgcctccttaagccacagtccttggtggggaactctaagggggacggagtcagtaccccggacagggccacatttgcatgagacatggctgtctcacaggtcacagagccattacaacagcttactagtttttcatggatttgttggattaacaccttaagcaggttttttattgttattttgtttgtttgtttgttttgagacgggagtttctctcttgtctcccaggctggagtgcaatcgcgcaatctcggctcacggtaacctctgcctcccaggttcgggcgagtctcctgcctcagccttctgagtagctgggattgcaggcatgcgccaccacgcccaactgattttgtatttttagtagagacggggtttctccttgttggtcaggctggtctcaaaccccggacctcaggtgatccccccaccttggcctcccaaagtgccaggattacaggcatgagccactgtgtccggtcttgagcaggtttttaaaatctccagtggccataaaactagccagggtagctcatgcttttactggttggaataaggagccaaaaccaacaaaataatatttattagggctcgatgcccatttctgtggctaaggcttaggtttggtgtgcagagcctggcctgctcttgtgggctgtggttgctgtgacagtttcgttttctgaatctttgtaatgctcttccaccctgctcgtgctgcccagaggctgatctgcaaacctgggcagtattccacactgaagctcagtttgcaaaccttctgctgtgttaattctggtcagtttcacacagaagtcacgagggcctctgcccaggaccttctattcacatttcaagaatccctttctgaaattctccaactctctggtcaggaggaggagcaccattggggcggggtaggcagctagaggcgcaggagcgaatccaggttccttgcgtggttcccagcctctgctgacagcacctcagctaccaggtggggagtggaaattcagcctgcttagaggactgacctctacagttcatatttgcagtgacataaaaggcaaagaggagctggcatggtggtacagaaggtatcagtcaagcgcaggctcttcagaaacctagaaactaaaaagagatgcaacatgtgactggccatcagccagacatgtctagggtgagaccagtgctcagcaccacccgccaaggaacactgatgagttgtgggacattatggtcggccaagtgaggaatgattgcagggaccagagaagaccaaagatgccagatgtccccagagtttcttgagggctgggtttcacgtctttgcttgtcctttttgtccccacttgcctgcaccgtgcctgactcatccagtggggaaggtgactcaagaagttgtttaagcctaggcctaggcagtccacttcgggaggtgggggcactccacactggggggccctgcagctccagggctggtgctctagcagatccgctcaggcacggttgggtgaccgtggggtcaccgattgcgtagattatttctagggcagtgctgggttagaaatgtctgtctggaaacaggacacatcttgccaccacaagtccacacctggccttggctgctgcccgctctctgcagcgtggatttcctttgcccatttgggccagaaggtcaccaggagttcatcactgcttagtgtcaacttgacatcttcagcttccagacagaaaacccatgctttactttgtacagccctgtcccagagttagtaagcctcggcttgtcacctgcttgcaaagggtatagacatcattctgggtagttctagaggatatcgcaacaagtgcgtttgaaggttcagcacagctggaattgtacggtagtgagctcttcaaaatgaaaacagaatgaccggatggccatctgtcctggaaactgtagaattgaataaatcactgaaaatagaacacttcttggaggctttcttcagaactgaactagaaacaaggtttccaggctcccaggtcagtagaccaaaccaacttccttagatttttttttttaagctgtttgcagaaaactgggtggtagcgtgtctgaaccaaacggaagaatagccagcggagcatggactgttccagcacgggccagatggccagctgtcgagagcagccctgcccagattgcggtgggggctgtgccagcggctccgcagggcccttccaactctggagtgtctgtagttcttgtgaaaccaaaacgttgactacctgcctctttcctcgggcatcgacgtgctcatttccaaagatgatggtgcaggtgaccttttccatcgtgagctaagagaaggttaggaggcctgaggggcgggccttgtgtcccctcctccccctccacagcccctgaggtggagcttccctcacagaccccatctggtcgagcctacggctgcccagtgtacactcagtgatgcttataccaaatagggcatgtgcgctggtgtctgttggggacagccccatccctaccttggagtcggcagagaagcagcaataagcattaggcgaatgattgaaagggctgctgcgccaagaggccttcagtccccttaacgtggctttccaacttcctgacgaggctacaaaggctccgctcacaaaagaaagccaataatgtaaataaatagaaaacgaagcctccacgcgtggtttttaaagggggatgatgaatgtgacaccacccacagaatgcattagaatctggtttttctgtgctttgtcattttactctgataggaatttttgttacctaactctgtgcataacttatttaatgtactgtataaatgaaccaaaactgttaaatatgtatttagtttgttctacttaaagtagtcaataaaaaggctatattcct

SEQ ID NO: 456731 - DNA, 7270 bp, Homo sapiens
cgcctgccaccatgcccagctaatttttgtttagtagagatggggtttcaccatgttggccaggctcgtcttgaactcctgacctcaggtgatctgcctgcattggcctcccaacgtgctgggattacagttggtcctgagaaaagggtgccagcgatgcctggatcgcctgtggaagtgaagatacagtccagatcctcacctcccaccatgccacccctcccaccaataaatcctggaggaccgaggccagtgtccttcactcctactgcattaagcaatggcatcaaccattctcctcctaccctgaatggtgccccatcaccgccacagagattcagcaatggtcctgcctcctccacatcatctgcactcacaaatcagcaattgccagccacttgtggtgctcgacaactcagcaagttgaaacgctttcttaccactctgcaacagtttggcaatgacatctcccctgagattggggagaaggtgcggactcttgttcttgcactggtgaactcaacagtgacaattgaggaattccactgtaagctccaagaagccacaaactttccccttcgtccttttgtgattccatttctcaaggccaacctgcccctgctgcagcgggaactgctgcactgcgctcgggcggccaagcagaccccatcccagtacctggctcagcacgaacaccttctgctcaacacaagcattgcatcgcctgctgactcgtcagagttgctcatggaggtgcacggaaatgggaagaggcccagtccagagaggagagaagagaatagttttgatagagacacaattgctcctgagcctcctgccaagagagtatgtaccatcagccctgctcctcggcacagtcctgctctcactgtgcccctcatgaatcccgggggccaattccatcctacccctccacctcttcagcattacaccttagaggatattgcaacttctcacctgtatcgggaacccaacaagatgctagagcatcgagaagttcgtgatagacaccacagtcttggtctaaatggaggctatcaagatgagttggtagatcatcgtttgacagaaagggaatgggctgatgaatggaaacatcttgaccatgcgctgaattgcattatggaaatggtagagaaaacaaggcgctctatggcagttctgcggcgctgtcaggaatcagatcgtgaagaactcaactactggaaaagacggtacaatgaaaacacagagctgaggaaaacggggaccgagttggtctccaggcagcacagccctgggagtgcagattctctcagcaatgattctcagagagagttcaacagcaggccaggtacaggatacgtacctgtggagttttggaaaaaaacagaagaagctgtgaataaggtgaaaattcaggccatgtcagaagtacagaaggccgtcgctgaggcagagcagaaagcctttgaagtgattgcaacagagagagcacgaatggagcaaaccatagcggatgtcaagcggcaggccgcagaggatgctttcctcgtcatcaatgagcaagaggagtccacggagaactgctggaactgtggccgcaaagccagcgagacatgcagtggctgcaatatcgcgcgatactgtggctctttctgccagcacaaggactgggagcggcaccaccgcctctgtggtcagaacctgcatggccagagcccccacggccagggccggccgctgcttcctgtaggcaggggctcctctgccaggtccgccgactgcagcgtgcccagcccagccctcgacaagacctcggcaaccacatcgcgttcctcaacacctgcttctgtgacagctatcgacaccaacggactctgagccccggactctgcttaccctgatggctgctcagcaccacagagtgcttgggctgagggactgactgttggaacccgtgcatgtagctgccgggtcatcagcaagaaatgaattggaggcaggaagagtccaagcctgaataataacaccccacagcctctctgtgcacttgctgtctgcggagccagtgtgccattctctgcacatgggcagccagcctgagctgcctcctccatggctttcctggtttgttcctctctccactgaagctgacttagccggccccttttcagtgtagaccaccagctcccctccccatctccttgagtcagcagactgtccaatgtgctcagccaggctggaggcggcaggcggcaggcagcaggctgtggaggaggcccctcggtcagggagcggcctgcctcacccctgaatagctccttcggccccatctccatcctcagcagatgacactgattggcctcacggggacttgggtaagcaacaggcggcattcaggactcttctcaaccctgctgttcagacttgataagatctcagagtccacaggaaagaagtcactgttgcaataaaagcacccgtagtagcaaaaacataaaacaaataaaacttcccccacatcacagatgattttggacaagattttccaaccttgctggctactttagtttgggacctgttttttttctcatttgattttgcttgtgcagaaaatagtttccagcacatggattgatctgagagagaatgaggctcagttgtggatagtctgttttctctgagcatgttggccaactagtatcgtcaaattattgagtggatcatctcttggaaatgcagaacttctgccaccacttggctatttgcacagtcatcttgttctgtgtccttttatctctcagaccacacacatctggaacgctgtgggcatcttctgcccatgggctccatttggcacctgctgagccacagttgtcctgctggatgtgctgtgcaggttggtaggacttgcccccactgtcaaggcctggtctcatctgaaaagccctcctggacctcaaagaattcttcagacctcatagttacaggtcattatatctactatgttgatttatcatcaggcacacaacttctgtttccttctcttgtgttatctgatagcgtccctccttgagctcatcagaaaggttttatgaaatgtgaaccattttgggaaaagctgatcaatttttcttcctagcttcccattttcaaatgggacatcactcatatccctttcagaatgttaggaactgcctcccacattcttccctgtctttttgggttttgttttttgttgttgttgtggttttttaacacaaagctcactctgttgcccaggctggagtgcagtggcatgatcttggctcactgcaacctctgccttccaggttcaagcaattctcctgcctcgagcctcccgagtagctgagattacaggcgcccaccaccacgcccagctagatttttgtattttttagtagagacagggtttcaccatgttggccaggctgatctcgaactcctgacctcaggtgacctgccttggcctcccaaagtgcagggattacaagcgtgagccaccatgcccggcctgtctttttggttttgatgggagtctgaggaccccgacccctcctgctctccatctttgagcctctggcatcctctcacacccagaaatcagttggagtaagtttaattggccctgctccagctggcctttgaagcacaagtttaaatctccaccttctgtgcactgaccagagtctaaaataaaagttgtcagtaccataaaggaaaagggatccacacaggtagccttctccttggatacaggtacatcttactgtaagaatttcaagtcctggctgggcgcagtggctcactcctgtaatcccagcactttgagagaccgaggcaggcagatcacttgaggtcaggaattcaagaccaacctggccaacatggtgaaaccctgtctctaataaaaaaaaaatagaaaaatcagccgggtgtggtggcacacacctgtaatcctagctactcaggaggctgaggcaagagaatctcttgaacctgtgagccagaggttgcagtgagccgagattccaccactgcactccagcctgggcaacagagcaaaactctgtctcaaaaaaaaaaaaaaaaaggcaaaattaaagaatttcaagtccctaatttactctaaccaagcattttcagtcttacaaagaaatctagtgcacgacacctttaaaatgcctagatttccattgcctaaagtaaggtgtgaccagtgaaacaacagcagagaatcatgttcctttgctgtggaacacataagccccacagttttccagtcagcctaatacatgggtatcccccgaccccatctgcctccttaagccacagtccttggtggggaactctaagggggacggagtcagtaccccggacagggccacatttgcatgagacatggctgtctcacaggtcacagagccattacaacagcttactagtttttcatggatttgttggattaacaccttaagcaggttttttattgttattttgtttgtttgtttgttttgagacgggagtttctctcttgtctcccaggctggagtgcaatcgcgcaatctcggctcacggtaacctctgcctcccaggttcgggcgagtctcctgcctcagccttctgagtagctgggattgcaggcatgcgccaccacgcccaactgattttgtatttttagtagagacggggtttctccttgttggtcaggctggtctcaaaccccggacctcaggtgatccccccaccttggcctcccaaagtgccaggattacaggcatgagccactgtgtccggtcttgagcaggtttttaaaatctccagtggccataaaactagccagggtagctcatgcttttactggttggaataaggagccaaaaccaacaaaataatatttattagggctcgatgcccatttctgtggctaaggcttaggtttggtgtgcagagcctggcctgctcttgtgggctgtggttgctgtgacagtttcgttttctgaatctttgtaatgctcttccaccctgctcgtgctgcccagaggctgatctgcaaacctgggcagtattccacactgaagctcagtttgcaaaccttctgctgtgttaattctggtcagtttcacacagaagtcacgagggcctctgcccaggaccttctattcacatttcaagaatccctttctgaaattctccaactctctggtcaggaggaggagcaccattggggcggggtaggcagctagaggcgcaggagcgaatccaggttccttgcgtggttcccagcctctgctgacagcacctcagctaccaggtggggagtggaaattcagcctgcttagaggactgacctctacagttcatatttgcagtgacataaaaggcaaagaggagctggcatggtggtacagaaggtatcagtcaagcgcaggctcttcagaaacctagaaactaaaaagagatgcaacatgtgactggccatcagccagacatgtctagggtgagaccagtgctcagcaccacccgccaaggaacactgatgagttgtgggacattatggtcggccaagtgaggaatgattgcagggaccagagaagaccaaagatgccagatgtccccagagtttcttgagggctgggtttcacgtctttgcttgtcctttttgtccccacttgcctgcaccgtgcctgactcatccagtggggaaggtgactcaagaagttgtttaagcctaggcctaggcagtccacttcgggaggtgggggcactccacactggggggccctgcagctccagggctggtgctctagcagatccgctcaggcacggttgggtgaccgtggggtcaccgattgcgtagattatttctagggcagtgctgggttagaaatgtctgtctggaaacaggacacatcttgccaccacaagtccacacctggccttggctgctgcccgctctctgcagcgtggatttcctttgcccatttgggccagaaggtcaccaggagttcatcactgcttagtgtcaacttgacatcttcagcttccagacagaaaacccatgctttactttgtacagccctgtcccagagttagtaagcctcggcttgtcacctgcttgcaaagggtatagacatcattctgggtagttctagaggatatcgcaacaagtgcgtttgaaggttcagcacagctggaattgtacggtagtgagctcttcaaaatgaaaacagaatgaccggatggccatctgtcctggaaactgtagaattgaataaatcactgaaaatagaacacttcttggaggctttcttcagaactgaactagaaacaaggtttccaggctcccaggtcagtagaccaaaccaacttccttagatttttttttttaagctgtttgcagaaaactgggtggtagcgtgtctgaaccaaacggaagaatagccagcggagcatggactgttccagcacgggccagatggccagctgtcgagagcagccctgcccagattgcggtgggggctgtgccagcggctccgcagggcccttccaactctggagtgtctgtagttcttgtgaaaccaaaacgttgactacctgcctctttcctcgggcatcgacgtgctcatttccaaagatgatggtgcaggtgaccttttccatcgtgagctaagagaaggttaggaggcctgaggggcgggccttgtgtcccctcctccccctccacagcccctgaggtggagcttccctcacagaccccatctggtcgagcctacggctgcccagtgtacactcagtgatgcttataccaaatagggcatgtgcgctggtgtctgttggggacagccccatccctaccttggagtcggcagagaagcagcaataagcattaggcgaatgattgaaagggctgctgcgccaagaggccttcagtccccttaacgtggctttccaacttcctgacgaggctacaaaggctccgctcacaaaagaaagccaataatgtaaataaatagaaaacgaagcctccacgcgtggtttttaaagggggatgatgaatgtgacaccacccacagaatgcattagaatctggtttttctgtgctttgtcattttactctgataggaatttttgttacctaactctgtgcataacttatttaatgtactgtataaatgaaccaaaactgttaaatatgtatttagtttgttctacttaaagtagtcaataaaaaggctatattcct

SEQ ID NO: 456732 - DNA, 7486 bp, Homo sapiens
gggggaagggtagtggagagagaggaagcaggagggagggagaaaaagagagagactgactgtatctggggattctggcaaggtgaagagctggtctgtttggcaggaccttcccatctgggatccatctgtgtttccctggaatgggacaggcagctctagtcagtgagaaatcgcagatgtgagagagctgacacatgtccagctaatgaaaggaggaggaaggctggtctccgattgagctttgaagattaggaggagaaaaagaggagctttggaatatctatttcaaataaatttggtgtatttaagaatctggattgtttataatttgggcatttgggttggtcctgagaaaagggtgccagcgatgcctggatcgcctgtggaagtgaagatacagtccagatcctcacctcccaccatgccacccctcccaccaataaatcctggaggaccgaggccagtgtccttcactcctactgcattaagcaatggcatcaaccattctcctcctaccctgaatggtgccccatcaccgccacagagattcagcaatggtcctgcctcctccacatcatctgcactcacaaatcagcaattgccagccacttgtggtgctcgacaactcagcaagttgaaacgctttcttaccactctgcaacagtttggcaatgacatctcccctgagattggggagaaggtgcggactcttgttcttgcactggtgaactcaacagtgacaattgaggaattccactgtaagctccaagaagccacaaactttccccttcgtccttttgtgattccatttctcaaggccaacctgcccctgctgcagcgggaactgctgcactgcgctcgggcggccaagcagaccccatcccagtacctggctcagcacgaacaccttctgctcaacacaagcattgcatcgcctgctgactcgtcagagttgctcatggaggtgcacggaaatgggaagaggcccagtccagagaggagagaagagaatagttttgatagagacacaattgctcctgagcctcctgccaagagagtatgtaccatcagccctgctcctcggcacagtcctgctctcactgtgcccctcatgaatcccgggggccaattccatcctacccctccacctcttcagcattacaccttagaggatattgcaacttctcacctgtatcgggaacccaacaagatgctagagcatcgagaagttcgtgatagacaccacagtcttggtctaaatggaggctatcaagatgagttggtagatcatcgtttgacagaaagggaatgggctgatgaatggaaacatcttgaccatgcgctgaattgcattatggaaatggtagagaaaacaaggcgctctatggcagttctgcggcgctgtcaggaatcagatcgtgaagaactcaactactggaaaagacggtacaatgaaaacacagagctgaggaaaacggggaccgagttggtctccaggcagcacagccctgggagtgcagattctctcagcaatgattctcagagagagttcaacagcaggccaggtacaggatacgtacctgtggagttttggaaaaaaacagaagaagctgtgaataaggtgaaaattcaggccatgtcagaagtacagaaggccgtcgctgaggcagagcagaaagcctttgaagtgattgcaacagagagagcacgaatggagcaaaccatagcggatgtcaagcggcaggccgcagaggatgctttcctcgtcatcaatgagcaagaggagtccacggagaactgctggaactgtggccgcaaagccagcgagacatgcagtggctgcaatatcgcgcgatactgtggctctttctgccagcacaaggactgggagcggcaccaccgcctctgtggtcagaacctgcatggccagagcccccacggccagggccggccgctgcttcctgtaggcaggggctcctctgccaggtccgccgactgcagcgtgcccagcccagccctcgacaagacctcggcaaccacatcgcgttcctcaacacctgcttctgtgacagctatcgacaccaacggactctgagccccggactctgcttaccctgatggctgctcagcaccacagagtgcttgggctgagggactgactgttggaacccgtgcatgtagctgccgggtcatcagcaagaaatgaattggaggcaggaagagtccaagcctgaataataacaccccacagcctctctgtgcacttgctgtctgcggagccagtgtgccattctctgcacatgggcagccagcctgagctgcctcctccatggctttcctggtttgttcctctctccactgaagctgacttagccggccccttttcagtgtagaccaccagctcccctccccatctccttgagtcagcagactgtccaatgtgctcagccaggctggaggcggcaggcggcaggcagcaggctgtggaggaggcccctcggtcagggagcggcctgcctcacccctgaatagctccttcggccccatctccatcctcagcagatgacactgattggcctcacggggacttgggtaagcaacaggcggcattcaggactcttctcaaccctgctgttcagacttgataagatctcagagtccacaggaaagaagtcactgttgcaataaaagcacccgtagtagcaaaaacataaaacaaataaaacttcccccacatcacagatgattttggacaagattttccaaccttgctggctactttagtttgggacctgttttttttctcatttgattttgcttgtgcagaaaatagtttccagcacatggattgatctgagagagaatgaggctcagttgtggatagtctgttttctctgagcatgttggccaactagtatcgtcaaattattgagtggatcatctcttggaaatgcagaacttctgccaccacttggctatttgcacagtcatcttgttctgtgtccttttatctctcagaccacacacatctggaacgctgtgggcatcttctgcccatgggctccatttggcacctgctgagccacagttgtcctgctggatgtgctgtgcaggttggtaggacttgcccccactgtcaaggcctggtctcatctgaaaagccctcctggacctcaaagaattcttcagacctcatagttacaggtcattatatctactatgttgatttatcatcaggcacacaacttctgtttccttctcttgtgttatctgatagcgtccctccttgagctcatcagaaaggttttatgaaatgtgaaccattttgggaaaagctgatcaatttttcttcctagcttcccattttcaaatgggacatcactcatatccctttcagaatgttaggaactgcctcccacattcttccctgtctttttgggttttgttttttgttgttgttgtggttttttaacacaaagctcactctgttgcccaggctggagtgcagtggcatgatcttggctcactgcaacctctgccttccaggttcaagcaattctcctgcctcgagcctcccgagtagctgagattacaggcgcccaccaccacgcccagctagatttttgtattttttagtagagacagggtttcaccatgttggccaggctgatctcgaactcctgacctcaggtgacctgccttggcctcccaaagtgcagggattacaagcgtgagccaccatgcccggcctgtctttttggttttgatgggagtctgaggaccccgacccctcctgctctccatctttgagcctctggcatcctctcacacccagaaatcagttggagtaagtttaattggccctgctccagctggcctttgaagcacaagtttaaatctccaccttctgtgcactgaccagagtctaaaataaaagttgtcagtaccataaaggaaaagggatccacacaggtagccttctccttggatacaggtacatcttactgtaagaatttcaagtcctggctgggcgcagtggctcactcctgtaatcccagcactttgagagaccgaggcaggcagatcacttgaggtcaggaattcaagaccaacctggccaacatggtgaaaccctgtctctaataaaaaaaaaatagaaaaatcagccgggtgtggtggcacacacctgtaatcctagctactcaggaggctgaggcaagagaatctcttgaacctgtgagccagaggttgcagtgagccgagattccaccactgcactccagcctgggcaacagagcaaaactctgtctcaaaaaaaaaaaaaaaaaggcaaaattaaagaatttcaagtccctaatttactctaaccaagcattttcagtcttacaaagaaatctagtgcacgacacctttaaaatgcctagatttccattgcctaaagtaaggtgtgaccagtgaaacaacagcagagaatcatgttcctttgctgtggaacacataagccccacagttttccagtcagcctaatacatgggtatcccccgaccccatctgcctccttaagccacagtccttggtggggaactctaagggggacggagtcagtaccccggacagggccacatttgcatgagacatggctgtctcacaggtcacagagccattacaacagcttactagtttttcatggatttgttggattaacaccttaagcaggttttttattgttattttgtttgtttgtttgttttgagacgggagtttctctcttgtctcccaggctggagtgcaatcgcgcaatctcggctcacggtaacctctgcctcccaggttcgggcgagtctcctgcctcagccttctgagtagctgggattgcaggcatgcgccaccacgcccaactgattttgtatttttagtagagacggggtttctccttgttggtcaggctggtctcaaaccccggacctcaggtgatccccccaccttggcctcccaaagtgccaggattacaggcatgagccactgtgtccggtcttgagcaggtttttaaaatctccagtggccataaaactagccagggtagctcatgcttttactggttggaataaggagccaaaaccaacaaaataatatttattagggctcgatgcccatttctgtggctaaggcttaggtttggtgtgcagagcctggcctgctcttgtgggctgtggttgctgtgacagtttcgttttctgaatctttgtaatgctcttccaccctgctcgtgctgcccagaggctgatctgcaaacctgggcagtattccacactgaagctcagtttgcaaaccttctgctgtgttaattctggtcagtttcacacagaagtcacgagggcctctgcccaggaccttctattcacatttcaagaatccctttctgaaattctccaactctctggtcaggaggaggagcaccattggggcggggtaggcagctagaggcgcaggagcgaatccaggttccttgcgtggttcccagcctctgctgacagcacctcagctaccaggtggggagtggaaattcagcctgcttagaggactgacctctacagttcatatttgcagtgacataaaaggcaaagaggagctggcatggtggtacagaaggtatcagtcaagcgcaggctcttcagaaacctagaaactaaaaagagatgcaacatgtgactggccatcagccagacatgtctagggtgagaccagtgctcagcaccacccgccaaggaacactgatgagttgtgggacattatggtcggccaagtgaggaatgattgcagggaccagagaagaccaaagatgccagatgtccccagagtttcttgagggctgggtttcacgtctttgcttgtcctttttgtccccacttgcctgcaccgtgcctgactcatccagtggggaaggtgactcaagaagttgtttaagcctaggcctaggcagtccacttcgggaggtgggggcactccacactggggggccctgcagctccagggctggtgctctagcagatccgctcaggcacggttgggtgaccgtggggtcaccgattgcgtagattatttctagggcagtgctgggttagaaatgtctgtctggaaacaggacacatcttgccaccacaagtccacacctggccttggctgctgcccgctctctgcagcgtggatttcctttgcccatttgggccagaaggtcaccaggagttcatcactgcttagtgtcaacttgacatcttcagcttccagacagaaaacccatgctttactttgtacagccctgtcccagagttagtaagcctcggcttgtcacctgcttgcaaagggtatagacatcattctgggtagttctagaggatatcgcaacaagtgcgtttgaaggttcagcacagctggaattgtacggtagtgagctcttcaaaatgaaaacagaatgaccggatggccatctgtcctggaaactgtagaattgaataaatcactgaaaatagaacacttcttggaggctttcttcagaactgaactagaaacaaggtttccaggctcccaggtcagtagaccaaaccaacttccttagatttttttttttaagctgtttgcagaaaactgggtggtagcgtgtctgaaccaaacggaagaatagccagcggagcatggactgttccagcacgggccagatggccagctgtcgagagcagccctgcccagattgcggtgggggctgtgccagcggctccgcagggcccttccaactctggagtgtctgtagttcttgtgaaaccaaaacgttgactacctgcctctttcctcgggcatcgacgtgctcatttccaaagatgatggtgcaggtgaccttttccatcgtgagctaagagaaggttaggaggcctgaggggcgggccttgtgtcccctcctccccctccacagcccctgaggtggagcttccctcacagaccccatctggtcgagcctacggctgcccagtgtacactcagtgatgcttataccaaatagggcatgtgcgctggtgtctgttggggacagccccatccctaccttggagtcggcagagaagcagcaataagcattaggcgaatgattgaaagggctgctgcgccaagaggccttcagtccccttaacgtggctttccaacttcctgacgaggctacaaaggctccgctcacaaaagaaagccaataatgtaaataaatagaaaacgaagcctccacgcgtggtttttaaagggggatgatgaatgtgacaccacccacagaatgcattagaatctggtttttctgtgctttgtcattttactctgataggaatttttgttacctaactctgtgcataacttatttaatgtcttcgtatccattcaccctagctgttataaaagtatatgtttcgataccctttacgtagtccagcattcgcctttattcctt

SEQ ID NO: 456733 - DNA, 7430 bp, Homo sapiens
gggggaagggtagtggagagagaggaagcaggagggagggagaaaaagagagagactgactgtatctggggattctggcaaggtgaagagctggtctgtttggcaggaccttcccatctgggatccatctgtgtttccctggaatgggacaggcagctctagtcagtgagaaatcgcagatgtgagagagctgacacatgtccagctaatgaaaggaggaggaaggctggtctccgattgagctttgaagattaggaggagaaaaagaggagctttggaatatctatttcaaataaatttggtgtatttaagaatctggattgtttataatttgggcatttgggttggtcctgagaaaagggtgccagcgatgcctggatcgcctgtggaagtgaagatacagtccagatcctcacctcccaccatgccacccctcccaccaataaatcctggaggaccgaggccagtgtccttcactcctactgcattaagcaatggcatcaaccattctcctcctaccctgaatggtgccccatcaccgccacagagattcagcaatggtcctgcctcctccacatcatctgcactcacaaatcagcaattgccagccacttgtggtgctcgacaactcagcaagttgaaacgctttcttaccactctgcaacagtttggcaatgacatctcccctgagattggggagaaggtgcggactcttgttcttgcactggtgaactcaacagtgacaattgaggaattccactgtaagctccaagaagccacaaactttccccttcgtccttttgtgattccatttctcaaggccaacctgcccctgctgcagcgggaactgctgcactgcgctcgggcggccaagcagaccccatcccagtacctggctcagcacgaacaccttctgctcaacacaagcattgcatcgcctgctgactcgtcagagttgctcatggaggtgcacggaaatgggaagaggcccagtccagagaggagagaagagaatagttttgatagagacacaattgctcctgagcctcctgccaagagagtatgtaccatcagccctgctcctcggcacagtcctgctctcactgtgcccctcatgaatcccgggggccaattccatcctacccctccacctcttcagcattacaccttagaggatattgcaacttctcacctgtatcgggaacccaacaagatgctagagcatcgagaagttcgtgatagacaccacagtcttggtctaaatggaggctatcaagatgagttggtagatcatcgtttgacagaaagggaatgggctgatgaatggaaacatcttgaccatgcgctgaattgcattatggaaatggtagagaaaacaaggcgctctatggcagttctgcggcgctgtcaggaatcagatcgtgaagaactcaactactggaaaagacggtacaatgaaaacacagagctgaggaaaacggggaccgagttggtctccaggcagcacagccctgggagtgcagattctctcagcaatgattctcagagagagttcaacagcaggccaggtacaggatacgtacctgtggagttttggaaaaaaacagaagaagctgtgaataaggtgaaaattcaggccatgtcagaagtacagaaggccgtcgctgaggcagagcagaaagcctttgaagtgattgcaacagagagagcacgaatggagcaaaccatagcggatgtcaagcggcaggccgcagaggatgctttcctcgtcatcaatgagcaagaggagtccacggagaactgctggaactgtggccgcaaagccagcgagacatgcagtggctgcaatatcgcgcgatactgtggctctttctgccagcacaaggactgggagcggcaccaccgcctctgtggtcagaacctgcatggccagagcccccacggccagggccggccgctgcttcctgtaggcaggggctcctctgccaggtccgccgactgcagcgtgcccagcccagccctcgacaagacctcggcaaccacatcgcgttcctcaacacctgcttctgtgacagctatcgacaccaacggactctgagccccggactctgcttaccctgatggctgctcagcaccacagagtgcttgggctgagggactgactgttggaacccgtgcatgtagctgccgggtcatcagcaagaaatgaattggaggcaggaagagtccaagcctgaataataacaccccacagcctctctgtgcacttgctgtctgcggagccagtgtgccattctctgcacatgggcagccagcctgagctgcctcctccatggctttcctggtttgttcctctctccactgaagctgacttagccggccccttttcagtgtagaccaccagctcccctccccatctccttgagtcagcagactgtccaatgtgctcagccaggctggaggcggcaggcggcaggcagcaggctgtggaggaggcccctcggtcagggagcggcctgcctcacccctgaatagctccttcggccccatctccatcctcagcagatgacactgattggcctcacggggacttgggtaagcaacaggcggcattcaggactcttctcaaccctgctgttcagacttgataagatctcagagtccacaggaaagaagtcactgttgcaataaaagcacccgtagtagcaaaaacataaaacaaataaaacttcccccacatcacagatgattttggacaagattttccaaccttgctggctactttagtttgggacctgttttttttctcatttgattttgcttgtgcagaaaatagtttccagcacatggattgatctgagagagaatgaggctcagttgtggatagtctgttttctctgagcatgttggccaactagtatcgtcaaattattgagtggatcatctcttggaaatgcagaacttctgccaccacttggctatttgcacagtcatcttgttctgtgtccttttatctctcagaccacacacatctggaacgctgtgggcatcttctgcccatgggctccatttggcacctgctgagccacagttgtcctgctggatgtgctgtgcaggttggtaggacttgcccccactgtcaaggcctggtctcatctgaaaagccctcctggacctcaaagaattcttcagacctcatagttacaggtcattatatctactatgttgatttatcatcaggcacacaacttctgtttccttctcttgtgttatctgatagcgtccctccttgagctcatcagaaaggttttatgaaatgtgaaccattttgggaaaagctgatcaatttttcttcctagcttcccattttcaaatgggacatcactcatatccctttcagaatgttaggaactgcctcccacattcttccctgtctttttgggttttgttttttgttgttgttgtggttttttaacacaaagctcactctgttgcccaggctggagtgcagtggcatgatcttggctcactgcaacctctgccttccaggttcaagcaattctcctgcctcgagcctcccgagtagctgagattacaggcgcccaccaccacgcccagctagatttttgtattttttagtagagacagggtttcaccatgttggccaggctgatctcgaactcctgacctcaggtgacctgccttggcctcccaaagtgcagggattacaagcgtgagccaccatgcccggcctgtctttttggttttgatgggagtctgaggaccccgacccctcctgctctccatctttgagcctctggcatcctctcacacccagaaatcagttggagtaagtttaattggccctgctccagctggcctttgaagcacaagtttaaatctccaccttctgtgcactgaccagagtctaaaataaaagttgtcagtaccataaaggaaaagggatccacacaggtagccttctccttggatacaggtacatcttactgtaagaatttcaagtcctggctgggcgcagtggctcactcctgtaatcccagcactttgagagaccgaggcaggcagatcacttgaggtcaggaattcaagaccaacctggccaacatggtgaaaccctgtctctaataaaaaaaaaatagaaaaatcagccgggtgtggtggcacacacctgtaatcctagctactcaggaggctgaggcaagagaatctcttgaacctgtgagccagaggttgcagtgagccgagattccaccactgcactccagcctgggcaacagagcaaaactctgtctcaaaaaaaaaaaaaaaaaggcaaaattaaagaatttcaagtccctaatttactctaaccaagcattttcagtcttacaaagaaatctagtgcacgacacctttaaaatgcctagatttccattgcctaaagtaaggtgtgaccagtgaaacaacagcagagaatcatgttcctttgctgtggaacacataagccccacagttttccagtcagcctaatacatgggtatcccccgaccccatctgcctccttaagccacagtccttggtggggaactctaagggggacggagtcagtaccccggacagggccacatttgcatgagacatggctgtctcacaggtcacagagccattacaacagcttactagtttttcatggatttgttggattaacaccttaagcaggttttttattgttattttgtttgtttgtttgttttgagacgggagtttctctcttgtctcccaggctggagtgcaatcgcgcaatctcggctcacggtaacctctgcctcccaggttcgggcgagtctcctgcctcagccttctgagtagctgggattgcaggcatgcgccaccacgcccaactgattttgtatttttagtagagacggggtttctccttgttggtcaggctggtctcaaaccccggacctcaggtgatccccccaccttggcctcccaaagtgccaggattacaggcatgagccactgtgtccggtcttgagcaggtttttaaaatctccagtggccataaaactagccagggtagctcatgcttttactggttggaataaggagccaaaaccaacaaaataatatttattagggctcgatgcccatttctgtggctaaggcttaggtttggtgtgcagagcctggcctgctcttgtgggctgtggttgctgtgacagtttcgttttctgaatctttgtaatgctcttccaccctgctcgtgctgcccagaggctgatctgcaaacctgggcagtattccacactgaagctcagtttgcaaaccttctgctgtgttaattctggtcagtttcacacagaagtcacgagggcctctgcccaggaccttctattcacatttcaagaatccctttctgaaattctccaactctctggtcaggaggaggagcaccattggggcggggtaggcagctagaggcgcaggagcgaatccaggttccttgcgtggttcccagcctctgctgacagcacctcagctaccaggtggggagtggaaattcagcctgcttagaggactgacctctacagttcatatttgcagtgacataaaaggcaaagaggagctggcatggtggtacagaaggtatcagtcaagcgcaggctcttcagaaacctagaaactaaaaagagatgcaacatgtgactggccatcagccagacatgtctagggtgagaccagtgctcagcaccacccgccaaggaacactgatgagttgtgggacattatggtcggccaagtgaggaatgattgcagggaccagagaagaccaaagatgccagatgtccccagagtttcttgagggctgggtttcacgtctttgcttgtcctttttgtccccacttgcctgcaccgtgcctgactcatccagtggggaaggtgactcaagaagttgtttaagcctaggcctaggcagtccacttcgggaggtgggggcactccacactggggggccctgcagctccagggctggtgctctagcagatccgctcaggcacggttgggtgaccgtggggtcaccgattgcgtagattatttctagggcagtgctgggttagaaatgtctgtctggaaacaggacacatcttgccaccacaagtccacacctggccttggctgctgcccgctctctgcagcgtggatttcctttgcccatttgggccagaaggtcaccaggagttcatcactgcttagtgtcaacttgacatcttcagcttccagacagaaaacccatgctttactttgtacagccctgtcccagagttagtaagcctcggcttgtcacctgcttgcaaagggtatagacatcattctgggtagttctagaggatatcgcaacaagtgcgtttgaaggttcagcacagctggaattgtacggtagtgagctcttcaaaatgaaaacagaatgaccggatggccatctgtcctggaaactgtagaattgaataaatcactgaaaatagaacacttcttggaggctttcttcagaactgaactagaaacaaggtttccaggctcccaggtcagtagaccaaaccaacttccttagatttttttttttaagctgtttgcagaaaactgggtggtagcgtgtctgaaccaaacggaagaatagccagcggagcatggactgttccagcacgggccagatggccagctgtcgagagcagccctgcccagattgcggtgggggctgtgccagcggctccgcagggcccttccaactctggagtgtctgtagttcttgtgaaaccaaaacgttgactacctgcctctttcctcgggcatcgacgtgctcatttccaaagatgatggtgcaggtgaccttttccatcgtgagctaagagaaggttaggaggcctgaggggcgggccttgtgtcccctcctccccctccacagcccctgaggtggagcttccctcacagaccccatctggtcgagcctacggctgcccagtgtacactcagtgatgcttataccaaatagggcatgtgcgctggtgtctgttggggacagccccatccctaccttggagtcggcagagaagcagcaataagcattaggcgaatgattgaaagggctgctgcgccaagaggccttcagtccccttaacgtggctttccaacttcctgacgaggctacaaaggctccgctcacaaaagaaagccaataatgtaaataaatagccacagaatgcattagaatctggtttttctgtgctttgtcattttactctgataggaatttttgttacctaactctgtgcataacttatttaatgtactgtataaatgaaccaaaactgttaaatatgtatttagtttgttctacttaaagtagtcaataaaaaggctatattcct

SEQ ID NO: 456734 - DNA, 4391 bp, Homo sapiens
tgaggcaggtactattacacccccattttacaaatgagtgctatgagaaacagagaggttcagtgacttgccaaacgtcacacagctaggttaggtctacctggccaggtagacgtcattatatctactatgttgatttatcatcaggcacacaacttctgtttccttctcttgtgttatctgatagcgtccctccttgagctcatcagaaaggttttatgaaatgtgaaccattttgggaaaagctgatcaatttttcttcctagcttcccattttcaaatgggacatcactcatatccctttcagaatgttaggaactgcctcccacattcttccctgtctttttgggttttgttttttgttgttgttgtggttttttaacacaaagctcactctgttgcccaggctggagtgcagtggcatgatcttggctcactgcaacctctgccttccaggttcaagcaattctcctgcctcgagcctcccgagtagctgagattacaggcgcccaccaccacgcccagctagatttttgtattttttagtagagacagggtttcaccatgttggccaggctgatctcgaactcctgacctcaggtgacctgccttggcctcccaaagtgcagggattacaagcgtgagccaccatgcccggcctgtctttttggttttgatgggagtctgaggaccccgacccctcctgctctccatctttgagcctctggcatcctctcacacccagaaatcagttggagtaagtttaattggccctgctccagctggcctttgaagcacaagtttaaatctccaccttctgtgcactgaccagagtctaaaataaaagttgtcagtaccataaaggaaaagggatccacacaggtagccttctccttggatacaggtacatcttactgtaagaatttcaagtcctggctgggcgcagtggctcactcctgtaatcccagcactttgagagaccgaggcaggcagatcacttgaggtcaggaattcaagaccaacctggccaacatggtgaaaccctgtctctaataaaaaaaaaatagaaaaatcagccgggtgtggtggcacacacctgtaatcctagctactcaggaggctgaggcaagagaatctcttgaacctgtgagccagaggttgcagtgagccgagattccaccactgcactccagcctgggcaacagagcaaaactctgtctcaaaaaaaaaaaaaaaaaggcaaaattaaagaatttcaagtccctaatttactctaaccaagcattttcagtcttacaaagaaatctagtgcacgacacctttaaaatgcctagatttccattgcctaaagtaaggtgtgaccagtgaaacaacagcagagaatcatgttcctttgctgtggaacacataagccccacagttttccagtcagcctaatacatgggtatcccccgaccccatctgcctccttaagccacagtccttggtggggaactctaagggggacggagtcagtaccccggacagggccacatttgcatgagacatggctgtctcacaggtcacagagccattacaacagcttactagtttttcatggatttgttggattaacaccttaagcaggttttttattgttattttgtttgtttgtttgttttgagacgggagtttctctcttgtctcccaggctggagtgcaatcgcgcaatctcggctcacggtaacctctgcctcccaggttcgggcgagtctcctgcctcagccttctgagtagctgggattgcaggcatgcgccaccacgcccaactgattttgtatttttagtagagacggggtttctccttgttggtcaggctggtctcaaaccccggacctcaggtgatccccccaccttggcctcccaaagtgccaggattacaggcatgagccactgtgtccggtcttgagcaggtttttaaaatctccagtggccataaaactagccagggtagctcatgcttttactggttggaataaggagccaaaaccaacaaaataatatttattagggctcgatgcccatttctgtggctaaggcttaggtttggtgtgcagagcctggcctgctcttgtgggctgtggttgctgtgacagtttcgttttctgaatctttgtaatgctcttccaccctgctcgtgctgcccagaggctgatctgcaaacctgggcagtattccacactgaagctcagtttgcaaaccttctgctgtgttaattctggtcagtttcacacagaagtcacgagggcctctgcccaggaccttctattcacatttcaagaatccctttctgaaattctccaactctctggtcaggaggaggagcaccattggggcggggtaggcagctagaggcgcaggagcgaatccaggttccttgcgtggttcccagcctctgctgacagcacctcagctaccaggtggggagtggaaattcagcctgcttagaggactgacctctacagttcatatttgcagtgacataaaaggcaaagaggagctggcatggtggtacagaaggtatcagtcaagcgcaggctcttcagaaacctagaaactaaaaagagatgcaacatgtgactggccatcagccagacatgtctagggtgagaccagtgctcagcaccacccgccaaggaacactgatgagttgtgggacattatggtcggccaagtgaggaatgattgcagggaccagagaagaccaaagatgccagatgtccccagagtttcttgagggctgggtttcacgtctttgcttgtcctttttgtccccacttgcctgcaccgtgcctgactcatccagtggggaaggtgactcaagaagttgtttaagcctaggcctaggcagtccacttcgggaggtgggggcactccacactggggggccctgcagctccagggctggtgctctagcagatccgctcaggcacggttgggtgaccgtggggtcaccgattgcgtagattatttctagggcagtgctgggttagaaatgtctgtctggaaacaggacacatcttgccaccacaagtccacacctggccttggctgctgcccgctctctgcagcgtggatttcctttgcccatttgggccagaaggtcaccaggagttcatcactgcttagtgtcaacttgacatcttcagcttccagacagaaaacccatgctttactttgtacagccctgtcccagagttagtaagcctcggcttgtcacctgcttgcaaagggtatagacatcattctgggtagttctagaggatatcgcaacaagtgcgtttgaaggttcagcacagctggaattgtacggtagtgagctcttcaaaatgaaaacagaatgaccggatggccatctgtcctggaaactgtagaattgaataaatcactgaaaatagaacacttcttggaggctttcttcagaactgaactagaaacaaggtttccaggctcccaggtcagtagaccaaaccaacttccttagatttttttttttaagctgtttgcagaaaactgggtggtagcgtgtctgaaccaaacggaagaatagccagcggagcatggactgttccagcacgggccagatggccagctgtcgagagcagccctgcccagattgcggtgggggctgtgccagcggctccgcagggcccttccaactctggagtgtctgtagttcttgtgaaaccaaaacgttgactacctgcctctttcctcgggcatcgacgtgctcatttccaaagatgatggtgcaggtgaccttttccatcgtgagctaagagaaggttaggaggcctgaggggcgggccttgtgtcccctcctccccctccacagcccctgaggtggagcttccctcacagaccccatctggtcgagcctacggctgcccagtgtacactcagtgatgcttataccaaatagggcatgtgcgctggtgtctgttggggacagccccatccctaccttggagtcggcagagaagcagcaataagcattaggcgaatgattgaaagggctgctgcgccaagaggccttcagtccccttaacgtggctttccaacttcctgacgaggctacaaaggctccgctcacaaaagaaagccaataatgtaaataaatagaaaacgaagcctccacgcgtggtttttaaagggggatgatgaatgtgacaccacccacagaatgcattagaatctggtttttctgtgctttgtcattttactctgataggaatttttgttacctaactctgtgcataacttatttaatgtactgtataaatgaaccaaaactgttaaatatgtatttagtttgttctacttaaagtagtcaataaaaaggctatattcct

SEQ ID NO: 456735 - DNA, 3549 bp, Homo sapiens
agcatcggccagcttgagaaataaagggacagagtacaaaagagagaaattttaaagctgggcgtccaggggagacatcatatgtcgttggtcctgagaaaagggtgccagcgatgcctggatcgcctgtggaagtgaagatacagtccagatcctcacctcccaccatgccacccctcccaccaataaatcctggaggaccgaggccagtgtccttcactcctactgcattaagcaatggcatcaaccattctcctcctaccctgaatggtgccccatcaccgccacagagattcagcaatggtcctgcctcctccacatcatctgcactcacaaatcagcaattgccagcctgggcaacagagcaaaactctgtctcaaaaaaaaaaaaaaaaaggcaaaattaaagaatttcaagtccctaatttactctaaccaagcattttcagtcttacaaagaaatctagtgcacgacacctttaaaatgcctagatttccattgcctaaagtaaggtgtgaccagtgaaacaacagcagagaatcatgttcctttgctgtggaacacataagccccacagttttccagtcagcctaatacatgggtatcccccgaccccatctgcctccttaagccacagtccttggtggggaactctaagggggacggagtcagtaccccggacagggccacatttgcatgagacatggctgtctcacaggtcacagagccattacaacagcttactagtttttcatggatttgttggattaacaccttaagcaggttttttattgttattttgtttgtttgtttgttttgagacgggagtttctctcttgtctcccaggctggagtgcaatcgcgcaatctcggctcacggtaacctctgcctcccaggttcgggcgagtctcctgcctcagccttctgagtagctgggattgcaggcatgcgccaccacgcccaactgattttgtatttttagtagagacggggtttctccttgttggtcaggctggtctcaaaccccggacctcaggtgatccccccaccttggcctcccaaagtgccaggattacaggcatgagccactgtgtccggtcttgagcaggtttttaaaatctccagtggccataaaactagccagggtagctcatgcttttactggttggaataaggagccaaaaccaacaaaataatatttattagggctcgatgcccatttctgtggctaaggcttaggtttggtgtgcagagcctggcctgctcttgtgggctgtggttgctgtgacagtttcgttttctgaatctttgtaatgctcttccaccctgctcgtgctgcccagaggctgatctgcaaacctgggcagtattccacactgaagctcagtttgcaaaccttctgctgtgttaattctggtcagtttcacacagaagtcacgagggcctctgcccaggaccttctattcacatttcaagaatccctttctgaaattctccaactctctggtcaggaggaggagcaccattggggcggggtaggcagctagaggcgcaggagcgaatccaggttccttgcgtggttcccagcctctgctgacagcacctcagctaccaggtggggagtggaaattcagcctgcttagaggactgacctctacagttcatatttgcagtgacataaaaggcaaagaggagctggcatggtggtacagaaggtatcagtcaagcgcaggctcttcagaaacctagaaactaaaaagagatgcaacatgtgactggccatcagccagacatgtctagggtgagaccagtgctcagcaccacccgccaaggaacactgatgagttgtgggacattatggtcggccaagtgaggaatgattgcagggaccagagaagaccaaagatgccagatgtccccagagtttcttgagggctgggtttcacgtctttgcttgtcctttttgtccccacttgcctgcaccgtgcctgactcatccagtggggaaggtgactcaagaagttgtttaagcctaggcctaggcagtccacttcgggaggtgggggcactccacactggggggccctgcagctccagggctggtgctctagcagatccgctcaggcacggttgggtgaccgtggggtcaccgattgcgtagattatttctagggcagtgctgggttagaaatgtctgtctggaaacaggacacatcttgccaccacaagtccacacctggccttggctgctgcccgctctctgcagcgtggatttcctttgcccatttgggccagaaggtcaccaggagttcatcactgcttagtgtcaacttgacatcttcagcttccagacagaaaacccatgctttactttgtacagccctgtcccagagttagtaagcctcggcttgtcacctgcttgcaaagggtatagacatcattctgggtagttctagaggatatcgcaacaagtgcgtttgaaggttcagcacagctggaattgtacggtagtgagctcttcaaaatgaaaacagaatgaccggatggccatctgtcctggaaactgtagaattgaataaatcactgaaaatagaacacttcttggaggctttcttcagaactgaactagaaacaaggtttccaggctcccaggtcagtagaccaaaccaacttccttagatttttttttttaagctgtttgcagaaaactgggtggtagcgtgtctgaaccaaacggaagaatagccagcggagcatggactgttccagcacgggccagatggccagctgtcgagagcagccctgcccagattgcggtgggggctgtgccagcggctccgcagggcccttccaactctggagtgtctgtagttcttgtgaaaccaaaacgttgactacctgcctctttcctcgggcatcgacgtgctcatttccaaagatgatggtgcaggtgaccttttccatcgtgagctaagagaaggttaggaggcctgaggggcgggccttgtgtcccctcctccccctccacagcccctgaggtggagcttccctcacagaccccatctggtcgagcctacggctgcccagtgtacactcagtgatgcttataccaaatagggcatgtgcgctggtgtctgttggggacagccccatccctaccttggagtcggcagagaagcagcaataagcattaggcgaatgattgaaagggctgctgcgccaagaggccttcagtccccttaacgtggctttccaacttcctgacgaggctacaaaggctccgctcacaaaagaaagccaataatgtaaataaatagaaaacgaagcctccacgcgtggtttttaaagggggatgatgaatgtgacaccacccacagaatgcattagaatctggtttttctgtgctttgtcattttactctgataggaatttttgttacctaactctgtgcataacttatttaatgtactgtataaatgaaccaaaactgttaaatatgtatttagtttgttctacttaaagtagtcaataaaaaggctatattcct

SEQ ID NO: 456736 - DNA, 1654 bp, Homo sapiens
tatagggaatcaccgtgagacaggagcaggtggcagccagggaacagtctctcaacgcacgtatgcaggcattgtgccttgcctcaggatgctgctgtcagccatgtgaggcatggtccctcgacgaagttgtttaagcctaggcctaggcagtccacttcgggaggtgggggcactccacactggggggccctgcagctccagggctggtgctctagcagatccgctcaggcacggttgggtgaccgtggggtcaccgattgcgtagattatttctagggcagtgctgggttagaaatgtctgtctggaaacaggacacatcttgccaccacaagtccacacctggccttggctgctgcccgctctctgcagcgtggatttcctttgcccatttgggccagaaggtcaccaggagttcatcactgcttagtgtcaacttgacatcttcagcttccagacagaaaacccatgctttactttgtacagccctgtcccagagttagtaagcctcggcttgtcacctgcttgcaaagggtatagacatcattctgggtagttctagaggatatcgcaacaagtgcgtttgaaggttcagcacagctggaattgtacggtagtgagctcttcaaaatgaaaacagaatgaccggatggccatctgtcctggaaactgtagaattgaataaatcactgaaaatagaacacttcttggaggctttcttcagaactgaactagaaacaaggtttccaggctcccaggtcagtagaccaaaccaacttccttagatttttttttttaagctgtttgcagaaaactgggtggtagcgtgtctgaaccaaacggaagaatagccagcggagcatggactgttccagcacgggccagatggccagctgtcgagagcagccctgcccagattgcggtgggggctgtgccagcggctccgcagggcccttccaactctggagtgtctgtagttcttgtgaaaccaaaacgttgactacctgcctctttcctcgggcatcgacgtgctcatttccaaagatgatggtgcaggtgaccttttccatcgtgagctaagagaaggttaggaggcctgaggggcgggccttgtgtcccctcctccccctccacagcccctgaggtggagcttccctcacagaccccatctggtcgagcctacggctgcccagtgtacactcagtgatgcttataccaaatagggcatgtgcgctggtgtctgttggggacagccccatccctaccttggagtcggcagagaagcagcaataagcattaggcgaatgattgaaagggctgctgcgccaagaggccttcagtccccttaacgtggctttccaacttcctgacgaggctacaaaggctccgctcacaaaagaaagccaataatgtaaataaatagaaaacgaagcctccacgcgtggtttttaaagggggatgatgaatgtgacaccacccacagaatgcattagaatctggtttttctgtgctttgtcattttactctgataggaatttttgttacctaactctgtgcataacttatttaatgtactgtataaatgaaccaaaactgttaaatatgtatttagtttgttctacttaaagtagtcaataaaaaggctatattcct

SEQ ID NO: 456737 - DNA, 2620 bp, Homo sapiens
  misc_feature (1851)..(1851): n is a, c, g, or t
agattccctcagcatcttacctctcaacgttcttctctctgctctgacacatctttcccaaagctgcatttcagtttcctcaaggacaacactgatgtacagaaatccttgtccccctaagtttgattcaaatatatcttctctggccaggtaacacccataatcccagaatttggaaggcccaggccgacttgaggccaggagcttaagaccagcctggggaatgtagcatgactccttcctctacaaaaaaaaaaatttaaattagctgggcatggccaggcacggtggctcacgcctgtaatcccaccactttgggaggccaaggtgggcggatcacgaggtcaggagttcaaggttgcagtgagctataaatcatgctactgcactccagcctaagtgacagagctagaccctatctctgaaaaaaaaaatttttaagcaaatacgtcttctctgtgagtcagtagtgtcctgtacatgtgtacctccatcatactgtaatgaatagcttagttgcctcttttcccactagactatgagatctttgaggggaagaaacaaacaattatgctcttaatataaaataaggttttataaactagctgaaggaggaaggtgtttatccctctcatacaggactgccctatatccactatgtatgtaaacctgagtccatttctctggcctaactcactatttccctgtgtcacacaatccatcctttccccttgtctacccacaagtatacttaaaatcattcatgtagcccttccatacatttaatctatttgtgtttgcttttcaagacctgattgcttcccttgcagtagatataaaagagtgtcattctcttacacttagtttttattcctgattaccagaattacaggtttcttttgctgtattgtgcaaatgtcatatacttaaaacagatataacgttaactttaaaagaatttttttggtatgaaatgtgggaaagtgttcaaacattttcctttaatatgtttaaattggacataccccttttccctgaaggaaaatgtcttaatgtttaccgaataataaatatgatatatttggaaaatccaacataattgcacactcagaaataactgttattgtgattattctcccaggcattaaatatatgatataatatgcatgtgtgttatttttgtaagtggattcttagaaaatataatgttctgtttctggtttttcacttaacagtattgtaggtaccttctctgccttaatgcgtacaaatctgctctaccccctccctgcataagcattctgatacatgactcttgtaattttaatgtagctttctgttggtagatctatatattttcctttttttttttttttgttaggaaaatatattgtgatagcgtgggggtaagttgcatgttacatactatgtttttgaacacttacaaagtttctaaaagtaaattcctagaaatgttatagctctttctggggagcaagcagggattcagaataatccccatatttcattttgttcgtttgttttaatttgttatcatacagtgttatcggcaattgaaatacaaatattgtgtgaactttgaagaaaatatttttatttgttcattccccttagcagagttgctgagtctcattcctaatttgaggcctagacttttgggaaaacacagaggacgtccaccttttagagaacagtgataacttaccaatgggggtttgccggttgggagttattctggtatgcataatgcatacaggccacttgaaggtagaaggcaactattcttttttcttttgcttctggtggtttttgtttgtttgtttgtttgtntgtttgtttgaagatttgggggaagttatgccaggaggtagggggcagaacttggaaaaagaaatgaacttttgaaaaaatgtgacactgggttactgagtccaaaatgtcttagagttgacatcctaggccaagtcattatctctgtaacaggaaacattgtaagcttgattgcctgttcctgaagtgacttgcaatgaacccctcaatatcagggatcagagtgcctctcttcatgggtagtgagaaaggcagtgccctattctgcagcctaggctgctgggcaaaggggagaatttggtggtggtgaagggaatcaaggagggtttctgtcataagaaaccagtgtggtttacctttgccaggcgtctgagttcctgatgatgttcctgcagttatccttttccttatgatttaaaagtctttagcagctgagcacggtggctcacccctgtaatcccaacactttggaaggctgagggaggaagatagcttgagctcaggagttcaggaccagcctagacaacatagcgagactgcatctctactaaacatttaaaaaacaaaataaaaagaccgggcgcggtggctctcccttgtaatcccaccactttaggaggccgaggcgggtggatcacaaagtcaggagttcaccgtcaggagatcacaggaggtggaggttacagtgagccgagaccgcgccactgcgctctggcctgggcaacagagcaagactccatctcaaataaataaataaataaataacatt

SEQ ID NO: 456738 - DNA, 2552 bp, Homo sapiens
  misc_feature (1783)..(1783): n is a, c, g, or t
ggacggagtcagtaccccggacagggcccacatttgcgatgagacatggctgtctcacaggtcacagagccaattacaacagcttactagtttttcatggatttgttggattaacaccttaagcaggttttttattgttattttgtttgttttttttttttgagacggagtttctctcttgttgcccaggctggagtgcaatggcacggtctcggctcaccgcaacctctgcctcccatctacttgggaggctgaggcaggagaatcacttgaacccgggaggcagaagttgcagtgagccgagaaatcatgctactgcactccagcctaagtgacagagctagaccctatctctgaaaaaaaaaatttttaagcaaatacgtcttctctgtgagtcagtagtgtcctgtacatgtgtacctccatcatactgtaatgaatagcttagttgcctcttttcccactagactatgagatctttgaggggaagaaacaaacaattatgctcttaatataaaataaggttttataaactagctgaaggaggaaggtgtttatccctctcatacaggactgccctatatccactatgtatgtaaacctgagtccatttctctggcctaactcactatttccctgtgtcacacaatccatcctttccccttgtctacccacaagtatacttaaaatcattcatgtagcccttccatacatttaatctatttgtgtttgcttttcaagacctgattgcttcccttgcagtagatataaaagagtgtcattctcttacacttagtttttattcctgattaccagaattacaggtttcttttgctgtattgtgcaaatgtcatatacttaaaacagatataacgttaactttaaaagaatttttttggtatgaaatgtgggaaagtgttcaaacattttcctttaatatgtttaaattggacataccccttttccctgaaggaaaatgtcttaatgtttaccgaataataaatatgatatatttggaaaatccaacataattgcacactcagaaataactgttattgtgattattctcccaggcattaaatatatgatataatatgcatgtgtgttatttttgtaagtggattcttagaaaatataatgttctgtttctggtttttcacttaacagtattgtaggtaccttctctgccttaatgcgtacaaatctgctctaccccctccctgcataagcattctgatacatgactcttgtaattttaatgtagctttctgttggtagatctatatattttcctttttttttttttttgttaggaaaatatattgtgatagcgtgggggtaagttgcatgttacatactatgtttttgaacacttacaaagtttctaaaagtaaattcctagaaatgttatagctctttctggggagcaagcagggattcagaataatccccatatttcattttgttcgtttgttttaatttgttatcatacagtgttatcggcaattgaaatacaaatattgtgtgaactttgaagaaaatatttttatttgttcattccccttagcagagttgctgagtctcattcctaatttgaggcctagacttttgggaaaacacagaggacgtccaccttttagagaacagtgataacttaccaatgggggtttgccggttgggagttattctggtatgcataatgcatacaggccacttgaaggtagaaggcaactattcttttttcttttgcttctggtggtttttgtttgtttgtttgtttgtntgtttgtttgaagatttgggggaagttatgccaggaggtagggggcagaacttggaaaaagaaatgaacttttgaaaaaatgtgacactgggttactgagtccaaaatgtcttagagttgacatcctaggccaagtcattatctctgtaacaggaaacattgtaagcttgattgcctgttcctgaagtgacttgcaatgaacccctcaatatcagggatcagagtgcctctcttcatgggtagtgagaaaggcagtgccctattctgcagcctaggctgctgggcaaaggggagaatttggtggtggtgaagggaatcaaggagggtttctgtcataagaaaccagtgtggtttacctttgccaggcgtctgagttcctgatgatgttcctgcagttatccttttccttatgatttaaaagtctttagcagctgagcacggtggctcacccctgtaatcccaacactttggaaggctgagggaggaagatagcttgagctcaggagttcaggaccagcctagacaacatagcgagactgcatctctactaaacatttaaaaaacaaaataaaaagaccgggcgcggtggctctcccttgtaatcccaccactttaggaggccgaggcgggtggatcacaaagtcaggagttcaccgtcaggagatcacaggaggtggaggttacagtgagccgagaccgcgccactgcgctctggcctgggcaacagagcaagactccatctcaaataaataaataaataaataacatt

SEQ ID NO: 456739 - DNA, 1408 bp, Homo sapiens
gggggaagggtagtggagagagaggaagcaggagggagggagaaaaagagagagactgactgtatctggggattctggcaaggtgaagagctggtctgtttggcaggaccttcccatctgggatccatctgtgtttccctggaatgggacaggcagctctagtcagtgagaaatcgcagatgtgagagagctgacacatgtccagctaatgaaaggaggaggaaggctggtctccgattgagctttgaagattaggaggagaaaaagaggagctttggaatatctatttcaaataaatttggtgtatttaagaatctggattgtttataatttgggcatttgggttggtcctgagaaaagggtgccagcgatgcctggatcgcctgtggaagtgaagatacagtccagatcctcacctcccaccatgccacccctcccaccaataaatcctggaggaccgaggccagtgtccttcactcctactgcattaagcaatggcatcaaccattctcctcctaccctgaatggtgccccatcaccgccacagagattcagcaatggtcctgcctcctccacatcatctgcactcacaaatcagcaattgccagccacttgtggtgctcgacaactcagcaagttgaaacgctttcttaccactctgcaacagtttggcaatgacatctcccctgagattggggagaaggtgcggactcttgttcttgcactggtgaactcaacagtgacaattgaggaattccactgtaagctccaagaagccacaaactttccccttcgtccttttgtgattccatttctcaaggccaacctgcccctgctgcagcgggaactgctgcactgcgctcgggcggccaagcagaccccatcccagtacctggctcagcacgaacaccttctgctcaacacaagcattgcatcgcctgctgactcgtcagagttgctcatggaggtgcacggaaatgggaagaggcccagtccagagaggagagaagagaatagttttgatagagacacaattgctcctgagcctcctgccaagagagtatgtaccatcagccctgctcctcggcacagtcctgctctcactgtgcccctcatgaatcccgggggccaattccatcctacccctccacctcttcagcattacaccttagaggatattgcaacttctcacctgtatcgggaacccaacaagatgctagagcatcgagaagttcgtgatagacaccacagtcttggtctaaatggaggctatcaagatgagttggtagatcatcgtttgacagaaagggaatgggctgatgaatggaaacatcttgaccatgcctgatcatatgaatgtaagaacagcgcttatgcattcgccttcagacagatctagaggagcgcg

SEQ ID NO: 456740 - DNA, 2488 bp, Homo sapiens
  misc_feature (1851)..(1851): n is a, c, g, or t
agattccctcagcatcttacctctcaacgttcttctctctgctctgacacatctttcccaaagctgcatttcagtttcctcaaggacaacactgatgtacagaaatccttgtccccctaagtttgattcaaatatatcttctctggccaggtaacacccataatcccagaatttggaaggcccaggccgacttgaggccaggagcttaagaccagcctggggaatgtagcatgactccttcctctacaaaaaaaaaaatttaaattagctgggcatggccaggcacggtggctcacgcctgtaatcccaccactttgggaggccaaggtgggcggatcacgaggtcaggagttcaaggttgcagtgagctataaatcatgctactgcactccagcctaagtgacagagctagaccctatctctgaaaaaaaaaatttttaagcaaatacgtcttctctgtgagtcagtagtgtcctgtacatgtgtacctccatcatactgtaatgaatagcttagttgcctcttttcccactagactatgagatctttgaggggaagaaacaaacaattatgctcttaatataaaataaggttttataaactagctgaaggaggaaggtgtttatccctctcatacaggactgccctatatccactatgtatgtaaacctgagtccatttctctggcctaactcactatttccctgtgtcacacaatccatcctttccccttgtctacccacaagtatacttaaaatcattcatgtagcccttccatacatttaatctatttgtgtttgcttttcaagacctgattgcttcccttgcagtagatataaaagagtgtcattctcttacacttagtttttattcctgattaccagaattacaggtttcttttgctgtattgtgcaaatgtcatatacttaaaacagatataacgttaactttaaaagaatttttttggtatgaaatgtgggaaagtgttcaaacattttcctttaatatgtttaaattggacataccccttttccctgaaggaaaatgtcttaatgtttaccgaataataaatatgatatatttggaaaatccaacataattgcacactcagaaataactgttattgtgattattctcccaggcattaaatatatgatataatatgcatgtgtgttatttttgtaagtggattcttagaaaatataatgttctgtttctggtttttcacttaacagtattgtaggtaccttctctgccttaatgcgtacaaatctgctctaccccctccctgcataagcattctgatacatgactcttgtaattttaatgtagctttctgttggtagatctatatattttcctttttttttttttttgttaggaaaatatattgtgatagcgtgggggtaagttgcatgttacatactatgtttttgaacacttacaaagtttctaaaagtaaattcctagaaatgttatagctctttctggggagcaagcagggattcagaataatccccatatttcattttgttcgtttgttttaatttgttatcatacagtgttatcggcaattgaaatacaaatattgtgtgaactttgaagaaaatatttttatttgttcattccccttagcagagttgctgagtctcattcctaatttgaggcctagacttttgggaaaacacagaggacgtccaccttttagagaacagtgataacttaccaatgggggtttgccggttgggagttattctggtatgcataatgcatacaggccacttgaaggtagaaggcaactattcttttttcttttgcttctggtggtttttgtttgtttgtttgtttgtntgtttgtttgaagatttgggggaagttatgccaggaggtagggggcagaacttggaaaaagaaatgaacttttgaaaaaatgtgacactgggttactgagtccaaaatgtcttagagttgacatcctaggccaagtcattatctctgtaacaggaaacattgtaagcttgattgcctgttcctgaagtgacttgcaatgaacccctcaatatcagggatcagagtgcctctcttcatgggtagtgagaaaggcagtgccctattctgcagcctaggctgctgggcaaaggggagaatttggtggtggtgaagggaatcaaggagggtttctgtcataagaaaccagtgtggtttacctttgccaggcgtctgagttcctgatgatgttcctgcagttatccttttccttatgatttaaaagtctttagcaccaccgcactcagcctacttaatgctaccaataattaatggaacatgtatgcttgaagtgaacataaccacagccatgacatcctttgcttttaataaaagctggtttagctactactccctcagctgaggaattacagagtcactccctaatctttgtgatgggatgatcacttcaggtcagaaaccaaataaagtcatgtagtat

SEQ ID NO: 456741 - DNA, 875 bp, Homo sapiens
gggggaagggtagtggagagagaggaagcaggagggagggagaaaaagagagagactgactgtatctggggattctggcaaggtgaagagctggtctgtttggcaggaccttcccatctgggatccatctgtgtttccctggaatgggacaggcagctctagtcagtgagaaatcgcagatgtgagagagctgacacatgtccagctaatgaaaggaggaggaaggctggtctccgattgagctttgaagattaggaggagaaaaagaggagctttggaatatctatttcaaataaatttggtgtatttaagaatctggattgtttataatttgggcatttgggaggtggggttttgccatgttgcccaggtgggtctcaaactcctgggctaaagcgatcttcccatgttggctgcccaaagtgctgggattacaggcaagagccaccataccagttcctgtctagatattatgatgaagattgaggatggtagtttttgtggagcacaatcctgactgtacctgtgatgttgcattcatcttttggaacataagcagatcaccaggtgaatggctaaagaatctggaataagcttgaaagaaatacaggtcctggcaaggcaatggaaaggtatgtgtgaaacattcatttctaatagaggactaatttaataacagaaatatactcttccctagaaacaatttgctttaaagtgctaggattacaggcttgagccaccacacccggccctattattattattattttgacacagggtcttaactcttcacccaggctggagtgcagtggtgccatcatggctcactcagcctagacttcatggctcagtagttgtcccacctcagcctcccg

SEQ ID NO: 456742 - DNA, 806 bp, Homo sapiens
cggggcggggcgcggcctaacggcggcggcggcggcggcgacggcgacagcagcggtggtggtgtctggttagctcggcggctgcagatctcgcggcgacgcctgcgagggacccgggccgcgggtcgaggcgggcggcgcctgcgagggacccgtgtcgcgggtagaggcgggcggcgcgcggcggcggcgctcggcgatggtaggcgtccctggagcggccgccttccagcgtaagtggggcgtgaatgcgggcggccgaggggggcgtgtgagggcctgcggctccgcaggcgcggtgattccgagtgccccgggcgcgaggccgggagtggaaactgaggcccgaagcggggcggcggatccaaggtcacgcagcggggcgggccttcccgggctcctgaggccaccccgtcgcttcctgcgccgcccgaagagctcggggctcacggtgtgagggaaattgtggggcccgcggcctcggaacttaggccgggccggcgtccatgggacttgccggcgggcaagaatcattttgttgtcccagcgctggggccacgaagtccggctcctggggaaatactacacccgcccgatgttgagggttggaggagatgagaatggcccctcggagggcctgtttgagcgcaggctcagtagttggctacctgggttcacatccaggcttccccatttaggtagtgaccttggctctcccggtgcctcagttcccccatctgcaaaatggggatgtggagcgggttccctccctcccccagggttcttgggttttgtgaggccagtaa

SEQ ID NO: 456743 - DNA, 287 bp, Homo sapiens
ttggtcctgagaaaagggtgccagcgatgcctggatcgcctgtggaagtgaagatacagtccagatcctcacctcccaccatgccacccctcccaccaataaatcctggaggaccgaggccagtgtccttcactcctactgcatgtgagacctcttagttacttatgtttgtagttcagagtgacatttggatctaagtgactgacttgtatgaagcgttccacatatattattcagtgttttcaaagtactattgaaaatatagacacagatatatatttctggtt

SEQ ID NO: 456744 - DNA, 652 bp, Homo sapiens
ccacgcgtccgatgagcacgtcgatgcccgaggaaagaggcaggtagtcaacgttttggtttcacaagaactacagacactccagagttggaagggccctgggcgggccttgtgtcccctcctccccctccacagcccctgaggtggagcttccctcacagaccccatctggtcgagcctacggctgcccagtgtacactcagtgatgcttataccaaatagggcatgtgcgctggtgtctgttggggacagccccatccctaccttggagtcggcagagaagcagcaataagcattaggcgaatgattgaaagggctgctgcgccaagaggccttcagtccccttaacgtggctttccaacttcctgacgaggctacaaaggctccgctcacaaaagaaagccaataatgtaaataaatagaaaacgaagcctccacgcgtggtttttaaagggggatgatgaatgtgacaccacccacagaatgcattagaatctggtttttctgtgctttgtcattttactctgataggaatttttgttacctaactctgtgcataacttatttaatgtactgtataaatgaaccaaaactgttaaatatgtatttagtttgttctacttaaagtagtcaataaaaaggctatattcct

SEQ ID NO: 456745 - DNA, 1469 bp, Homo sapiens
gggggaagggtagtggagagagaggaagcaggagggagggagaaaaagagagagactgactgtatctggggattctggcaaggtgaagagctggtctgtttggcaggaccttcccatctgggatccatctgtgtttccctggaatgggacaggcagctctagtcagtgagaaatcgcagatgtgagagagctgacacatgtccagctaatgaaaggaggaggaaggctggtctccgattgagctttgaagattaggaggagaaaaagaggagctttggaatatctatttcaaataaatttggtgtatttaagaatctggattgtttataatttgggcatttgggttggtcctgagaaaagggtgccagcgatgcctggatcgcctgtggaagtgaagatacagtccagatcctcacctcccaccatgccacccctcccaccaataaatcctggaggaccgaggccagtgtccttcactcctactgcattaagcaatggcatcaaccattctcctcctaccctgaatggtgccccatcaccgccacagagattcagcaatggtcctgcctcctccacatcatctgcactcacaaatcagcaattgccagccacttgtggtgctcgacaactcagcaagttgaaacgctttcttaccactctgcaacagtttggcaatgacatctcccctgagattggggagaaggtgcggactcttgttcttgcactggtgaactcaacagtgacaattgaggaattccactgtaagctccaagaagccacaaactttccccttcgtccttttgtgattccatttctcaaggccaacctgcccctgctgcagcgggaactgctgcactgcgctcgggcggccaagcagaccccatcccagtacctggctcagcacgaacaccttctgctcaacacaagcattgcatcgcctgctgactcgtcagagttgctcatggaggtgcacggaaatgggaagaggcccagtccagagagctgcataatacatctaaaatctatgggagtagcttccagacatgagtatttttcgggaactcttcagatgcctgcacacccggtaagaaactctactctagagaatttatgggtcgactgttccagaagcctcaggagtacagttctgccttttccttgatgctgtttgtagaaagaattggaaaaaaaaaaaaaagaaaagaaaagaaaaaacaaaaaaaaagaaatacaatctgccaaatgccttttatgtcaaacgcatttttttctgatctgagaagttttgaaaaagtatagcaattaattattaatatttgccaatgactcacctttactgagattaaaattaatatgaatttattttagaaaactccctatgagtggctatcaaaatattctatgggttatcaaagaaggcaatatcaacaatagtggataggctttaatgacatttttttaaaagtaaa

SEQ ID NO: 456746 - DNA, 7373 bp, Homo sapiens
cggggcggggcgcggcctaacggcggcggcggcggcggcgacggcgacagcagcggtggtggtgtctggttagctcggcggctgcagatctcgcggcgacgcctgcgagggacccgggccgcgggtcgaggcgggcggcgcctgcgagggacccgtgtcgcgggtagaggcgggcggcgcgcggcggcggcgctcggcgatggtaggcgtccctggagcggccgccttccagcttggtcctgagaaaagggtgccagcgatgcctggatcgcctgtggaagtgaagatacagtccagatcctcacctcccaccatgccacccctcccaccaataaatcctggaggaccgaggccagtgtccttcactcctactgcattaagcaatggcatcaaccattctcctcctaccctgaatggtgccccatcaccgccacagagattcagcaatggtcctgcctcctccacatcatctgcactcacaaatcagcaattgccagccacttgtggtgctcgacaactcagcaagttgaaacgctttcttaccactctgcaacagtttggcaatgacatctcccctgagattggggagaaggtgcggactcttgttcttgcactggtgaactcaacagtgacaattgaggaattccactgtaagctccaagaagccacaaactttccccttcgtccttttgtgattccatttctcaaggccaacctgcccctgctgcagcgggaactgctgcactgcgctcgggcggccaagcagaccccatcccagtacctggctcagcacgaacaccttctgctcaacacaagcattgcatcgcctgctgactcgtcagagttgctcatggaggtgcacggaaatgggaagaggcccagtccagagaggagagaagagaatagttttgatagagacacaattgctcctgagcctcctgccaagagagtatgtaccatcagccctgctcctcggcacagtcctgctctcactgtgcccctcatgaatcccgggggccaattccatcctacccctccacctcttcagcattacaccttagaggatattgcaacttctcacctgtatcgggaacccaacaagatgctagagcatcgagaagttcgtgatagacaccacagtcttggtctaaatggaggctatcaagatgagttggtagatcatcgtttgacagaaagggaatgggctgatgaatggaaacatcttgaccatgcgctgaattgcattatggaaatggtagagaaaacaaggcgctctatggcagttctgcggcgctgtcaggaatcagatcgtgaagaactcaactactggaaaagacggtacaatgaaaacacagagctgaggaaaacggggaccgagttggtctccaggcagcacagccctgggagtgcagattctctcagcaatgattctcagagagagttcaacagcaggccaggtacaggatacgtacctgtggagttttggaaaaaaacagaagaagctgtgaataaggtgaaaattcaggccatgtcagaagtacagaaggccgtcgctgaggcagagcagaaagcctttgaagtgattgcaacagagagagcacgaatggagcaaaccatagcggatgtcaagcggcaggccgcagaggatgctttcctcgtcatcaatgagcaagaggagtccacggagaactgctggaactgtggccgcaaagccagcgagacatgcagtggctgcaatatcgcgcgatactgtggctctttctgccagcacaaggactgggagcggcaccaccgcctctgtggtcagaacctgcatggccagagcccccacggccagggccggccgctgcttcctgtaggcaggggctcctctgccaggtccgccgactgcagcgtgcccagcccagccctcgacaagacctcggcaaccacatcgcgttcctcaacacctgcttctgtgacagctatcgacaccaacggactctgagccccggactctgcttaccctgatggctgctcagcaccacagagtgcttgggctgagggactgactgttggaacccgtgcatgtagctgccgggtcatcagcaagaaatgaattggaggcaggaagagtccaagcctgaataataacaccccacagcctctctgtgcacttgctgtctgcggagccagtgtgccattctctgcacatgggcagccagcctgagctgcctcctccatggctttcctggtttgttcctctctccactgaagctgacttagccggccccttttcagtgtagaccaccagctcccctccccatctccttgagtcagcagactgtccaatgtgctcagccaggctggaggcggcaggcggcaggcagcaggctgtggaggaggcccctcggtcagggagcggcctgcctcacccctgaatagctccttcggccccatctccatcctcagcagatgacactgattggcctcacggggacttgggtaagcaacaggcggcattcaggactcttctcaaccctgctgttcagacttgataagatctcagagtccacaggaaagaagtcactgttgcaataaaagcacccgtagtagcaaaaacataaaacaaataaaacttcccccacatcacagatgattttggacaagattttccaaccttgctggctactttagtttgggacctgttttttttctcatttgattttgcttgtgcagaaaatagtttccagcacatggattgatctgagagagaatgaggctcagttgtggatagtctgttttctctgagcatgttggccaactagtatcgtcaaattattgagtggatcatctcttggaaatgcagaacttctgccaccacttggctatttgcacagtcatcttgttctgtgtccttttatctctcagaccacacacatctggaacgctgtgggcatcttctgcccatgggctccatttggcacctgctgagccacagttgtcctgctggatgtgctgtgcaggttggtaggacttgcccccactgtcaaggcctggtctcatctgaaaagccctcctggacctcaaagaattcttcagacctcatagttacaggtcattatatctactatgttgatttatcatcaggcacacaacttctgtttccttctcttgtgttatctgatagcgtccctccttgagctcatcagaaaggttttatgaaatgtgaaccattttgggaaaagctgatcaatttttcttcctagcttcccattttcaaatgggacatcactcatatccctttcagaatgttaggaactgcctcccacattcttccctgtctttttgggttttgttttttgttgttgttgtggttttttaacacaaagctcactctgttgcccaggctggagtgcagtggcatgatcttggctcactgcaacctctgccttccaggttcaagcaattctcctgcctcgagcctcccgagtagctgagattacaggcgcccaccaccacgcccagctagatttttgtattttttagtagagacagggtttcaccatgttggccaggctgatctcgaactcctgacctcaggtgacctgccttggcctcccaaagtgcagggattacaagcgtgagccaccatgcccggcctgtctttttggttttgatgggagtctgaggaccccgacccctcctgctctccatctttgagcctctggcatcctctcacacccagaaatcagttggagtaagtttaattggccctgctccagctggcctttgaagcacaagtttaaatctccaccttctgtgcactgaccagagtctaaaataaaagttgtcagtaccataaaggaaaagggatccacacaggtagccttctccttggatacaggtacatcttactgtaagaatttcaagtcctggctgggcgcagtggctcactcctgtaatcccagcactttgagagaccgaggcaggcagatcacttgaggtcaggaattcaagaccaacctggccaacatggtgaaaccctgtctctaataaaaaaaaaatagaaaaatcagccgggtgtggtggcacacacctgtaatcctagctactcaggaggctgaggcaagagaatctcttgaacctgtgagccagaggttgcagtgagccgagattccaccactgcactccagcctgggcaacagagcaaaactctgtctcaaaaaaaaaaaaaaaaaggcaaaattaaagaatttcaagtccctaatttactctaaccaagcattttcagtcttacaaagaaatctagtgcacgacacctttaaaatgcctagatttccattgcctaaagtaaggtgtgaccagtgaaacaacagcagagaatcatgttcctttgctgtggaacacataagccccacagttttccagtcagcctaatacatgggtatcccccgaccccatctgcctccttaagccacagtccttggtggggaactctaagggggacggagtcagtaccccggacagggccacatttgcatgagacatggctgtctcacaggtcacagagccattacaacagcttactagtttttcatggatttgttggattaacaccttaagcaggttttttattgttattttgtttgtttgtttgttttgagacgggagtttctctcttgtctcccaggctggagtgcaatcgcgcaatctcggctcacggtaacctctgcctcccaggttcgggcgagtctcctgcctcagccttctgagtagctgggattgcaggcatgcgccaccacgcccaactgattttgtatttttagtagagacggggtttctccttgttggtcaggctggtctcaaaccccggacctcaggtgatccccccaccttggcctcccaaagtgccaggattacaggcatgagccactgtgtccggtcttgagcaggtttttaaaatctccagtggccataaaactagccagggtagctcatgcttttactggttggaataaggagccaaaaccaacaaaataatatttattagggctcgatgcccatttctgtggctaaggcttaggtttggtgtgcagagcctggcctgctcttgtgggctgtggttgctgtgacagtttcgttttctgaatctttgtaatgctcttccaccctgctcgtgctgcccagaggctgatctgcaaacctgggcagtattccacactgaagctcagtttgcaaaccttctgctgtgttaattctggtcagtttcacacagaagtcacgagggcctctgcccaggaccttctattcacatttcaagaatccctttctgaaattctccaactctctggtcaggaggaggagcaccattggggcggggtaggcagctagaggcgcaggagcgaatccaggttccttgcgtggttcccagcctctgctgacagcacctcagctaccaggtggggagtggaaattcagcctgcttagaggactgacctctacagttcatatttgcagtgacataaaaggcaaagaggagctggcatggtggtacagaaggtatcagtcaagcgcaggctcttcagaaacctagaaactaaaaagagatgcaacatgtgactggccatcagccagacatgtctagggtgagaccagtgctcagcaccacccgccaaggaacactgatgagttgtgggacattatggtcggccaagtgaggaatgattgcagggaccagagaagaccaaagatgccagatgtccccagagtttcttgagggctgggtttcacgtctttgcttgtcctttttgtccccacttgcctgcaccgtgcctgactcatccagtggggaaggtgactcaagaagttgtttaagcctaggcctaggcagtccacttcgggaggtgggggcactccacactggggggccctgcagctccagggctggtgctctagcagatccgctcaggcacggttgggtgaccgtggggtcaccgattgcgtagattatttctagggcagtgctgggttagaaatgtctgtctggaaacaggacacatcttgccaccacaagtccacacctggccttggctgctgcccgctctctgcagcgtggatttcctttgcccatttgggccagaaggtcaccaggagttcatcactgcttagtgtcaacttgacatcttcagcttccagacagaaaacccatgctttactttgtacagccctgtcccagagttagtaagcctcggcttgtcacctgcttgcaaagggtatagacatcattctgggtagttctagaggatatcgcaacaagtgcgtttgaaggttcagcacagctggaattgtacggtagtgagctcttcaaaatgaaaacagaatgaccggatggccatctgtcctggaaactgtagaattgaataaatcactgaaaatagaacacttcttggaggctttcttcagaactgaactagaaacaaggtttccaggctcccaggtcagtagaccaaaccaacttccttagatttttttttttaagctgtttgcagaaaactgggtggtagcgtgtctgaaccaaacggaagaatagccagcggagcatggactgttccagcacgggccagatggccagctgtcgagagcagccctgcccagattgcggtgggggctgtgccagcggctccgcagggcccttccaactctggagtgtctgtagttcttgtgaaaccaaaacgttgactacctgcctctttcctcgggcatcgacgtgctcatttccaaagatgatggtgcaggtgaccttttccatcgtgagctaagagaaggttaggaggcctgaggggcgggccttgtgtcccctcctccccctccacagcccctgaggtggagcttccctcacagaccccatctggtcgagcctacggctgcccagtgtacactcagtgatgcttataccaaatagggcatgtgcgctggtgtctgttggggacagccccatccctaccttggagtcggcagagaagcagcaataagcattaggcgaatgattgaaagggctgctgcgccaagaggccttcagtccccttaacgtggctttccaacttcctgacgaggctacaaaggctccgctcacaaaagaaagccaataatgtaaataaatagaaaacgaagcctccacgcgtggtttttaaagggggatgatgaatgtgacaccacccacagaatgcattagaatctggtttttctgtgctttgtcattttactctgataggaatttttgttacctaactctgtgcataacttatttaatgtactgtataaatgaaccaaaactgttaaatatgtatttagtttgttctacttaaagtagtcaataaaaaggctatattcct

SEQ ID NO: 456747 - DNA, 7230 bp, Homo sapiens
gggggaagggtagtggagagagaggaagcaggagggagggagaaaaagagagagactgactgtatctggggattctggcaaggtgaagagctggtctgtttggcaggaccttcccatctgggatccatctgtgtttccctggaatgggacaggcagctctagtcagtgagaaatcgcagatgtgagagagctgacacatgtccagctaatgaaaggaggaggaaggctggtctccgattgagctttgaagattaggaggagaaaaagaggagctttggaatatctatttcaaataaatttggtgtatttaagaatctggattgtttataatttgggcatttgggttggtcctgagaaaagggtgccagcgatgcctggatcgcctgtggaagtgaagatacagtccagatcctcacctcccaccatgccacccctcccaccaataaatcctggaggaccgaggccagtgtccttcactcctactgcattaagcaatggcatcaaccattctcctcctaccctgaatggtgccccatcaccgccacagagattcagcaatggtcctgcctcctccacatcatctgcactcacaaatcagcaattgccagccacttgtggtgctcgacaactcagcaagttgaaacgctttcttaccactctgcaacagtttggcaatgacatctcccctgagattggggagaaggtgcggactcttgttcttgcactggtgaactcaacagtgacaattgaggaattccactgtaagctccaagaagccacaaactttccccttcgtccttttgtgattccatttctcaaggccaacctgcccctgctgcagcgggaactgctgcactgcgctcgggcggccaagcagaccccatcccagtacctggctcagcacgaacaccttctgctcaacacaagcattgcatcgcctgctgactcgtcagagttgctcatggaggtgcacggaaatgggaagaggcccagtccagagaggtctaaatggaggctatcaagatgagttggtagatcatcgtttgacagaaagggaatgggctgatgaatggaaacatcttgaccatgcgctgaattgcattatggaaatggtagagaaaacaaggcgctctatggcagttctgcggcgctgtcaggaatcagatcgtgaagaactcaactactggaaaagacggtacaatgaaaacacagagctgaggaaaacggggaccgagttggtctccaggcagcacagccctgggagtgcagattctctcagcaatgattctcagagagagttcaacagcaggccaggtacaggatacgtacctgtggagttttggaaaaaaacagaagaagctgtgaataaggtgaaaattcaggccatgtcagaagtacagaaggccgtcgctgaggcagagcagaaagcctttgaagtgattgcaacagagagagcacgaatggagcaaaccatagcggatgtcaagcggcaggccgcagaggatgctttcctcgtcatcaatgagcaagaggagtccacggagaactgctggaactgtggccgcaaagccagcgagacatgcagtggctgcaatatcgcgcgatactgtggctctttctgccagcacaaggactgggagcggcaccaccgcctctgtggtcagaacctgcatggccagagcccccacggccagggccggccgctgcttcctgtaggcaggggctcctctgccaggtccgccgactgcagcgtgcccagcccagccctcgacaagacctcggcaaccacatcgcgttcctcaacacctgcttctgtgacagctatcgacaccaacggactctgagccccggactctgcttaccctgatggctgctcagcaccacagagtgcttgggctgagggactgactgttggaacccgtgcatgtagctgccgggtcatcagcaagaaatgaattggaggcaggaagagtccaagcctgaataataacaccccacagcctctctgtgcacttgctgtctgcggagccagtgtgccattctctgcacatgggcagccagcctgagctgcctcctccatggctttcctggtttgttcctctctccactgaagctgacttagccggccccttttcagtgtagaccaccagctcccctccccatctccttgagtcagcagactgtccaatgtgctcagccaggctggaggcggcaggcggcaggcagcaggctgtggaggaggcccctcggtcagggagcggcctgcctcacccctgaatagctccttcggccccatctccatcctcagcagatgacactgattggcctcacggggacttgggtaagcaacaggcggcattcaggactcttctcaaccctgctgttcagacttgataagatctcagagtccacaggaaagaagtcactgttgcaataaaagcacccgtagtagcaaaaacataaaacaaataaaacttcccccacatcacagatgattttggacaagattttccaaccttgctggctactttagtttgggacctgttttttttctcatttgattttgcttgtgcagaaaatagtttccagcacatggattgatctgagagagaatgaggctcagttgtggatagtctgttttctctgagcatgttggccaactagtatcgtcaaattattgagtggatcatctcttggaaatgcagaacttctgccaccacttggctatttgcacagtcatcttgttctgtgtccttttatctctcagaccacacacatctggaacgctgtgggcatcttctgcccatgggctccatttggcacctgctgagccacagttgtcctgctggatgtgctgtgcaggttggtaggacttgcccccactgtcaaggcctggtctcatctgaaaagccctcctggacctcaaagaattcttcagacctcatagttacaggtcattatatctactatgttgatttatcatcaggcacacaacttctgtttccttctcttgtgttatctgatagcgtccctccttgagctcatcagaaaggttttatgaaatgtgaaccattttgggaaaagctgatcaatttttcttcctagcttcccattttcaaatgggacatcactcatatccctttcagaatgttaggaactgcctcccacattcttccctgtctttttgggttttgttttttgttgttgttgtggttttttaacacaaagctcactctgttgcccaggctggagtgcagtggcatgatcttggctcactgcaacctctgccttccaggttcaagcaattctcctgcctcgagcctcccgagtagctgagattacaggcgcccaccaccacgcccagctagatttttgtattttttagtagagacagggtttcaccatgttggccaggctgatctcgaactcctgacctcaggtgacctgccttggcctcccaaagtgcagggattacaagcgtgagccaccatgcccggcctgtctttttggttttgatgggagtctgaggaccccgacccctcctgctctccatctttgagcctctggcatcctctcacacccagaaatcagttggagtaagtttaattggccctgctccagctggcctttgaagcacaagtttaaatctccaccttctgtgcactgaccagagtctaaaataaaagttgtcagtaccataaaggaaaagggatccacacaggtagccttctccttggatacaggtacatcttactgtaagaatttcaagtcctggctgggcgcagtggctcactcctgtaatcccagcactttgagagaccgaggcaggcagatcacttgaggtcaggaattcaagaccaacctggccaacatggtgaaaccctgtctctaataaaaaaaaaatagaaaaatcagccgggtgtggtggcacacacctgtaatcctagctactcaggaggctgaggcaagagaatctcttgaacctgtgagccagaggttgcagtgagccgagattccaccactgcactccagcctgggcaacagagcaaaactctgtctcaaaaaaaaaaaaaaaaaggcaaaattaaagaatttcaagtccctaatttactctaaccaagcattttcagtcttacaaagaaatctagtgcacgacacctttaaaatgcctagatttccattgcctaaagtaaggtgtgaccagtgaaacaacagcagagaatcatgttcctttgctgtggaacacataagccccacagttttccagtcagcctaatacatgggtatcccccgaccccatctgcctccttaagccacagtccttggtggggaactctaagggggacggagtcagtaccccggacagggccacatttgcatgagacatggctgtctcacaggtcacagagccattacaacagcttactagtttttcatggatttgttggattaacaccttaagcaggttttttattgttattttgtttgtttgtttgttttgagacgggagtttctctcttgtctcccaggctggagtgcaatcgcgcaatctcggctcacggtaacctctgcctcccaggttcgggcgagtctcctgcctcagccttctgagtagctgggattgcaggcatgcgccaccacgcccaactgattttgtatttttagtagagacggggtttctccttgttggtcaggctggtctcaaaccccggacctcaggtgatccccccaccttggcctcccaaagtgccaggattacaggcatgagccactgtgtccggtcttgagcaggtttttaaaatctccagtggccataaaactagccagggtagctcatgcttttactggttggaataaggagccaaaaccaacaaaataatatttattagggctcgatgcccatttctgtggctaaggcttaggtttggtgtgcagagcctggcctgctcttgtgggctgtggttgctgtgacagtttcgttttctgaatctttgtaatgctcttccaccctgctcgtgctgcccagaggctgatctgcaaacctgggcagtattccacactgaagctcagtttgcaaaccttctgctgtgttaattctggtcagtttcacacagaagtcacgagggcctctgcccaggaccttctattcacatttcaagaatccctttctgaaattctccaactctctggtcaggaggaggagcaccattggggcggggtaggcagctagaggcgcaggagcgaatccaggttccttgcgtggttcccagcctctgctgacagcacctcagctaccaggtggggagtggaaattcagcctgcttagaggactgacctctacagttcatatttgcagtgacataaaaggcaaagaggagctggcatggtggtacagaaggtatcagtcaagcgcaggctcttcagaaacctagaaactaaaaagagatgcaacatgtgactggccatcagccagacatgtctagggtgagaccagtgctcagcaccacccgccaaggaacactgatgagttgtgggacattatggtcggccaagtgaggaatgattgcagggaccagagaagaccaaagatgccagatgtccccagagtttcttgagggctgggtttcacgtctttgcttgtcctttttgtccccacttgcctgcaccgtgcctgactcatccagtggggaaggtgactcaagaagttgtttaagcctaggcctaggcagtccacttcgggaggtgggggcactccacactggggggccctgcagctccagggctggtgctctagcagatccgctcaggcacggttgggtgaccgtggggtcaccgattgcgtagattatttctagggcagtgctgggttagaaatgtctgtctggaaacaggacacatcttgccaccacaagtccacacctggccttggctgctgcccgctctctgcagcgtggatttcctttgcccatttgggccagaaggtcaccaggagttcatcactgcttagtgtcaacttgacatcttcagcttccagacagaaaacccatgctttactttgtacagccctgtcccagagttagtaagcctcggcttgtcacctgcttgcaaagggtatagacatcattctgggtagttctagaggatatcgcaacaagtgcgtttgaaggttcagcacagctggaattgtacggtagtgagctcttcaaaatgaaaacagaatgaccggatggccatctgtcctggaaactgtagaattgaataaatcactgaaaatagaacacttcttggaggctttcttcagaactgaactagaaacaaggtttccaggctcccaggtcagtagaccaaaccaacttccttagatttttttttttaagctgtttgcagaaaactgggtggtagcgtgtctgaaccaaacggaagaatagccagcggagcatggactgttccagcacgggccagatggccagctgtcgagagcagccctgcccagattgcggtgggggctgtgccagcggctccgcagggcccttccaactctggagtgtctgtagttcttgtgaaaccaaaacgttgactacctgcctctttcctcgggcatcgacgtgctcatttccaaagatgatggtgcaggtgaccttttccatcgtgagctaagagaaggttaggaggcctgaggggcgggccttgtgtcccctcctccccctccacagcccctgaggtggagcttccctcacagaccccatctggtcgagcctacggctgcccagtgtacactcagtgatgcttataccaaatagggcatgtgcgctggtgtctgttggggacagccccatccctaccttggagtcggcagagaagcagcaataagcattaggcgaatgattgaaagggctgctgcgccaagaggccttcagtccccttaacgtggctttccaacttcctgacgaggctacaaaggctccgctcacaaaagaaagccaataatgtaaataaatagaaaacgaagcctccacgcgtggtttttaaagggggatgatgaatgtgacaccacccacagaatgcattagaatctggtttttctgtgctttgtcattttactctgataggaatttttgttacctaactctgtgcataacttatttaatgtactgtataaatgaaccaaaactgttaaatatgtatttagtttgttctacttaaagtagtcaataaaaaggctatattcct

SEQ ID NO: 456748 - DNA, 6526 bp, Homo sapiens
gggggaagggtagtggagagagaggaagcaggagggagggagaaaaagagagagactgactgtatctggggattctggcaaggtgaagagctggtctgtttggcaggaccttcccatctgggatccatctgtgtttccctggaatgggacaggcagctctagtcagtgagaaatcgcagatgtgagagagctgacacatgtccagctaatgaaaggaggaggaaggctggtctccgattgagctttgaagattaggaggagaaaaagaggagctttggaatatctatttcaaataaatttggtgtatttaagaatctggattgtttataatttgggcatttgggttggtcctgagaaaagggtgccagcgatgcctggatcgcctgtggaagtgaagatacagtccagatcctcacctcccaccatgccacccctcccaccaataaatcctggaggaccgaggccagtgtccttcactcctactgcattaagcaatggcatcaaccattctcctcctaccctgaatggtgccccatcaccgccacagagattcagcaatggtcctgcctcctccacatcatctgcactcacaaatcagcaattgccagccacttgtggtgctcgacaactcagcaagttgaaacgctttcttaccactctgcaacagtttggcaatgacatctcccctgagattggggagaaggtgcggactcttgttcttgcactggtgaactcaacagtgacaattgaggaattccactgtaagctccaagaagccacaaactttccccttcgtccttttgtgattccatttctcaaggccaacctgcccctgctgcagcgggaactgctgcactgcgctcgggcggccaagcagaccccatcccagtacctggctcagcacgaacaccttctgctcaacacaagcattgcatcgcctgctgactcgtcagagttgctcatggaggtgcacggaaatgggaagaggcccagtccagagaggagagaagagaatagttttgatagagacacaattgctcctgagcctcctgccaagagagtatgtaccatcagccctgctcctcggcacagtcctgctctcactgtgcccctcatgaatcccgggggccaattccatcctacccctccacctcttcagcattacaccttagaggatattgcaacttctcacctgtatcgggaacccaacaagatgctagagcatcgagaagttcgtgatagacaccacagtcttggtctaaatggaggctatcaagatgagttggtagatcatcgtttgacagaaagggaatgggctgatgaatggaaacatcttgaccatgcgctgaattgcattatggaaatggtagagaaaacaaggcgctctatggcagttctgcggcgctgtcaggaatcagatcgtgaagaactcaactactggaaaagacggtacaatgaaaacacagagctgaggaaaacggggaccgagttggtctccaggcagcacagccctgggagtgcagattctctcagcaatgattctcagagagagttcaacagcaggccaggtacaggatacgtacctgtggagttttggaaaaaaacagaagaagctgtgaataaggtgaaaattcaggccatgtcagaagtacagaaggccgtcgctgaggcagagcagaaagcctttgaagtgattgcaacagagagagcacgaatggagcaaaccatagcggatgtcaagcggcaggccgcagaggatgctttcctcgtcatcaatgagcaagaggagtccacggagaactgctggaactgtggccgcaaagccagcgagacatgcagtggctgcaatatcgcgcgatactgtggctctttctgccagcacaaggactgggagcggcaccaccgcctctgtggtcagaacctgcatggccagagcccccacggccagggccggccgctgcttcctgtaggcaggggctcctctgccaggtccgccgactgcagcgtgcccagcccagccctcgacaagacctcggcaaccacatcgcgttcctcaacacctgcttctgtgacagctatcgacaccaacggactctgagccccggactctgcttaccctgatggctgctcagcaccacagagtgcttgggctgagggactgactgttggaacccgtgcatgtagctgccgggtcatcagcaagaaatgaattggaggcaggaagagtccaagcctgaataataacaccccacagcctctctgtgcacttgctgtctgcggagccagtgtgccattctctgcacatgggcagccagcctgagctgcctcctccatggctttcctggtttgttcctctctccactgaagctgacttagccggccccttttcagtgtagaccaccagctcccctccccatctccttgagtcagcagactgtccaatgtgctcagccaggctggaggcggcaggcggcaggcagcaggctgtggaggaggcccctcggtcagggagcggcctgcctcacccctgaatagctccttcggccccatctccatcctcagcagatgacactgattggcctcacggggacttgggtaagcaacaggcggcattcaggactcttctcaaccctgctgttcagacttgataagatctcagagtccacaggaaagaagtcactgttgcaataaaagcacccgtagtagcaaaaacataaaacaaataaaacttcccccacatcacagatgattttggacaagattttccaaccttgctggctactttagtttgggacctgttttttttctcatttgattttgcttgtgcagaaaatagtttccagcacatggattgatctgagagagaatgaggctcagttgtggatagtctgttttctctgagcatgttggccaactagtatcgtcaaattattgagtggatcatctcttggaaatgcagaacttctgccaccacttggctatttgcacagtcatcttgttctgtgtccttttatctctcagaccacacacatctggaacgctgtgggcatcttctgcccatgggctccatttggcacctgctgagccacagttgtcctgctggatgtgctgtgcaggttggtaggacttgcccccactgtcaaggcctggtctcatctgaaaagccctcctggacctcaaagaattcttcagacctcatagttacaggtcattatatctactatgttgatttatcatcaggcacacaacttctgtttccttctcttgtgttatctgatagcgtccctccttgagctcatcagaaaggttttatgaaatgtgaaccattttgggaaaagctgatcaatttttcttcctagcttcccattttcaaatgggacatcactcatatccctttcagaatgttaggaactgcctcccacattcttccctgtctttttgggttttgttttttgttgttgttgtggttttttaacacaaagctcactctgttgcccaggctggagtgcagtggcatgatcttggctcactgcaacctctgccttccaggttcaagcaattctcctgcctcgagcctcccgagtagctgagattacaggcgcccaccaccacgcccagctagatttttgtattttttagtagagacagggtttcaccatgttggccaggctgatctcgaactcctgacctcaggtgacctgccttggcctcccaaagtgcagggattacaagcgtgagccaccatgcccggcctgtctttttggttttgatgggagtctgaggaccccgacccctcctgctctccatctttgagcctctggcatcctctcacacccagaaatcagttggagtaagtttaattggccctgctccagctggcctttgaagcacaagtttaaatctccaccttctgtgcactgaccagagtctaaaataaaagttgtcagtaccataaaggaaaagggatccacacaggtagccttctccttggatacaggtacatcttactgtaagaatttcaagtcctggctgggcgcagtggctcactcctgtaatcccagcactttgagagaccgaggcaggcagatcacttgaggtcaggaattcaagaccaacctggccaacatggtgaaaccctgtctctaataaaaaaaaaatagaaaaatcagccgggtgtggtggcacacacctgtaatcctagctactcaggaggctgaggcaagagaatctcttgaacctgtgagccagaggttgcagtgagccgagattccaccactgcactccagcctgggcaacagagcaaaactctgtctcaaaaaaaaaaaaaaaaaggcaaaattaaagaatttcaagtccctaatttactctaaccaagcattttcagtcttacaaagaaatctagtgcacgacacctttaaaatgcctagatttccattgcctaaagtaaggtgtgaccagtgaaacaacagcagagaatcatgttcctttgctgtggaacacataagccccacagttttccagtcagcctaatacatgggtatcccccgaccccatctgcctccttaagccacagtccttggtggggaactctaagggggacggagtcagtaccccggacagggccacatttgcatgagacatggctgtctcacaggtcacagagccattacaacagcttactagtttttcatggatttgttggattaacaccttaagcaggttttttattgttattttgtttgtttgtttgttttgagacgggagtttctctcttgtctcccaggctggagtgcaatcgcgcaatctcggctcacggtaacctctgcctcccaggttcgggcgagtctcctgcctcagccttctgagtagctgggattgcaggcatgcgccaccacgcccaactgattttgtatttttagtagagacggggtttctccttgttggtcaggctggtctcaaaccccggacctcaggtgatccccccaccttggcctcccaaagtgccaggattacaggcatgagccactgtgtccggtcttgagcaggtttttaaaatctccagtggccataaaactagccagggtagctcatgcttttactggttggaataaggagccaaaaccaacaaaataatatttattagggctcgatgcccatttctgtggctaaggcttaggtttggtgtgcagagcctggcctgctcttgtgggctgtggttgctgtgacagtttcgttttctgaatctttgtaatgctcttccaccctgctcgtgctgcccagaggctgatctgcaaacctgggcagtattccacactgaagctcagtttgcaaaccttctgctgtgttaattctggtcagtttcacacagaagtcacgagggcctctgcccaggaccttctattcacatttcaagaatccctttctgaaattctccaactctctggtcaggaggaggagcaccattggggcggggtaggcagctagaggcgcaggagcgaatccaggttccttgcgtggttcccagcctctgctgacagcacctcagctaccaggtggggagtggaaattcagcctgcttagaggactgacctctacagttcatatttgcagtgacataaaaggcaaagaggagctggcatggtggtacagaaggtatcagtcaagcgcaggctcttcagaaacctagaaactaaaaagagatgcaacatgtgactggccatcagccagacatgtctagggtgagaccagtgctcagcaccacccgccaaggaacactgatgagttgtgggacattatggtcggccaagtgaggaatgattgcagggaccagagaagaccaaagatgccagatgtccccagagtttcttgagggctgggtttcacgtctttgcttgtcctttttgtccccacttgcctgcaccgtgcctgactcatccagtggggaaggtgactcaagaagttgtttaagcctaggcctaggcagtccacttcgggaggtgggggcactccacactggggggccctgcagctccagggctggtgctctagcagatccgctcaggcacggttgggtgaccgtggggtcaccgattgcgtagattatttctagggcagtgctgggttagaaatgtctgtctggaaacaggacacatcttgccaccacaagtccacacctggccttggctgctgcccgctctctgcagcgtggatttcctttgcccatttgggccagaaggtccaggtatgccggcatacctggaccttctgtattcccaggttcaagcgatgctcctgcctcagcctcccgagtagctgggaatacagaagggcatcatcacacccagctactttttgtatttttagtagagacagggttgcgccacgttggccaggcaggtcttgtactcctggcctcatgtgatccactcatcctcggcttccaaaagtgccgggattacaggtgtgaaccacctcacctggccatacgcttgaatatgttttatttgatactgagattacatggtaa

SEQ ID NO: 456749 - DNA, 1604 bp, Homo sapiens
  misc_feature (835)..(835): n is a, c, g, or t
cggggcggggcgcggcctaacggcggcggcggcggcggcgacggcgacagcagcggtggtggtgtctggttagctcggcggctgcagatctcgcggcgacgcctgcgagggacccgggccgcgggtcgaggcgggcggcgcctgcgagggacccgtgtcgcgggtagaggcgggcggcgcgcggcggcggcgctcggcgatggtaggcgtccctggagcggccgccttccagcttggtcctgagaaaagggtgccagcgatgcctggatcgcctgtggaagtgaagatacagtccagatcctcacctcccaccatgccacccctcccaccaataaatcctggaggaccgaggccagtgtccttcactcctactgcattaagcaatggcatcaaccattctcctcctaccctgaatggtgccccatcaccgccacagagattcagcaatggtcctgcctcctccacatcatctgcactcacaaatcagcaattgccagccacttgtggtgctcgacaactcagcaagttgaaacgctttcttaccactctgcaacagtttggcaatgacatctcccctgagattggggagaaggtgcggactcttgttcttgcactggtgcagagttgctgagtctcattcctaatttgaggcctagacttttgggaaaacacagaggacgtccaccttttagagaacagtgataacttaccaatgggggtttgccggttgggagttattctggtatgcataatgcatacaggccacttgaaggtagaaggcaactattcttttttcttttgcttctggtggtttttgtttgtttgtttgtttgtntgtttgtttgaagatttgggggaagttatgccaggaggtagggggcagaacttggaaaaagaaatgaacttttgaaaaaatgtgacactgggttactgagtccaaaatgtcttagagttgacatcctaggccaagtcattatctctgtaacaggaaacattgtaagcttgattgcctgttcctgaagtgacttgcaatgaacccctcaatatcagggatcagagtgcctctcttcatgggtagtgagaaaggcagtgccctattctgcagcctaggctgctgggcaaaggggagaatttggtggtggtgaagggaatcaaggagggtttctgtcataagaaaccagtgtggtttacctttgccaggcgtctgagttcctgatgatgttcctgcagttatccttttccttatgatttaaaagtctttagcagctgagcacggtggctcacccctgtaatcccaacactttggaaggctgagggaggaagatagcttgagctcaggagttcaggaccagcctagacaacatagcgagactgcatctctactaaacatttaaaaaacaaaataaaaagaccgggcgcggtggctctcccttgtaatcccaccactttaggaggccgaggcgggtggatcacaaagtcaggagttcaccgtcaggagatcacaggaggtggaggttacagtgagccgagaccgcgccactgcgctctggcctgggcaacagagcaagactccatctcaaataaataaataaataaataacatt

SEQ ID NO: 456750 - DNA, 909 bp, Homo sapiens
ctaaaattctgtgtttctgctagtttcttcctcaagataaaactgtggaactcatagtgaattccctctctttgggcagtttgagccaggccgctatttaatcacaacatcacaagtcagatttttcctacctagtgttggcagtggaacacaccagaactgctaaggccaaggaaatcccattttttgaagaggctttcctttgttagcttctctttctagtagtaaaggtaaaagaaaaatagatgttaaagatataaatatcttagggggtttttattggtataaatatttgtacacaaaaagaatatgtaatgtaaactggatatgtattttttacattttacttaacctgaattttacacaatctttgcttgaatgctccaacaatgaaaggagaaaatatgtatttaaacaatttttaagtatttattctttattcaggacacttgagtttcattcaagctatagttttaaaatgtaaaaatgctgagaaattaaaagcagtcaaatgcttttgtctgagtctttgttcaaggaagtatcttagacaactttgccttaaaagttcttgaggcaaatgaaaaccagtttttcagaattagaaagaccacaattaacttagtatcctataactttggtgttttaaaaagtaattctcaaaggggtgagtcaagtcagaaagagaactgtgtgtgtaaattgtcaggttttgacgtttgtttccagccatttccagagagaaaacttcatttttattcttctcagcagcacatttcaaaggaaaattgtacaattcttatattcacaatatcacagctaaaattatctagtataaagactctacgatttacatcgtaagattcagaaagagcacattttgagtttgaaaacaaatgaagtgatatg

SEQ ID NO: 456751 - DNA, 1946 bp, Homo sapiens
agcggagtgacgcgggcccgggcgcgacggtctcggcggcggcggcggcggcgacagagcgagcgcggcgcggggccaccatgggggcccagctcagcacgttgggccatatggtgctcttcccagtctggttcctgtacagtctgctcatgaagctgttccagcgctccacgccagccatcaccctcgagagcccggacatcaagtacccgctgcggctcatcgaccgggagatcatcagccatgacacccggcgcttccgctttgccctgccgtcaccccagcacatcctgggcctccctgtcggccagcacatctacctctcggctcgaattgatggaaacctggtcgtccggccctatacacccatctccagcgatgatgacaagggcttcgtggacctggtcatcaaggtttacttcaaggacacccatcccaagtttcccgctggagggaagatgtctcagtacctggagagcatgcagattggagacaccattgagttccggggccccagtgggctgctggtctaccagggcaaagggaagttcgccatccgacctgacaaaaagtccaaccctatcatcaggacagtgaagtctgtgggcatgatcgcgggagggacaggcatcaccccgatgctgcaggtgatccgcgccatcatgaaggaccctgatgaccacactgtgtgccacctgctctttgccaaccagaccgagaaggacatcctgctgcgacctgagctggaggaactcaggaacaaacattctgcacgcttcaagctctggtacacgctggacagagcccctgaagcctgggactacggccagggcttcgtgaatgaggagatgatccgggaccaccttccacccccagaggaggagccgctggtgctgatgtgtggccccccacccatgatccagtacgcctgccttcccaacctggaccacgtgggccaccccacggagcgctgcttcgtcttctgagggccgggcacggtcacacggccacccgccccgcgcaccccacgccctgttcacgctcacccagtcacctccccacatcgcacactggggccccgggttcagcctggcctgcccgtgccctggtgaatcacctggctgagcagttcccctggagccccttcgggagcagggctgtgtcccagatgggccacggctgagccttcagagtacgtcctgcctggcacttactggtccttaccagagacgcccagccccatccctgtcctcatgacccctcgtccaccccccacacacactataaggctgagggctgccagcagccccgtctgcccaccattcccggccgtggaccatagtcgggatgtcagcagacacacatgggcagcccaaagctgcaggtgccagggcccaccccagcctcgcctgtcacccccactcccgcctcagggccaggcccaggcctcaccacctgacgctgcatgagacattgacaccagaaagccctcttgggggcactgctccctaccccagggccctggccagccgggagcttggctctcctctggctagagtgggaagagggggctggccatggggccctcccagaacctcagcatttccttccagcccatccaaacactgaggcagccttggggaaccccgagctggggggttggcagcccactgcaccgcctcagggttttggggtcctgggctggggccaccatccctgatggcagaactcccacaaccacatgtatttattcctctgtcctaaaccgtcccctccttccctcacccccagcacagggggattctgagcagtgcctcttgtctgagggacatatcagtgacctcgacgttgcctttagactacagttgtgttagcctcttgcgtattggctttttcagagtcatttatgagcagaaaaaaaaaaagtaaaactttgctaatattaa

SEQ ID NO: 456752 - DNA, 1972 bp, Homo sapiens
aggggttggccctggagtctgccagccacactgggaaaacattggagcttggtctgccatcctgaactgtggttcccctgcctcccagcccggctgtgagtgctcagcgaccctgacaggctgacagttgggccatatggtgctcttcccagtctggttcctgtacagtctgctcatgaagctgttccagcgctccacgccagccatcaccctcgagagcccggacatcaagtacccgctgcggctcatcgaccgggagatcatcagccatgacacccggcgcttccgctttgccctgccgtcaccccagcacatcctgggcctccctgtcggccagcacatctacctctcggctcgaattgatggaaacctggtcgtccggccctatacacccatctccagcgatgatgacaagggcttcgtggacctggtcatcaaggtttacttcaaggacacccatcccaagtttcccgctggagggaagatgtctcagtacctggagagcatgcagattggagacaccattgagttccggggccccagtgggctgctggtctaccagggcaaagggaagttcgccatccgacctgacaaaaagtccaaccctatcatcaggacagtgaagtctgtgggcatgatcgcgggagggacaggcatcaccccgatgctgcaggtgatccgcgccatcatgaaggaccctgatgaccacactgtgtgccacctgctctttgccaaccagaccgagaaggacatcctgctgcgacctgagctggaggaactcaggaacaaacattctgcacgcttcaagctctggtacacgctggacagagcccctgaagcctgggactacggccagggcttcgtgaatgaggagatgatccgggaccaccttccacccccagaggaggagccgctggtgctgatgtgtggccccccacccatgatccagtacgcctgccttcccaacctggaccacgtgggccaccccacggagcgctgcttcgtcttctgagggccgggcacggtcacacggccacccgccccgcgcaccccacgccctgttcacgctcacccagtcacctccccacatcgcacactggggccccgggttcagcctggcctgcccgtgccctggtgaatcacctggctgagcagttcccctggagccccttcgggagcagggctgtgtcccagatgggccacggctgagccttcagagtacgtcctgcctggcacttactggtccttaccagagacgcccagccccatccctgtcctcatgacccctcgtccaccccccacacacactataaggctgagggctgccagcagccccgtctgcccaccattcccggccgtggaccatagtcgggatgtcagcagacacacatgggcagcccaaagctgcaggtgccagggcccaccccagcctcgcctgtcacccccactcccgcctcagggccaggcccaggcctcaccacctgacgctgcatgagacattgacaccagaaagccctcttgggggcactgctccctaccccagggccctggccagccgggagcttggctctcctctggctagagtgggaagagggggctggccatggggccctcccagaacctcagcatttccttccagcccatccaaacactgaggcagccttggggaaccccgagctggggggttggcagcccactgcaccgcctcagggttttggggtcctgggctggggccaccatccctgatggcagaactcccacaaccacatgtatttattcctctgtcctaaaccgtcccctccttccctcacccccagcacagggggattctgagcagtgcctcttgtctgagggacatatcagtgacctcgacgttgcctttagactacagttgtgttagcctcttgcgtattggctttttcagagtcatttatgagcagaaaaaaaaaaagtaaaactttgctaatattaa

SEQ ID NO: 456753 - DNA, 713 bp, Homo sapiens
tccgccgcctcgaggcagacccggatccagagggcgcctggacaagttgggccatatggtgctcttcccagtctggttcctgtacagtctgctcatgaagctgttccagcgctccacgccagccatcaccctcgagagcccggacatcaagtacccgctgcggctcatcgaccgggagatcatcagccatgacacccggcgcttccgctttgccctgccgtcaccccagcacatcctgggcctccctgtcggccagcacatctacctctcggctcgaattgatggaaacctggtcgtccggccctatacacccatctccagcgatgatgacaagggcttcgtggacctggtcatcaaggtttacttcaaggacacccatcccaagtttcccgctggagggaagatgtctcagtacctggagagcatgcagattggagacaccattgagttccggggccccagtgggctgctggtctaccagggcaaagggaagttcgccatccgacctgacaaaaagtccaaccctatcatcaggacagtgaagtctgtgggcatgatcgcgggagggacaggcatcaccccgatgctgcaggtgatccgcgccatcatgaaggaccctgatgaccacactgtgtgccacctgctctttgccaaccagaacagaacgagaaggacatcctgttgggaactgaattgggggaccccgggaccca

SEQ ID NO: 456754 - DNA, 2487 bp, Homo sapiens
agcggagtgacgcgggcccgggcgcgacggtctcggcggcggcggcggcggcgacagagcgagcgcggcgcggggccaccatgggggcccagctcagcacgttgggccatatggtgctcttcccagtctggttcctgtacagtctgctcatgaagctgttccagcgctccacgccagccatcaccctcgagagcccggacatcaagtacccgctgcggctcatcgaccgggagatcatcagccatgacacccggcgcttccgctttgccctgccgtcaccccagcacatcctgggcctccctgtcggccagcacatctacctctcggctcgaattgatggaaacctggtcgtccggccctatacacccatctccagcgatgatgacaagggcttcgtggacctggtcatcaaggtttacttcaaggacacccatcccaagtttcccgctggagggaagatgtctcagtacctggagagcatgcagattggagacaccattgagttccggggccccagtgggctgctggtctaccagggcaaagggaagttcgccatccgacctgacaaaaagtccaaccctatcatcaggacagtgaagtctgtgggcatgatcgcgggagggacaggcatcaccccgatgctgcaggtgatccgcgccatcatgaaggaccctgatgaccacactgtgtgccacctgctctttgccaaccagaccgagaaggacatcctgctgcgacctgagctggaggaactcaggaacaaacattctgcacgcttcaagctctggtacacgctggacagagcccctgaagcctgggactacggccagggcttcgtgaatgaggagatgatccgggaccaccttccacccccagaggaggagccgctggtgctgatgtgtggccccccacccatgatccagtacgcctgccttcccaacctggaccacgtgggccaccccacggagcgctgcttcgtcttctgagggccgggcacggtcacacggccacccgccccgcgcaccccacgccctgttcacgctcacccagtcacctccccacatcgcacactggggccccgggttcagcctggcctgcccgtgccctggtgaatcacctggctgagcagttcccctggagccccttcgggagcagggctgtgtcccagatgggccacggctgagccttcagagtacgtcctgcctggcacttactggtccttaccagagacgcccagccccatccctgtcctcatgacccctcgtccaccccccacacacactataaggctgagggctgccagcagccccgtctgcccaccattcccggccgtggaccatagtcgggatgtcagcagacacacatgggcagcccaaagctgcaggtgccagggcccaccccagcctcgcctgtcacccccactcccgcctcagggccaggcccaggcctcaccacctgacgctgcatgagacattgacaccagaaagccctcttgggggcactgctccctaccccagggccctggccagccgggagcttggctctcctctggctagagtgggaagagggggctggccatggggccctcccagaacctcagcatttccttccagcccatccaaacactgaggcagccttggggaaccccgagctggggggttggcagcccactgcaccgcctcagggttttggggtcctgggctggggccaccatccctgatggcagaactcccacaaccacatgtatttattcctctgtcctaaaccgtcccctccttccctcacccccagcacagggggattctgagcagtgcctcttgtctgagggacatatcagtgacctcgacgttgcctttagactacagttgtgttagcctcttgcgtattggctttttcagagtcatttatgagcagaaaaaaaaaaagtaaaactttgctaatattaaaaaaaaaaaaaaaaaaaaaaaaaaaagggggcggcgcgcgcgcccataaaggattctcccctcgggggcgcccaagtctttccgcgcgttccccggttttctttgttccaaggggggcccctatatatagggggggccggatttttattagcgcgcttagggcccgtgcgccggccggttttacacaacacggttcgggcgactggggagaaccacctctcgcttaccttggggaactctttcggggagagggagaccctttttcttctccggggggcggggcgaccatttcttttgggcgcccacaattataccctttaaacagagagagtttatataaaggcctctatagaggggtgacaattttataaacaattttctttaaaacgggtgttaataccgggtgtgttttaacacctattaggcggcaattttgccctggacgggctttgagagaagtttcgggcctaaccgggagaatagtgaactttctgtggaacatttttttttttccccgggggaccctggttgttaaaataac

SEQ ID NO: 456755 - DNA, 2275 bp, Homo sapiens
  misc_feature (1964)..(1964): n is a, c, g, or t
  misc_feature (1966)..(1966): n is a, c, g, or t
  misc_feature (1968)..(1968): n is a, c, g, or t
  misc_feature (1977)..(1977): n is a, c, g, or t
agcggagtgacgcgggcccgggcgcgacggtctcggcggcggcggcggcggcgacagagcgagcgcggcgcggggccaccatgggggcccagctcagcacgttgggccatatggtgctcttcccagtctggttcctgtacagtctgctcatgaagctgttccagcgctccacgccagccatcaccctcgagagcccggacatcaagtacccgctgcggctcatcgaccgggagatcatcagccatgacacccggcgcttccgctttgccctgccgtcaccccagcacatcctgggcctccctgtcggccagcacatctacctctcggctcgaattgatggaaacctggtcgtccggccctatacacccatctccagcgatgatgacaagggcttcgtggacctggtcatcaaggtttacttcaaggacacccatcccaagtttcccgctggagggaagatgtctcagtacctggagagcatgcagattggagacaccattgagttccggggccccagtgggctgctggtctaccagggcaaagggaagttcgccatccgacctgacaaaaagtccaaccctatcatcaggacagtgaagtctgtgggcatgatcgcgggagggacaggcatcaccccgatgctgcaggtgatccgcgccatcatgaaggaccctgatgaccacactgtgtgccacctgctctttgccaaccagaccgagaaggacatcctgctgcgacctgagctggaggaactcaggaacaaacattctgcacgcttcaagctctggtacacgctggacagagcccctgaagcctgggactacggccagggcttcgtgaatgaggagatgatccgggaccaccttccacccccagaggaggagccgctggtgctgatgtgtggccccccacccatgatccagtacgcctgccttcccaacctggaccacgtgggccaccccacggagcgctgcttcgtcttctgagggccgggcacggtcacacggccacccgccccgcgcaccccacgccctgttcacgctcacccagtcacctccccacatcgcacactggggccccgggttcagcctggcctgcccgtgccctggtgaatcacctggctgagcagttcccctggagccccttcgggagcagggctgtgtcccagatgggccacggctgagccttcagagtacgtcctgcctggcacttactggtccttaccagagacgcccagccccatccctgtcctcatgacccctcgtccaccccccacacacactataaggctgagggctgccagcagccccgtctgcccaccattcccggccgtggaccatagtcgggatgtcagcagacacacatgggcagcccaaagctgcaggtgccagggcccaccccagcctcgcctgtcacccccactcccgcctcagggccaggcccaggcctcaccacctgacgctgcatgagacattgacaccagaaagccctcttgggggcactgctccctaccccagggccctggccagccgggagcttggctctcctctggctagagtgggaagagggggctggccatggggccctcccagaacctcagcatttccttccagcccatccaaacactgaggcagccttggggaaccccgagctggggggttggcagcccactgcaccgcctcagggttttggggtcctgggctggggccaccatccctgatggcagaactcccacaaccacatgtatttattcctctgtcctaaaccgtcccctccttccctcacccccagcacagggggattctgagcagtgcctcttgtctgagggacatatcagtgacctcgacgttgcctttagactacagttgtgttagcctcttgcgtattggctttttcagagtcatttatgagcagaaaaaaaaaaagtaaaactttgctaatattaacacacacaaaacaaaaanananacaaacaancacaacacgcacacacaacaaaaaaaaccaccaacacacaaacgagggggggggggggcccgaaaagaatcccccggggggggccccaggtatgggggcacacccaggtttgtgcggcaaacgagggggccccaaaggggagcgcgtataaagacggggagagaggagggcgcccgcggtgacaacagcggcggcagcgcggcgcaacaacggcgccccacgagggcaccacggaggagcggagcgacacacacccggcgggggggcgccacacacgcgcgcggccagaacccacgag

SEQ ID NO: 456756 - DNA, 2217 bp, Homo sapiens
aggggttggccctggagtctgccagccacactgggaaaacattggagcttggtctgccatcctgaactgtggttcccctgcctcccagcccggctgtgagtgctcagcgaccctgacaggctgacaggtacagtctgccgggctttcctactgtccctggcagccccatgcttactctgcggcccagatcccagctctgtgtccacctgttccttctcctgggttcccttcccccacagttcccagccaagccagagccccccactgcagaacttcctccactccctcccacttcctcccggttagaacaggaccaggagggaggtgccgctcagattctggcaggaccgctggcgggcaggcaggggacagttgggccatatggtgctcttcccagtctggttcctgtacagtctgctcatgaagctgttccagcgctccacgccagccatcaccctcgagagcccggacatcaagtacccgctgcggctcatcgaccgggagatcatcagccatgacacccggcgcttccgctttgccctgccgtcaccccagcacatcctgggcctccctgtcggccagcacatctacctctcggctcgaattgatggaaacctggtcgtccggccctatacacccatctccagcgatgatgacaagggcttcgtggacctggtcatcaaggtttacttcaaggacacccatcccaagtttcccgctggagggaagatgtctcagtacctggagagcatgcagattggagacaccattgagttccggggccccagtgggctgctggtctaccagggcaaagggaagttcgccatccgacctgacaaaaagtccaaccctatcatcaggacagtgaagtctgtgggcatgatcgcgggagggacaggcatcaccccgatgctgcaggtgatccgcgccatcatgaaggaccctgatgaccacactgtgtgccacctgctctttgccaaccagaccgagaaggacatcctgctgcgacctgagctggaggaactcaggaacaaacattctgcacgcttcaagctctggtacacgctggacagagcccctgaagcctgggactacggccagggcttcgtgaatgaggagatgatccgggaccaccttccacccccagaggaggagccgctggtgctgatgtgtggccccccacccatgatccagtacgcctgccttcccaacctggaccacgtgggccaccccacggagcgctgcttcgtcttctgagggccgggcacggtcacacggccacccgccccgcgcaccccacgccctgttcacgctcacccagtcacctccccacatcgcacactggggccccgggttcagcctggcctgcccgtgccctggtgaatcacctggctgagcagttcccctggagccccttcgggagcagggctgtgtcccagatgggccacggctgagccttcagagtacgtcctgcctggcacttactggtccttaccagagacgcccagccccatccctgtcctcatgacccctcgtccaccccccacacacactataaggctgagggctgccagcagccccgtctgcccaccattcccggccgtggaccatagtcgggatgtcagcagacacacatgggcagcccaaagctgcaggtgccagggcccaccccagcctcgcctgtcacccccactcccgcctcagggccaggcccaggcctcaccacctgacgctgcatgagacattgacaccagaaagccctcttgggggcactgctccctaccccagggccctggccagccgggagcttggctctcctctggctagagtgggaagagggggctggccatggggccctcccagaacctcagcatttccttccagcccatccaaacactgaggcagccttggggaaccccgagctggggggttggcagcccactgcaccgcctcagggttttggggtcctgggctggggccaccatccctgatggcagaactcccacaaccacatgtatttattcctctgtcctaaaccgtcccctccttccctcacccccagcacagggggattctgagcagtgcctcttgtctgagggacatatcagtgacctcgacgttgcctttagactacagttgtgttagcctcttgcgtattggctttttcagagtcatttatgagcagaaaaaaaaaaagtaaaactttgctaatattaa

SEQ ID NO: 456757 - DNA, 1612 bp, Homo sapiens
agcggagtgacgcgggcccgggcgcgacggtctcggcggcggcggcggcggcgacagagcgagcgcggcgcggggccaccatgggggcccagctcagcacgttgggccatatggtgctcttcccagtctggttcctgtacagtctgctcatgaagctgttccagcgctccacgccagccatcaccctcgagagcccggacatcaagtacccgctgcggctcatcgaccgggagatcatcagccatgacacccggcgcttccgctttgccctgccgtcaccccagcacatcctgggcctccctgtcggccagcacatctacctctcggctcgaattgatggaaacctggtcgtccggccctatacacccatctccagcgatgatgacaagggcttcgtggacctggtcatcaaggtttacttcaaggacacccatcccaagtttcccgctggagggaagatgtctcagtacctggagagcatgcagattggagacaccattgagttccggggccccagtgggctgctggtctaccagggcaaagggaagttcgccatccgacctgacaaaaagtccaaccctatcatcaggacagtgaagtctgtgggcatgatcgcgggagggacaggcatcaccccgatgctgcaggtgatccgcgccatcatgaaggaccctgatgaccacactgtgtgccacctgctctttgccaaccagaccgagaaggacatcctgctgcgacctgagctggaggaactcaggaacaaacattctgcacgcttcaagctctggtacacgctggacagagcccctgaagcctgggactacggccagggcttcgtgaatgaggagatgatccgggaccaccttccacccccagaggaggagccgctggtgctgatgtgtggccccccacccatgatccagtacgcctgccttcccaacctggaccacgtgggccaccccacggagcgctgcttcgtcttctgagggccgggcacggtcacacggccacccgccccgcgcaccccacgccctgttcacgctcacccagtcacctccccacatcgcacactggggccccgggttcagcctggcctgcccgtgccctggtgaatcacctggctgagcagttcccctggagccccttcgggagcagggctgtgtcccagatgggccacggctgagccttcagagtacgtcctgcctggcacttactggtccttaccagagacgcccagccccatccctgtcctcatgacccctcgtccaccccccacacacactataaggctgagggctgccagcagccccgtctgcccaccattcccggccgtggaccatagtcgggatgtcagcagacacacatgggcagcccaaagctgcaggtgccagggcccaccccagcctcgcctgtcacccccactcccgcctcagggccaggcccaggcctcaccacctgacgctgcatgagacattgacaccagaaagctgagggacatatcagtgacctcgacgttgcctttagactacagttgtgttagcctcttgcgtattggctttttcagagtcatttatgagcagaaaaaaaaaaagtaaaactttgctaatattaa

SEQ ID NO: 456758 - DNA, 1369 bp, Homo sapiens
agcggagtgacgcgggcccgggcgcgacggtctcggcggcggcggcggcggcgacagagcgagcgcggcgcggggccaccatgggggcccagctcagcacgttgggccatatggtgctcttcccagtctggttcctgtacagtctgctcatgaagctgttccagcgctccacgccagccatcaccctcgagagcccggacatcaagtacccgctgcggctcatcgaccgggagatcatcagccatgacacccggcgcttccgctttgccctgccgtcaccccagcacatcctgggcctccctgtcggccagcacatctacctctcggctcgaattgatggaaacctggtcgtccggccctatacacccatctccagcgatgatgacaagggcttcgtggacctggtcatcaaggtttacttcaaggacacccatcccaagtttcccgctggagggaagatgtctcagtacctggagagcatgcagattggagacaccattgagttccggggccccagtgggctgctggtctaccagggcaaagggaagttcgccatccgacctgacaaaaagtccaaccctatcatcaggacagtgaagtctgtgggcatgatcgcgggagggacaggcatcaccccgatgctgcaggtgatccgcgccatcatgaaggaccctgatgaccacactgtgtgccacctgctctttgccaaccagaccgagaaggacatcctgctgcgacctgagctggaggaactcaggaacaaacattctgcacgcttcaagctctggtacacgctggacagagcccctgaagcctgggactacggccagggcttcgtgaatgaggagatgatccgggaccaccttccacccccagaggaggagccgctggtgctgatgtgtggccccccacccatgatccagtacgcctgccttcccaacctggaccacgtgggccaccccacggagcgctgcttcgtcttctgagggccgggcacggtcacacggccacccgccccgcgcaccccacgccctgttcacgctcacccagtcacctccccacatcgcacactggggccccgggttcagcctggcctgcccgtgccctggtgaatcacctggctgagcagttcccctggagccccttcgggagcagggctgtgtcccagatgggccacggctgagccttcagagtacgtcctgcctggcacttactggtccttaccagagacgcccagccccatcctgagggacatatcagtgacctcgacgttgcctttagactacagttgtgttagcctcttgcgtattggctttttcagagtcatttatgagcagaaaaaaaaaaagtaaaactttgctaatattaa

SEQ ID NO: 456759 - DNA, 2065 bp, Homo sapiens
agcggagtgacgcgggcccgggcgcgacggtctcggcggcggcggcggcggcgacagagcgagcgcggcgcggggccaccatgggggcccagctcagcacgttgggccatatggtgctcttcccagtctggttcctgtacagtctgctcatgaagctgttccagcgctccacgccagccatcaccctcgagagcccggacatcaagtacccgctgcggctcatcgaccgggagatggagaaagcaaggtgatgtctcttgctaaggccaccaggaagtagcagaggaatttaaacctggtctctctgtccacagagccccttctctgaaccacactcactgcctcatgcaagatcatcagccatgacacccggcgcttccgctttgccctgccgtcaccccagcacatcctgggcctccctgtcggccagcacatctacctctcggctcgaattgatggaaacctggtcgtccggccctatacacccatctccagcgatgatgacaagggcttcgtggacctggtcatcaaggtttacttcaaggacacccatcccaagtttcccgctggagggaagatgtctcagtacctggagagcatgcagattggagacaccattgagttccggggccccagtgggctgctggtctaccagggcaaagggaagttcgccatccgacctgacaaaaagtccaaccctatcatcaggacagtgaagtctgtgggcatgatcgcgggagggacaggcatcaccccgatgctgcaggtgatccgcgccatcatgaaggaccctgatgaccacactgtgtgccacctgctctttgccaaccagaccgagaaggacatcctgctgcgacctgagctggaggaactcaggaacaaacattctgcacgcttcaagctctggtacacgctggacagagcccctgaagcctgggactacggccagggcttcgtgaatgaggagatgatccgggaccaccttccacccccagaggaggagccgctggtgctgatgtgtggccccccacccatgatccagtacgcctgccttcccaacctggaccacgtgggccaccccacggagcgctgcttcgtcttctgagggccgggcacggtcacacggccacccgccccgcgcaccccacgccctgttcacgctcacccagtcacctccccacatcgcacactggggccccgggttcagcctggcctgcccgtgccctggtgaatcacctggctgagcagttcccctggagccccttcgggagcagggctgtgtcccagatgggccacggctgagccttcagagtacgtcctgcctggcacttactggtccttaccagagacgcccagccccatccctgtcctcatgacccctcgtccaccccccacacacactataaggctgagggctgccagcagccccgtctgcccaccattcccggccgtggaccatagtcgggatgtcagcagacacacatgggcagcccaaagctgcaggtgccagggcccaccccagcctcgcctgtcacccccactcccgcctcagggccaggcccaggcctcaccacctgacgctgcatgagacattgacaccagaaagccctcttgggggcactgctccctaccccagggccctggccagccgggagcttggctctcctctggctagagtgggaagagggggctggccatggggccctcccagaacctcagcatttccttccagcccatccaaacactgaggcagccttggggaaccccgagctggggggttggcagcccactgcaccgcctcagggttttggggtcctgggctggggccaccatccctgatggcagaactcccacaaccacatgtatttattcctctgtcctaaaccgtcccctccttccctcacccccagcacagggggattctgagcagtgcctcttgtctgagggacatatcagtgacctcgacgttgcctttagactacagttgtgttagcctcttgcgtattggctttttcagagtcatttatgagcagaaaaaaaaaaagtaaaactttgctaatattaa

SEQ ID NO: 456760 - DNA, 1725 bp, Homo sapiens
cttcggatgctggttaaagaaccacgaaatgagttgaaccctgcttccagccacaggagccttgtgtggtctcagtgtgtctctgacactgtttggcctgatggtaaagaggtctcagagctcgatgccaggcaagtggcacccatgcacagggagttgagctgctccaaggaaatgctcactgaagtggctggcagtcactcctggagctttggctcagggttgccaggaagaagtctgctgagggcccgatacattcaagagagtttgcaaccagattcgtagatgaggtagtctgaggcagaatttagctgcaggagagcagaaagaatctcgcctttggggagacataaacattttgggcctgttgcatttttagggcgcagacatcttgtccgggggacaggcatcaccccgatgctgcaggtgatccgcgccatcatgaaggaccctgatgaccacactgtgtgccacctgctctttgccaaccagaccgagaaggacatcctgctgcgacctgagctggaggaactcaggaacaaacattctgcacgcttcaagctctggtacacgctggacagagcccctgaagcctgggactacggccagggcttcgtgaatgaggagatgatccgggaccaccttccacccccagaggaggagccgctggtgctgatgtgtggccccccacccatgatccagtacgcctgccttcccaacctggaccacgtgggccaccccacggagcgctgcttcgtcttctgagggccgggcacggtcacacggccacccgccccgcgcaccccacgccctgttcacgctcacccagtcacctccccacatcgcacactggggccccgggttcagcctggcctgcccgtgccctggtgaatcacctggctgagcagttcccctggagccccttcgggagcagggctgtgtcccagatgggccacggctgagccttcagagtacgtcctgcctggcacttactggtccttaccagagacgcccagccccatccctgtcctcatgacccctcgtccaccccccacacacactataaggctgagggctgccagcagccccgtctgcccaccattcccggccgtggaccatagtcgggatgtcagcagacacacatgggcagcccaaagctgcaggtgccagggcccaccccagcctcgcctgtcacccccactcccgcctcagggccaggcccaggcctcaccacctgacgctgcatgagacattgacaccagaaagccctcttgggggcactgctccctaccccagggccctggccagccgggagcttggctctcctctggctagagtgggaagagggggctggccatggggccctcccagaacctcagcatttccttccagcccatccaaacactgaggcagccttggggaaccccgagctggggggttggcagcccactgcaccgcctcagggttttggggtcctgggctggggccaccatccctgatggcagaactcccacaaccacatgtatttattcctctgtcctaaaccgtcccctccttccctcacccccagcacagggggattctgagcagtgcctcttgtctgagggacatatcagtgacctcgacgttgcctttagactacagttgtgttagcctcttgcgtattggctttttcagagtcatttatgagcagaaaaaaaaaaagtaaaactttgctaatattaa

SEQ ID NO: 456761 - DNA, 1034 bp, Homo sapiens
tccgccgcctcgaggcagacccggatccagagggcgcctggacaagttgggccatatggtgctcttcccagtctggttcctgtacagtctgctcatgaagctgttccagcgctccacgccagccatcaccctcgccagtcacctccccacatcgcacactggggccccgggttcagcctggcctgcccgtgccctggtgaatcacctggctgagcagttcccctggagccccttcgggagcagggctgtgtcccagatgggccacggctgagccttcagagtacgtcctgcctggcacttactggtccttaccagagacgcccagccccatccctgtcctcatgacccctcgtccaccccccacacacactataaggctgagggctgccagcagccccgtctgcccaccattcccggccgtggaccatagtcgggatgtcagcagacacacatgggcagcccaaagctgcaggtgccagggcccaccccagcctcgcctgtcacccccactcccgcctcagggccaggcccaggcctcaccacctgacgctgcatgagacattgacaccagaaagccctcttgggggcactgctccctaccccagggccctggccagccgggagcttggctctcctctggctagagtgggaagagggggctggccatggggccctcccagaacctcagcatttccttccagcccatccaaacactgaggcagccttggggaaccccgagctggggggttggcagcccactgcaccgcctcagggttttggggtcctgggctggggccaccatccctgatggcagaactcccacaaccacatgtatttattcctctgtcctaaaccgtcccctccttccctcacccccagcacagggggattctgagcagtgcctcttgtctgagggacatatcagtgacctcgacgttgcctttagactacagttgtgttagcctcttgcgtattggctttttcagagtcatttatgagcagaaaaaaaaaaagtaaaactttgctaatattaa

SEQ ID NO: 456762 - DNA, 574 bp, Homo sapiens
aatattagcaaagttttactttttttttttctgctcataaatgactctgaaaaagccaatacgcaagaggctaacacaactgtagtctaaaggcaacgtcgaggtcactgatatgtcctcttgggggcactgctccctaccccagggccctggccagccgggagcttggctctcctctggctagagtgggaagagggggctggccatggggccctcccagaacctcagcatttccttccagcccatccaaacactgaggcagccttggggaaccccgagctggggggttggcagcccactgcaccgcctcagggttttggggtcctgggctggggccaccatccctgatggcagaactcccacaaccacatgtatttattcctctgtcctaaaccgtcccctccttccctcacccccagcacagggggattctgagcagtgcctcttgtctgagggacatatcagtgacctcgacgttgcctttagactacagttgtgttagcctcttgcgtattggctttttcagagtcatttatgagcagaaaaaaaaaaagtaaaactttgctaatattaa

SEQ ID NO: 456763 - DNA, 778 bp, Homo sapiens
agcggagtgacgcgggcccgggcgcgacggtctcggcggcggcggcggcggcgacagagcgagcgcggcgcggggccaccatgggggcccagctcagcacgttgggccatatggtgctcttcccagtctggttcctgtacagtctgctcatgaagctgttccagcgctccacgccagccatcaccctcgagagcccggacatcaagtacccgctgcggctcatcgaccgggagatcatcagccatgacacccggcgcttccgctttgccctgccgtcaccccagcacatcctgggcctccctgtcggccagcacatctacctctcggctcgaattgatggaaacctggtcgtccggccctatacacccatctccagcgatgatgacaagggcttcgtggacctggtcatcaaggtttacttcaaggacacccatcccaagtttcccgctggagggaagatgtctcagtacctggagagcatgcagattggagacaccattgagttccggggccccagtgggctgctggtctaccagggcaaagcatccctgatggcagaactcccacaaccacatgtatttattcctctgtcctaaaccgtcccctccttccctcacccccagcacagggggattctgagcagtgcctcttgtctgagggacatatcagtgacctcgacgttgcctttagactacagttgtgttagcctcttgcgtattggctttttcagagtcatttatgagcagaaaaaaaaaaagtaaaactttgctaatattaa

SEQ ID NO: 456764 - DNA, 928 bp, Homo sapiens
atcctcggaatagtacttgccccagggagtttccagaagggaccaggggctgtgaaaagtctaccaagggcctggttagctagggaagggctcatcagggaagatttgatgtttgagctaggctctgaggaatgaataggagtttgctggttggatgcatgcagagcaaggacatttggggcagagaggagagcatatgcgaacgcctgaagcaagatgggcttgatgttgaaagagcagagagctgggagttgggccatatggtgctcttcccagtctggttcctgtacagtctgctcatgaagctgttccagcgctccacgccagccatcaccctcgagagcccggacatcaagtacccgctgcggctcatcgaccgggagatcatcagccatgacacccggcgcttccgctttgccctgccgtcaccccagcacatcctgggcctccctgtcggccagcacatctacctctcggctcgaattgatggaaacctggtcgtccggccctatacacccatctccagcgatgatgacaagggcttcgtggacctggtcatcaaggtttacttcaaggacacccatcccaagtttcccgctggagggaagatgtctcagtacctggagagcatgcagattggagacaccattgagttccggggccccagtgggctgctggtctaccagggcaaagcatccctgatggcagaactcccacaaccacatgtatttattcctctgtcctaaaccgtcccctccttccctcacccccagcacagggggattctgagcagtgcctcttgtctgagggacatatcagtgacctcgacgttgcctttagactacagttgtgttagcctcttgcgtattggctttttcagagtcatttatgagcagaaaaaaaaaaagtaaaactttgctaatattaa

SEQ ID NO: 456765 - DNA, 887 bp, Homo sapiens
gatacgactcgagctctgtaccctagtatgaggagcgttatggagtggaagtgaaatacatggcagcccactgcaccgcctcagggttttggggtcctgggctggggccaccatccctgatggcagaactcccacaaccacatgtatttattcctctgtcctaaaccgtcccctccttccctcacccccagcacagggggattctgagcagtgcctcttgtctgagggacatatcagtgacctcgacgttgcctttagactacagttgtgttagcctcttgcgtattggctttttcagagtcatttatgagcagaaaaaaaaaaagtaaaactttgctaatattaaaaaaaaaaaaaaaaaaaaaaaaaaaagggggcggcgcgcgcgcccataaaggattctcccctcgggggcgcccaagtctttccgcgcgttccccggttttctttgttccaaggggggcccctatatatagggggggccggatttttattagcgcgcttagggcccgtgcgccggccggttttacacaacacggttcgggcgactggggagaaccacctctcgcttaccttggggaactctttcggggagagggagaccctttttcttctccggggggcggggcgaccatttcttttgggcgcccacaattataccctttaaacagagagagtttatataaaggcctctatagaggggtgacaattttataaacaattttctttaaaacgggtgttaataccgggtgtgttttaacacctattaggcggcaattttgccctggacgggctttgagagaagtttcgggcctaaccgggagaatagtgaactttctgtggaacatttttttttttccccgggggaccctggttgttaaaataac

SEQ ID NO: 456766 - DNA, 831 bp, Homo sapiens
agcggagtgacgcgggcccgggcgcgacggtctcggcggcggcggcggcggcgacagagcgagcgcggcgcggggccaccatgggggcccagctcagcacgttgggccatatggtgctcttcccagtctggttcctgtacagtctgctcatgaagctgttccagcgctccacgccagccatcaccctcgagagcccggacatcaagtacccgctgcggctcatcgaccgggagatcatcagccatgacacccggcgcttccgctttgccctgccgtcaccccagcacatcctgggcctccctgtcggccagcacatctacctctcggctcgaattgatggaaacctggtcgtccggccctatacacccatctccagcgatgatgacaagggcttcgtggacctggtcatcaaggtttacttcaaggacacccatcccaagtttcccgctggagggaagatgtctcagtacctggagagcatgcagattggagacaccattgagttccggggccccagtgggctgctggtctaccagggcaaagtgattcgggtcggaatcccttggttacacggcaggctcagagaattggagagcttgggcgtgctgggtgcagggtgcaggcccctggctctgtgtggatgggtgactctcgtcaggccagctgtccctctctgggaactgagtctccctggctgtagagggggtaagttgctggcacaggggttgcagacaggccactcctgggggccacgtctcacccactgccagcctctatttggctttctcagcatctgaaacaagcaagcaagaggacagagctgagcctccg

SEQ ID NO: 456767 - DNA, 431 bp, Homo sapiens
tggctagagtgggaagagggggctggccatggggccctcccagaacctcagcatttcctttcagctgtcctcatgacccctcgtccaccccccacacacactataaggctgagggctgccagcagccccgtctgcccaccattcccggccgtggaccatagtcgggatgtcagcagacacacatgggcagcccaaagctgcaggtgccagggcccaccccagcctcgcctgtcacccccactcccgcctcagggccaggcccaggcctcaccacctgacgctgcatgagacattgacaccagaaagctgagggacatatcagtgacctcgacgttgcctttagactacagttgtgttagcctcttgcgtattggctttttcagagtcatttatgagcagaaaaaaaaaaagtaaaactttgctaatattaa

SEQ ID NO: 456768 - DNA, 1841 bp, Homo sapiens
agcggagtgacgcgggcccgggcgcgacggtctcggcggcggcggcggcggcgacagagcgagcgcggcgcggggccaccatgggggcccagctcagcacgttgggccatatggtgctcttcccagtctggttcctgtacagtctgctcatgaagctgttccagcgctccacgccagccatcaccctcgagagcccggacatcaagtacccgctgcggctcatcgaccgggagatcatcagccatgacacccggcgcttccgctttgccctgccgtcaccccagcacatcctgggcctccctgtcggccagcacatctacctctcggctcgaattgatggaaacctggtcgtccggccctatacacccatctccagcgatgatgacaagggcttcgtggacctggtcatcaaggtttacttcaaggacacccatcccaagtttcccgctggagggaagatgtctcagtacctggagagcatgcagattggagacaccattgagttccggggccccagtgggctgctggtctaccagggcaaagggaagttcgccatccgacctgacaaaaagtccaaccctatcatcaggacagtgaagtctgtgggcatgatcgcgggagggacaggcatcaccccgatgctgcaggtgatccgcgccatcatgaaggaccctgatgaccacactgtgtgccacctgctctttgccaaccagaccgagaaggacatcctgctgcgacctgagctggaggaactcaggaacaaacattctgcacgcttcaagctctggtacacgctggacagagcccctgaagcctgggactacggccagggcttcgtgaatgaggagatgatccgggaccaccttccacccccagaggaggagccgctggtgctgatgtgtggccccccacccatgatccagtacgcctgccttcccaacctggaccacgtgggccaccccacggagcgctgcttcgtcttctgagggccgggcacggtcacacggccacccgccccgcgcaccccacgccctgttcacgctcacccagtcacctccccacatcgcacactggggccccgggttcagcctggcctgcccgtgccctggtgaatcacctggctgagcagttcccctggagccccttcgggagcagggctgtgtcccagatgggccacggctgagccttcagagtacgtcctgcctggcacttactggtccttaccagagacgcccagccccatccctgtcctcatgacccctcgtccaccccccacacacactataaggctgagggctgccagcagccccgtctgcccaccattcccggccgtggaccatagtcgggatgtcagcagacacacatgggcagcccaaagctgcaggtgccagggcccaccccagcctcgcctgtcacccccactcccgcctcagggccaggcccaggcctcaccacctgacgctgcatgagacattgacaccagaaagccctcttgggggcactgctccctaccccagggccctggccagccgggagcttggctctcctctggctagagtgggaagagggggctggccatggggccctcgtcctgggctggggccaccatccctgatggcagaactcccacaaccacatgtatttattcctctgtcctaaaccgtcccctccttccctcacccccagcacagggggattctgagcagtgcctcttgtctgagggacatatcagtgacctcgacgttgcctttagactacagttgtgttagcctcttgcgtattggctttttcagagtcatttatgagcagaaaaaaaaaaagtaaaactttgctaatattaa

SEQ ID NO: 456769 - DNA, 1707 bp, Homo sapiens
agcggagtgacgcgggcccgggcgcgacggtctcggcggcggcggcggcggcgacagagcgagcgcggcgcggggccaccatgggggcccagctcagcacgttgggccatatggtgctcttcccagtctggttcctgtacagtctgctcatgaagctgttccagcgctccacgccagccatcaccctcgagagcccggacatcaagtacccgctgcggctcatcgaccgggagatcatcagccatgacacccggcgcttccgctttgccctgccgtcaccccagcacatcctgggcctccctgtcggccagcacatctacctctcggctcgaattgatggaaacctggtcgtccggccctatacacccatctccagcgatgatgacaagggcttcgtggacctggtcatcaaggtttacttcaaggacacccatcccaagtttcccgctggagggaagatgtctcagtacctggagagcatgcagattggagacaccattgagttccggggccccagtgggctgctggtctaccagggcaaagggaagttcgccatccgacctgacaaaaagtccaaccctatcatcaggacagtgaagtctgtgggcatgatcgcgggagggacaggcatcaccccgatgctgcaggtgatccgcgccatcatgaaggaccctgatgaccacactgtgtgccacctgctctttgccaaccagaccgagaaggacatcctgctgcgacctgagctggaggaactcaggaacaaacattctgcacgcttcaagctctggtacacgctggacagagcccctgaagcctgggactacggccagggcttcgtgaatgaggagatgatccgggaccaccttccacccccagaggaggagccgctggtgctgatgtgtggccccccacccatgatccagtacgcctgccttcccaacctggaccacgtgggccaccccacggagcgctgcttcgtcttctgagggccgggcacggtcacacggccacccgccccgcgcaccccacgccctgttcacgctcacccagtcacctccccacatcgcacactggggccccgggttcagcctggcctgcccgtgccctggtgaatcacctggctgagcagttcccctggagccccttcgggagcagggctgtgtcccagatgggccacggctgagccttcagagtacgtcctgcctggcacttactggtccttaccagagacgcccagccccatccctgtcctcatgacccctcgtccaccccccacacacactataaggctgagggctgccagcagccccgtctgcccaccattcccggccgtggaccatagtcgggatccagaacctcagcatttccttccagcccatccaaacactgaggcagccttggggaaccccgagctggggggttggcagcccactgcaccgcctcagggttttggggtcctgggctggggccaccatccctgatggcagaactcccacaaccacatgtatttattcctctgtcctaaaccgtcccctccttccctcacccccagcacagggggattctgagcagtgcctcttgtctgagggacatatcagtgacctcgacgttgcctttagactacagttgtgttagcctcttgcgtattggctttttcagagtcatttatgagcagaaaaaaaaaaagtaaaactttgctaatattaa

SEQ ID NO: 456770 - DNA, 1959 bp, Homo sapiens
agcggagtgacgcgggcccgggcgcgacggtctcggcggcggcggcggcggcgacagagcgagcgcggcgcggggccaccatgggggcccagctcagcacgttgggccatatggtgctcttcccagtctggttcctgtacagtctgctcatgaagctgttccagcgctccacgccagccatcaccctcgagagcccggacatcaagtacccgctgcggctcatcgaccgggagatcatcagccatgacacccggcgcttccgctttgccctgccgtcaccccagcacatcctgggcctccctgtcggccagcacatctacctctcggctcgaattgatggaaacctggtcgtccggccctatacacccatctccagcgatgatgacaagggcttcgtggacctggtcatcaaggtttacttcaaggacacccatcccaagtttcccgctggagggaagatgtctcagtacctggagagcatgcagattggagacaccattgagttccggggccccagtgggctgctggtctaccagggcaaagggaagttcgccatccgacctgacaaaaagtccaaccctatcatcaggacagtgaagtctgtgggcatgatcgcgggagggacaggcatcaccccgatgctgcaggtgatccgcgccatcatgaaggaccctgatgaccacactgtgtgccacctgctctttgccaaccagaccgagaaggacatcctgctgcgacctgagctggaggaactcaggaacaaacattctgcacgcttcaagctctggtacacgctggacagagcccctgaagcctgggactacggccagggcttcgtgaatgaggagatgatccgggaccaccttccacccccagaggaggagccgctggtgctgatgtgtggccccccacccatgatccagtacgcctgccttcccaacctggaccacgtgggccaccccacggagcgctgcttcgtcttctgagggccgggcacggtcacacggccacccgccccgcgcaccccacgccctgttcacgctcacccagtcacctccccacatcgcacactggggccccgggttcagcctggcctgcccgtgccctggtgaatcacctggctgagcagttcccctggagccccttcgggagcagggctgtgtcccagatgggccacggctgagccttcagagtacgtcctgcctggcacttactggtccttaccagagacgcccagccccatccctgtcctcatgacccctcgtccaccccccacacacactataaggctgagtgagggacatatcagtgacctcgacgttgcctttagactacagttgtgttagcctcttgcgtattggctttttcagagtcatttatgagcagaaaaaaaaaaagtaaaactttgctaatattaaaaaaaaaaaaaaaaaaaaaaaaaaaagggggcggcgcgcgcgcccataaaggattctcccctcgggggcgcccaagtctttccgcgcgttccccggttttctttgttccaaggggggcccctatatatagggggggccggatttttattagcgcgcttagggcccgtgcgccggccggttttacacaacacggttcgggcgactggggagaaccacctctcgcttaccttggggaactctttcggggagagggagaccctttttcttctccggggggcggggcgaccatttcttttgggcgcccacaattataccctttaaacagagagagtttatataaaggcctctatagaggggtgacaattttataaacaattttctttaaaacgggtgttaataccgggtgtgttttaacacctattaggcggcaattttgccctggacgggctttgagagaagtttcgggcctaaccgggagaatagtgaactttctgtggaacatttttttttttccccgggggaccctggttgttaaaataac

SEQ ID NO: 456771 - DNA, 2001 bp, Homo sapiens
gcgacagagcgatgcgcggcgtgtggccaccatgggggcccagctcagcacgttgggccatatggtgctcgttcgccagatcgtaggttccgtggtagcatgtctggcttcagtcgaagtgcgtcgttccatgctgcgtccaacgagctagcctattcagcccttcggacgaggcctcggacgattcagagtacctcgcatgctggcttcatcggaacccggggaacgaatttgattcacggtcctatttgaagcagcgccggggctggctttttccccgggctttatgtggcccgcctttgcccggtttcaaagccccccctgaggggcaaccatttccttgggggccctcccctgtcgggccagcacatctacctctcggctcgaattgatggaaacctggtcgtccggccctatacacccatctccagcgatgatgacaagggcttcgtggacctggtcatcaaggtttacttcaaggacacccatcccaagtttcccgctggagggaagatgtctcagtacctggagagcatgcagattggagacaccattgagttccggggccccagtgggctgctggtctaccagggcaaagggaagttcgccatccgacctgacaaaaagtccaaccctatcatcaggacagtgaagtctgtgggcatgatcgcgggagggacaggcatcaccccgatgctgcaggtgatccgcgccatcatgaaggaccctgatgaccacactgtgtgccacctgctctttgccaaccagaccgagaaggacatcctgctgcgacctgagctggaggaactcaggaacaaacattctgcacgcttcaagctctggtacacgctggacagagcccctgaagcctgggactacggccagggcttcgtgaatgaggagatgatccgggaccaccttccacccccagaggaggagccgctggtgctgatgtgtggccccccacccatgatccagtacgcctgccttcccaacctggaccacgtgggccaccccacggagcgctgcttcgtcttctgagggccgggcacggtcacacggccacccgccccgcgcaccccacgccctgttcacgctcacccagtcacctccccacatcgcacactggggccccgggttcagcctggcctgcccgtgccctggtgaatcacctggctgagcagttcccctggagccccttcgggagcagggctgtgtcccagatgggccacggctgagccttcagagtacgtcctgcctggcacttactggtccttaccagagacgcccagccccatccctgtcctcatgacccctcgtccaccccccacacacactataaggctgagggctgccagcagccccgtctgcccaccattcccggccgtggaccatagtcgggatgtcagcagacacacatgggcagcccaaagctgcaggtgccagggcccaccccagcctcgcctgtcacccccactcccgcctcagggccaggcccaggcctcaccacctgacgctgcatgagacattgacaccagaaagccctcttgggggcactgctccctaccccagggccctggccagccgggagcttggctctcctctggctagagtgggaagagggggctggccatggggccctcccagaacctcagcatttccttccagcccatccaaacactgaggcagccttggggaaccccgagctggggggttggcagcccactgcaccgcctcagggttttggggtcctgggctggggccaccatccctgatggcagaactcccacaaccacatgtatttattcctctgtcctaaaccgtcccctccttccctcacccccagcacagggggattctgagcagtgcctcttgtctgagggacatatcagtgacctcgacgttgcctttagactacagttgtgttagcctcttgcgtattggctttttcagagtcatttatgagcagaaaaaaaaaaagtaaaactttgctaatattaa

SEQ ID NO: 456772 - DNA, 1646 bp, Homo sapiens
agcggagtgacgcgggcccgggcgcgacggtctcggcggcggcggcggcggcgacagagcgagcgcggcgcggggccaccatgggggcccagctcagcacgttgggccatatggtgctcttcccagtctggttcctgtacagtctgctcatgaagctgttccagcgctccacgccagccatcaccctcgagagcccggacatcaagtacccgctgcggctcatcgaccgggagatcatcagccatgacacccggcgcttccgctttgccctgccgtcaccccagcacatcctgggcctccctgtcggccagcacatctacctctcggctcgaattgatggaaacctggtcgtccggccctatacacccatctccagcgatgatgacaagggcttcgtggacctggtcatcaagaccgagaaggacatcctgctgcgacctgagctggaggaactcaggaacaaacattctgcacgcttcaagctctggtacacgctggacagagcccctgaagcctgggactacggccagggcttcgtgaatgaggagatgatccgggaccaccttccacccccagaggaggagccgctggtgctgatgtgtggccccccacccatgatccagtacgcctgccttcccaacctggaccacgtgggccaccccacggagcgctgcttcgtcttctgagggccgggcacggtcacacggccacccgccccgcgcaccccacgccctgttcacgctcacccagtcacctccccacatcgcacactggggccccgggttcagcctggcctgcccgtgccctggtgaatcacctggctgagcagttcccctggagccccttcgggagcagggctgtgtcccagatgggccacggctgagccttcagagtacgtcctgcctggcacttactggtccttaccagagacgcccagccccatccctgtcctcatgacccctcgtccaccccccacacacactataaggctgagggctgccagcagccccgtctgcccaccattcccggccgtggaccatagtcgggatgtcagcagacacacatgggcagcccaaagctgcaggtgccagggcccaccccagcctcgcctgtcacccccactcccgcctcagggccaggcccaggcctcaccacctgacgctgcatgagacattgacaccagaaagccctcttgggggcactgctccctaccccagggccctggccagccgggagcttggctctcctctggctagagtgggaagagggggctggccatggggccctcccagaacctcagcatttccttccagcccatccaaacactgaggcagccttggggaaccccgagctggggggttggcagcccactgcaccgcctcagggttttggggtcctgggctggggccaccatccctgatggcagaactcccacaaccacatgtatttattcctctgtcctaaaccgtcccctccttccctcacccccagcacagggggattctgagcagtgcctcttgtctgagggacatatcagtgacctcgacgttgcctttagactacagttgtgttagcctcttgcgtattggctttttcagagtcatttatgagcagaaaaaaaaaaagtaaaactttgctaatattaa

SEQ ID NO: 456773 - DNA, 1003 bp, Homo sapiens
tccgccgcctcgaggcagacccggatccagagggcgcctggacaagttgggccatatggtgctcttcccagtctggttcctgtacagtctgctcatgaagctgttccagcgctccacgccagccatcaccctcgcccgggttcagcctggcctgcccgtgccctggtgaatcacctggctgagcagttcccctggagccccttcgggagcagggctgtgtcccagatgggccacggctgagccttcagagtacgtcctgcctggcacttactggtccttaccagagacgcccagccccatccctgtcctcatgacccctcgtccaccccccacacacactataaggctgagggctgccagcagccccgtctgcccaccattcccggccgtggaccatagtcgggatgtcagcagacacacatgggcagcccaaagctgcaggtgccagggcccaccccagcctcgcctgtcacccccactcccgcctcagggccaggcccaggcctcaccacctgacgctgcatgagacattgacaccagaaagccctcttgggggcactgctccctaccccagggccctggccagccgggagcttggctctcctctggctagagtgggaagagggggctggccatggggccctcccagaacctcagcatttccttccagcccatccaaacactgaggcagccttggggaaccccgagctggggggttggcagcccactgcaccgcctcagggttttggggtcctgggctggggccaccatccctgatggcagaactcccacaaccacatgtatttattcctctgtcctaaaccgtcccctccttccctcacccccagcacagggggattctgagcagtgcctcttgtctgagggacatatcagtgacctcgacgttgcctttagactacagttgtgttagcctcttgcgtattggctttttcagagtcatttatgagcagaaaaaaaaaaagtaaaactttgctaatattaa

SEQ ID NO: 456774 - DNA, 458 bp, Homo sapiens
agcggagtgacgcgggcccgggcgcgacggtctcggcggcggcggcggcggcgacagagcgagcgcggcgcggggccaccatgggggcccagctcagcacgttgggccatatggtgctcttcccagtctggttcctgtacagtctgctcatgaagctgttccagcgctccacgccagccatcaccctcgagagcccggacatcaagtacccgctgcggctcatcgaccgggagatggagaaagcaaggtgatgtctcttgctaaggccaccaggaagtagcagaggaatttaaacctggtctctctgtccacagagccccttctctgaaccacactcactgcctcatgcaagatcatcagccatgacacccggcgcttccgctttgccctgccgtcaccccagcacatcctgggcctccctgtcggccagtatggttaatcctggagagtcgaccgcg

SEQ ID NO: 456775 - DNA, 388 bp, Homo sapiens
ggaccaggacctttataaggtggaaggcttgatgtcctccccagactcagctcctggtgaagctcccagccatcagccatgagggtcttgtatctcctcttctcgttcctcttcatattcctgatgcctcttccaggtgtttttggtggtataggcgatcctgttacctgccttaagagtggagccatatgtcatccagtcttttgccctagaaggtataaacaaattggcacctgtggtctccctggaacaaaatgctgcaaaaagccatgaggaggccaagaagctgctgtggctgatgcggattcagaaagggctccctcatcagagacgtgcgacatgtaaaccaaattaaactatggcgtccaaagatacgcaatctttatcc

SEQ ID NO: 456776 - DNA, 3481 bp, Homo sapiens
cgggaagcttctcagatggctcccaccctgaaagccacatgcccagccctctgggccgagcccgcccagcctggcttcccatgtgttccctgccccactcccaggtagcaacatgccgccatcctccgcacaccccaaatggcatgtgtctgccacaagctgctgttctcatctctagaggggccaggccctccctgccaccctgtgctgcaagacctgtttgtggtctctgcccccaaaggcagggacttcctccattgtttccacattcccagccctcctgcaggcttgtaggacactgtaaggacattgggtcgcagcaccacagactgactgctttggccaattaaagtacaggagcattggctggcaggttctcggcctccttccacagagctggcaccagggtctctgcagggatccagatgacgggagccaaatgagtatccctcactctgcgacctcagctgcacgttgaggacagaggctcccccacgcccatcctgggaaggggcccggagtgtgagagagaggctcccccacgcccatcctgggaaggggcccggagtgtgagagagaggctcccccacgcccatcctgggaaggggcccggagtgtgagagagaggctcccccacgcccatcctgggaaggggcccggagtgtgagagagaggctcccccacgcccatcctgggaaggggcccggagtgtgagagagaggctcccccacgcccatcctgggaaggggcccggagtgtgagagagagactcccccacgcccatcctggaaaggagcccggagtgtgagctgagtggtccgagctatacctgtggacattggtttctccattgaagagctggaggacctttacatggtgtttaaggccaagcacctggctagccagtactgggggtgcagccgcacaatggccggccgtcgggaccccagcctgccctacctggagcagtaccggattgatgccagccagttccgggaactctttgccagcctgacaccctgggcctgtggctcccacacacctctgctggcagggcgcatgttcaggctcctggacgaaaacaaggactcgctgatcaacttcaaggagttcgtgacagggatgagcgggatgtaccacggggacctgacagagaagctcaaggtgctctacaagctacaccttcccccagctctgagcccagaggaagccgagtcagccctggaggcggcccattatttcacagaggacagctcctcagaagaagcactaccacaggaagagcaagaaggaagtggaagtgaggagagaggagaggagaaggggaccagctctccggactatcggcactaccttcgaatgtgggccaaggagaaagaggctcagaaggagacgattaaggatcttcccaagatgaaccaggagcagttcattgagctgtgcaagacgctttacaacatgttcagtgaagaccccatggagcaggacctgtaccacgccatcgccaccgtggccagcctcctgctccgcatcggagaggtggggaagaagttctcagcccgcacaggcaggaagcccagggactgtgccactgaggaggacgagccaccagcacccgaactgcatcaggacgcagccagggagcttcagcccccagctgcaggagacccccaagccaaagcaggcggagacacacacctcggaacagccccacaggagagccaggtggtggtggaggggggcagcggcgagggacagggctcaccctcccagctgctgtctgacgatgaaaccaaagacgacatgtccatgtcctcctactcggtggtcagcacgggctccctgcaatgtgaagaccttgcagacgacacggtgctggtgggcggggaggcctgcagccccacagcgcgcatcggcggcaccgtcgacaccgactggtgcatctcctttgagcagatcctggcctccatcctgacggagtccgtgctggtgaacttctttgagaagagagtggacattggactcaagatcaaggaccaaaagaaagtggagagacagttcagcaccgccagtgaccatgagcagcctggagtttccggctgatgcctgcagctgtgaggcctggcccaaggtgtcatcagtggggctggcctcatctcctcctgcctttcctcccttatcagtttctctttaaaggtgtgcccctcctgctctcccaggagcagtgagttgtgagtggaaagaaggctggtgcagacccagctgccttagacagattccctgggcctgcatctcctggcgccggctgcttctgggcccaggaagaggctgtggctcccaccttccttacacctggtgggagcccgcctcgcaccagctgcacctgcctagcattagaggctctcagatctgcccttgcttgcctcatacctctgtgctccacactgcggccaggccagctgagtccctccatccgtggatgctttcctgcagctatgtggtatgggggtcattcctgcctcttgggcaccaggttggggggcatgtgcttgttgggcaccaaagtgatggaaccctcaggtgctctccgggagcctgaacctcctgactgaggaacatgggcagaacatgtttattgcacagagtgggcgctgcgcacaggcgtggctgtacacgtgctctcagctcatcatcctttccagtaactttaaaaaaacatccctcaggtcctgatatatttccttggattcatttcacttggctagaaattacactgtgctcaatgccttaataaatccctgaaagaaataaaaaccactgtgtgcaatgccttgctgtggcccccaaccactgcttaggcctcccaacttctccccaggccaagtatggggccctggctgtgttctggaagttcaagacacttagtcctccacagtgggtggaagagtgcaaggtctgccaggtcagatggagacgcagaacctgctggtgcaagctgggcaggtcctgaccaacctgcatcaggggatgccctgagctccacaggtcttcatgggcaggggttgtgggtcctggtgaaggaagtgcatcctcaggcctgggctgtagcaagctgtctgcccttgggttcaagaaccagactgtggagccaaaggtgaccgcagggggccccagggctggagccacaaggataccctcactttgcatgaggagctgaaactgaccagtgtccagtgttagcccccacatggggctgctcttgcttctactaaaagatacagcagttacccccttatccacaggggatacagtggatatctaaaaccagacccccagtggatgtctaaaaccacagataataacaaaccttatacatactgttttttcctatgcatacatacctgtgattaagtttatgaattaggcaccttaagagattgacaacaataactaataataaaatgtaacggttatactgtaa

SEQ ID NO: 456777 - DNA, 5191 bp, Homo sapiens
cgccgacggcggcgggcgcttccgcctcgcgggcctcggcccggtgcgagcggctccgcgatgtggctgagcccggaggaggtgctggtggccaatgcgctgtgggtgacggagcgggccaaccccttcttcgtgctgcagcgacgccggggccacggcaggggcggcggccttacgggtcttctcgtgggcaccctggacgtggtgctggactccagtgcccgcgtggccccttaccgcatcctgcaccagacccaggactcccaggtctactggacagtggcgtgtggttcttcccgcaaagagatcacaaaacactgggaatggctggaaaataacttgctccagacactgtccatcttcgacagtgaggaagatatcaccaccttcgtcaagggcaagatacacggaatcatcgcagaagagaacaagaacctgcagccccagggagacgaggaccccgggaagttcaaggaggctgagctgaagatgcggaagcagtttgggatgcctgagggcgagaagctggtgaattactactcctgcagctactggaagggccgcgtgccccggcagggctggctgtacctgacggtcaaccacctgtgcttctactccttcctgctggggaaggaagtgagcctcgtggtgcagtgggtggacataacgcgtctggagaagaacgccaccctgctcttccccgagagcatccgtgtggacacccgcgaccaggagctcttcttctccatgttcctcaacatcggcgagaccttcaagctcatggagcagttggccaacctggccatgcggcagctgctggacagcgagggcttcctggaggacaaggccctgcctaggcccatccggccacacaggaacatctcagccctgaagcgagacctggacgcccgagccaagaatgagtgctaccgagccacgttccggctgcccagggatgagcggctagacggccacacaagctgcaccctgtggacgccgttcaacaagctgcacatccctggccagatgttcatctccaacaactacatctgcttcgccagcaaggaggaggacgcttgccacctcatcatacccctgagggaggtgaccattgtcgaaaaagctgacagctccagcgtgctgcccagccccctgtccatcagcaccaaaagcaaaatgacattcctgtttgccaacctgaaagaccgtgatttcttggtgcagaggatctctgacttcctccagaaaacaccatccaagcagccaggcagtatcgggagcaggaaagccagtgttgtggaccctagcacagagtcttccccagctcctcaggaggggtcggagcagcccgccagcccagcctctcccctcagcagccgccagagcttctgtgcgcaggaggcgccaaccgcatcccagggcctgctgaagctcttccagaaaaactcgcccatggaggaccttggagccaagggggccaaggagaagatgaaagaggagtcatggcacatccacttcttcgagtacgggcgtggcgtgtgcatgtaccgcacagccaagacgcgggcactggtcctgaagggtatccctgagagcctccggggagagctgtggctcctcttctccggggcctggaatgagatggtgactcaccccgggtactatgctgagctggtggagaagtccaccgggaagtacagcctggccacagaggagatcgagcgagacctgcaccgctccatgcccgagcaccctgccttccagaacgagctggggattgctgccctccggcgggtgctgactgcctatgccttccgaaaccccaccatcggctactgccaggcaatgaacatcgtgacctcggtgctcctgctctatggcagtgaggaggaggccttctggctcctggtggccctgtgcgagcgcatgctgcccgactactacaacaccagggtggtgggagccctggtggaccaaggcatcttcgaagagctcacgagagacttcctgccgcagctctcggagaagatgcaggacctgggggtgatctccagcatctcgctgtcctggttcctgaccctcttcctcagcgtcatgcccttcgagagcgccgtggtcatcgtcgactgctttttctatgagggcatcaaggtgatcctgcaggtggccctggccgtcctggacgccaacatggagcagctgctgggctgcagcgacgagggcgaggccatgaccatgctgggcagatacctggataatgtggtcaacaagcagagtgtctctcctcctatcccgcacctccgtgccttgctgagcagcagcgatgacccccctgcagaggtggacatctttgagctcctgaaagtgtcctatgagaaattcagcagcctgagggccgaagacattgagcagatgcggtttaaacagaggctgaaagtgatccagtccttggaggacacggccaagaggagtgtggtccgagctatacctgtggacattggtttctccattgaagagctggaggacctttacatggtgtttaaggccaagcacctggctagccagtactgggggtgcagccgcacaatggccggccgtcgggaccccagcctgccctacctggagcagtaccggattgatgccagccagttccgggaactctttgccagcctgacaccctgggcctgtggctcccacacacctctgctggcagggcgcatgttcaggctcctggacgaaaacaaggactcgctgatcaacttcaaggagttcgtgacagggatgagcgggatgtaccacggggacctgacagagaagctcaaggtgctctacaagctacaccttcccccagctctgagcccagaggaagccgagtcagccctggaggcggcccattatttcacagaggacagctcctcagaagcatctcctctggcctcagatctggatcttttcctgccctgggaggctcaagaagcactaccacaggaagagcaagaaggaagtggaagtgaggagagaggagaggagaaggggaccagctctccggactatcggcactaccttcgaatgtgggccaaggagaaagaggctcagaaggagacgattaaggatcttcccaagatgaaccaggagcagttcattgagctgtgcaagacgctttacaacatgttcagtgaagaccccatggagcaggacctgtaccacgccatcgccaccgtggccagcctcctgctccgcatcggagaggtggggaagaagttctcagcccgcacaggcaggaagcccagggactgtgccactgaggaggacgagccaccagcacccgaactgcatcaggacgcagccagggagcttcagcccccagctgcaggagacccccaagccaaagcaggcggagacacacacctcggaacagccccacaggagagccaggtggtggtggaggggggcagcggcgagggacagggctcaccctcccagctgctgtctgacgatgaaaccaaagacgacatgtccatgtcctcctactcggtggtcagcacgggctccctgcaatgtgaagaccttgcagacgacacggtgctggtgggcggggaggcctgcagccccacagcgcgcatcggcggcaccgtcgacaccgactggtgcatctcctttgagcagatcctggcctccatcctgacggagtccgtgctggtgaacttctttgagaagagagtggacattggactcaagatcaaggaccaaaagaaagtggagagacagttcagcaccgccagtgaccatgagcagcctggagtttccggctgatgcctgcagctgtgaggcctggcccaaggtgtcatcagtggggctggcctcatctcctcctgcctttcctcccttatcagtttctctttaaaggtgtgcccctcctgctctcccaggagcagtgagttgtgagtggaaagaaggctggtgcagacccagctgccttagacagattccctgggcctgcatctcctggcgccggctgcttctgggcccaggaagaggctgtggctcccaccttccttacacctggtgggagcccgcctcgcaccagctgcacctgcctagcattagaggctctcagatctgcccttgcttgcctcatacctctgtgctccacactgcggccaggccagctgagtccctccatccgtggatgctttcctgcagctatgtggtatgggggtcattcctgcctcttgggcaccaggttggggggcatgtgcttgttgggcaccaaagtgatggaaccctcaggtgctctccgggagcctgaacctcctgactgaggaacatgggcagaacatgtttattgcacagagtgggcgctgcgcacaggcgtggctgtacacgtgctctcagctcatcatcctttccagtaactttaaaaaaacatccctcaggtcctgatatatttccttggattcatttcacttggctagaaattacactgtgctcaatgccttaataaatccctgaaagaaataaaaaccactgtgtgcaatgccttgctgtggcccccaaccactgcttaggcctcccaacttctccccaggccaagtatggggccctggctgtgttctggaagttcaagacacttagtcctccacagtgggtggaagagtgcaaggtctgccaggtcagatggagacgcagaacctgctggtgcaagctgggcaggtcctgaccaacctgcatcaggggatgccctgagctccacaggtcttcatgggcaggggttgtgggtcctggtgaaggaagtgcatcctcaggcctgggctgtagcaagctgtctgcccttgggttcaagaaccagactgtggagccaaaggtgaccgcagggggccccagggctggagccacaaggataccctcactttgcatgaggagctgaaactgaccagtgtccagtgttagcccccacatggggctgctcttgcttctactaaaagatacagcagttacccccttatccacaggggatacagtggatatctaaaaccagacccccagtggatgtctaaaaccacagataataacaaaccttatacatactgttttttcctatgcatacatacctgtgattaagtttatgaattaggcaccttaagagattgacaacaataactaataataaaatgtaacggttatactgtaa

SEQ ID NO: 456778 - DNA, 2837 bp, Homo sapiens
cgagctcgggtacccgttctaatacgactcactgttgccttcgccgctgtctgcgttagagggcggtgtcacacccttgcccttgtctgccgaggatgctctcacagagtgccgtacttctgtgccaggagcttgtgatccagctatataccctgtttctccttccttctaggtccgagctatacctgtggacattggtttctccattgaagagctggaggacctttacatggtgtttaaggccaagcacctggctagccagtactgggggtgcagccgcacaatggccggccgtcgggaccccagcctgccctacctggagcagtaccggattgatgccagccagttccgggaactctttgccagcctgacaccctgggcctgtggctcccacacacctctgctggcagggcgcatgttcaggctcctggacgaaaacaaggactcgctgatcaacttcaaggagttcgtgacagggatgagcgggatgtaccacggggacctgacagagaagctcaaggtgctctacaagctacaccttcccccagctctgagcccagaggaagccgagtcagccctggaggcggcccattatttcacagaggacagctcctcagaagaagcactaccacaggaagagcaagaaggaagtggaagtgaggagagaggagaggagaaggggaccagctctccggactatcggcactaccttcgaatgtgggccaaggagaaagaggctcagaaggagacgattaaggatcttcccaagatgaaccaggagcagttcattgagctgtgcaagacgctttacaacatgttcagtgaagaccccatggagcaggacctgtaccacgccatcgccaccgtggccagcctcctgctccgcatcggagaggtggggaagaagttctcagcccgcacaggcaggaagcccagggactgtgccactgaggaggacgagccaccagcacccgaactgcatcaggacgcagccagggagcttcagcccccagctgcaggagacccccaagccaaagcaggcggagacacacacctcggaacagccccacaggagagccaggtggtggtggaggggggcagcggcgagggacagggctcaccctcccagctgctgtctgacgatgaaaccaaagacgacatgtccatgtcctcctactcggtggtcagcacgggctccctgcaatgtgaagaccttgcagacgacacggtgctggtgggcggggaggcctgcagccccacagcgcgcatcggcggcaccgtcgacaccgactggtgcatctcctttgagcagatcctggcctccatcctgacggagtccgtgctggtgaacttctttgagaagagagtggacattggactcaagatcaaggaccaaaagaaagtggagagacagttcagcaccgccagtgaccatgagcagcctggagtttccggctgatgcctgcagctgtgaggcctggcccaaggtgtcatcagtggggctggcctcatctcctcctgcctttcctcccttatcagtttctctttaaaggtgtgcccctcctgctctcccaggagcagtgagttgtgagtggaaagaaggctggtgcagacccagctgccttagacagattccctgggcctgcatctcctggcgccggctgcttctgggcccaggaagaggctgtggctcccaccttccttacacctggtgggagcccgcctcgcaccagctgcacctgcctagcattagaggctctcagatctgcccttgcttgcctcatacctctgtgctccacactgcggccaggccagctgagtccctccatccgtggatgctttcctgcagctatgtggtatgggggtcattcctgcctcttgggcaccaggttggggggcatgtgcttgttgggcaccaaagtgatggaaccctcaggtgctctccgggagcctgaacctcctgactgaggaacatgggcagaacatgtttattgcacagagtgggcgctgcgcacaggcgtggctgtacacgtgctctcagctcatcatcctttccagtaactttaaaaaaacatccctcaggtcctgatatatttccttggattcatttcacttggctagaaattacactgtgctcaatgccttaataaatccctgaaagaaataaaaaccactgtgtgcaatgccttgctgtggcccccaaccactgcttaggcctcccaacttctccccaggccaagtatggggccctggctgtgttctggaagttcaagacacttagtcctccacagtgggtggaagagtgcaaggtctgccaggtcagatggagacgcagaacctgctggtgcaagctgggcaggtcctgaccaacctgcatcaggggatgccctgagctccacaggtcttcatgggcaggggttgtgggtcctggtgaaggaagtgcatcctcaggcctgggctgtagcaagctgtctgcccttgggttcaagaaccagactgtggagccaaaggtgaccgcagggggccccagggctggagccacaaggataccctcactttgcatgaggagctgaaactgaccagtgtccagtgttagcccccacatggggctgctcttgcttctactaaaagatacagcagttacccccttatccacaggggatacagtggatatctaaaaccagacccccagtggatgtctaaaaccacagataataacaaaccttatacatactgttttttcctatgcatacatacctgtgattaagtttatgaattaggcaccttaagagattgacaacaataactaataataaaatgtaacggttatactgtaa

SEQ ID NO: 456779 - DNA, 5243 bp, Homo sapiens
cgccgacggcggcgggcgcttccgcctcgcgggcctcggcccggtgcgagcggctccgcgatgtggctgagcccggaggaggtgctggtggccaatgcgctgtgggtgacggagcgggccaaccccttcttcgtgctgcagcgacgccggggccacggcaggggcggcggccttacgggtcttctcgtgggcaccctggacgtggtgctggactccagtgcccgcgtggccccttaccgcatcctgcaccagacccaggactcccaggtctactggacagtggcgtgtggttcttcccgcaaagagatcacaaaacactgggaatggctggaaaataacttgctccagacactgtccatcttcgacagtgaggaagatatcaccaccttcgtcaagggcaagatacacggaatcatcgcagaagagaacaagaacctgcagccccagggagacgaggaccccgggaagttcaaggaggctgagctgaagatgcggaagcagtttgggatgcctgagggcgagaagctggtgaattactactcctgcagctactggaagggccgcgtgccccggcagggctggctgtacctgacggtcaaccacctgtgcttctactccttcctgctggggaaggaagtgagcctcgtggtgcagtgggtggacataacgcgtctggagaagaacgccaccctgctcttccccgagagcatccgtgtggacacccgcgaccaggagctcttcttctccatgttcctcaacatcggcgagaccttcaagctcatggagcagttggccaacctggccatgcggcagctgctggacagcgagggcttcctggaggacaaggccctgcctaggcccatccggccacacaggaacatctcagccctgaagcgagacctggacgcccgagccaagaatgagtgctaccgagccacgttccggctgcccagggatgagcggctagacggccacacaagctgcaccctgtggacgccgttcaacaagctgcacatccctggccagatgttcatctccaacaactacatctgcttcgccagcaaggaggaggacgcttgccacctcatcatacccctgagggaggtgaccattgtcgaaaaagctgacagctccagcgtgctgcccagccccctgtccatcagcaccaaaagcaaaatgacattcctgtttgccaacctgaaagaccgtgatttcttggtgcagaggatctctgacttcctccagaaaacaccatccaagcagccaggcagtatcgggagcaggaaagccagtgttgtggaccctagcacagagtcttccccagctcctcaggaggggtcggagcagcccgccagcccagcctctcccctcagcagccgccagagcttctgtgcgcaggaggcgccaaccgcatcccagggcctgctgaagctcttccagaaaaactcgcccatggaggaccttggagccaagggggccaaggagaagatgaaagaggagtcatggcacatccacttcttcgagtacgggcgtggcgtgtgcatgtaccgcacagccaagacgcgggcactggtcctgaagggtatccctgagagcctccggggagagctgtggctcctcttctccggggcctggaatgagatggtgactcaccccgggtactatgctgagctggtggagaagtccaccgggaagtacagcctggccacagaggagatcgagcgagacctgcaccgctccatgcccgagcaccctgccttccagaacgagctggggattgctgccctccggcgggtgctgactgcctatgccttccgaaaccccaccatcggctactgccaggcaatgaacatcgtgacctcggtgctcctgctctatggcagtgaggaggaggccttctggctcctggtggccctgtgcgagcgcatgctgcccgactactacaacaccagggtggtgggagccctggtggaccaaggcatcttcgaagagctcacgagagacttcctgccgcagctctcggagaagatgcaggacctgggggtgatctccagcatctcgctgtcctggttcctgaccctcttcctcagcgtcatgcccttcgagagcgccgtggtcatcgtcgactgctttttctatgagggcatcaaggtgatcctgcaggtggccctggccgtcctggacgccaacatggagcagctgctgggctgcagcgacgagggcgaggccatgaccatgctgggcagatacctggataatgtggtcaacaagcagagtgtctctcctcctatcccgcacctccgtgccttgctgagcagcagcgatgacccccctgcagaggtggacatctttgagctcctgaaagtgtcctatgagaaattcagcagcctgagggccgaagacattgagcagatgcggtttaaacagaggctgaaagtgatccagtccttggaggacacggccaagaggagtgtggtccgagctatacctgtggacattggtttctccattgaagagctggaggacctttacatggtgtttaaggccaagcacctggctagccagtactgggggtgcagccgcacaatggccggccgtcgggaccccagcctgccctacctggagcagtaccggattgatgccagccagttccgggaactctttgccagcctgacaccctgggcctgtggctcccacacacctctgctggcagggcgcatgttcaggctcctggacgaaaacaaggactcgctgatcaacttcaaggagttcgtgacagggatgagcgggatgtaccacggggacctgacagagaagctcaaggtgctctacaagctacaccttcccccagctctgagcccagaggaagccgagtcagccctggaggcggcccattatttcacagaggacagctcctcagaagcatctcctctggcctcagatctggatcttttcctgccctgggaggctcaagaagcactaccacaggaagagcaagaaggaagtggaagtgaggagagaggagaggagaaggggaccagctctccggactatcggcactaccttcgaatgtgggccaaggagaaagaggctcagaaggagacgattaaggatcttcccaagatgaaccaggagcagttcattgagctgtgcaagacgctttacaacatgttcagtgaagaccccatggagcaggacctgtaccacgccatcgccaccgtggccagcctcctgctccgcatcggagaggtggggaagaagttctcagcccgcacaggcaggaagcccagggactgtgccactgaggaggacgagccaccagcacccgaactgcatcaggacgcagccagggagcttcagcccccagctgcaggagacccccaagccaaagcaggcggagacacacacctcggaacagccccacaggagagccaggtggtggtggaggggggcagcggcgagggacagggctcaccctcccagctgctgtctgacgatgaaaccaaagacgacatgtccatgtcctcctactcggtggtcagcacgggctccctgcaatgtgaagaccttgcagacgacacggtgctggtgggcggggaggcctgcagccccacagcgcgcatcggcggcaccgtcgacaccgactggtgcatctcctttgagcagatcctggcctccatcctgacggagtccgtgctggtgaacttctttgagaagagagtggacattggactcaagatcaaggaccaaaagaaagtggagagacagttcagcaccgccagtgaccatgagcagcctggagtttccggctgatgcctgcagctgtgaggcctggcccaaggtgtcatcagtggggctggcctcatctcctcctgcctttcctcccttatcagtttctctttaaaggtgtgcccctcctgctctcccaggagcagtgagttgtgagtggaaagaaggctggtgcagacccagctgccttagacagattccctgggcctgcatctcctggcgccggctgcttctgggcccaggaagaggctgtggctcccaccttccttacacctggtgggagcccgcctcgcaccagctgcacctgcctagcattagaggctctcagatctgcccttgcttgcctcatacctctgtgctccacactgcggccaggccagctgagtccctccatccgtggatgctttcctgcagctatgtggtatgggggtcattcctgcctcttgggcaccaggttggggggcatgtgcttgttgggcaccaaagtgatggaaccctcaggtgctctccgggagcctgaacctcctgactgaggaacatgggcagaacatgtttattgcacagagtgggcgctgcgcacaggcgtggctgtacacgtgctctcagctcatcatcctttccagtaactttaaaaaaacatccctcaggtcctgatatatttccttggattcatttcacttggctagaaattacactgtgctcaatgccttaataaatccctgaaagaaataaaaaccactgtgtgcaatgccttgctgtggcccccaaccactgcttaggcctcccaacttctccccaggccaagtatggggccctggctgtgttctggaagttcaagacacttagtcctccacagtgggtggaagagtgcaaggtctgccaggtcagatggagacgcagaacctgctggtgcaagctgggcaggtcctgaccaacctgcatcaggggatgccctgagctccacaggtcttcatgggcaggggttgtgggtcctggtgaaggaagtgcatcctcaggcctgggctgtagcaagctgtctgcccttgggttcaagaaccagactgtggagccaaaggtgaccgcagggggccccagggctggagccacaaggataccctcactttgcatgaggagctgaaactgaccagtgtccagtgttagcccccacatggggctgctcttgcttctactaaaagatacagcagttacccccttatccacaggggatacagtggatatctaaaaccagacccccagtggatgtctaaaaccacagataataacaaaccttatacatactgttttttcctatgcatacatacctgtgattaagtttatgaattaggcaccttaagagattgacaacaataactaataataaaatgtaacggttatactgtaaaaaaagaaaagaacagaagagaaaaagaacaggaaaaaaaacaacccaaagc

SEQ ID NO: 456780 - DNA, 5134 bp, Homo sapiens
cgccgacggcggcgggcgcttccgcctcgcgggcctcggcccggtgcgagcggctccgcgatgtggctgagcccggaggaggtgctggtggccaatgcgctgtgggtgacggagcgggccaaccccttcttcgtgctgcagcgacgccggggccacggcaggggcggcggccttacgggtcttctcgtgggcaccctggacgtggtgctggactccagtgcccgcgtggccccttaccgcatcctgcaccagacccaggactcccaggtctactggacagtggcgtgtggttcttcccgcaaagagatcacaaaacactgggaatggctggaaaataacttgctccagacactgtccatcttcgacagtgaggaagatatcaccaccttcgtcaagggcaagatacacggaatcatcgcagaagagaacaagaacctgcagccccagggagacgaggaccccgggaagttcaaggaggctgagctgaagatgcggaagcagtttgggatgcctgagggcgagaagctggtgaattactactcctgcagctactggaagggccgcgtgccccggcagggctggctgtacctgacggtcaaccacctgtgcttctactccttcctgctggggaaggaagtgagcctcgtggtgcagtgggtggacataacgcgtctggagaagaacgccaccctgctcttccccgagagcatccgtgtggacacccgcgaccaggagctcttcttctccatgttcctcaacatcggcgagaccttcaagctcatggagcagttggccaacctggccatgcggcagctgctggacagcgagggcttcctggaggacaaggccctgcctaggcccatccggccacacaggaacatctcagccctgaagcgagacctggacgcccgagccaagaatgagtgctaccgagccacgttccggctgcccagggatgagcggctagacggccacacaagctgcaccctgtggacgccgttcaacaagctgcacatccctggccagatgttcatctccaacaactacatctgcttcgccagcaaggaggaggacgcttgccacctcatcatacccctgagggaggtgaccattgtcgaaaaagctgacagctccagcgtgctgcccagccccctgtccatcagcaccaaaagcaaaatgacattcctgtttgccaacctgaaagaccgtgatttcttggtgcagaggatctctgacttcctccagaaaacaccatccaagcagccaggcagtatcgggagcaggaaagccagtgttgtggaccctagcacagagtcttccccagctcctcaggaggggtcggagcagcccgccagcccagcctctcccctcagcagccgccagagcttctgtgcgcaggaggcgccaaccgcatcccagggcctgctgaagctcttccagaaaaactcgcccatggaggaccttggagccaagggggccaaggagaagatgaaagaggagtcatggcacatccacttcttcgagtacgggcgtggcgtgtgcatgtaccgcacagccaagacgcgggcactggtcctgaagggtatccctgagagcctccggggagagctgtggctcctcttctccggggcctggaatgagatggtgactcaccccgggtactatgctgagctggtggagaagtccaccgggaagtacagcctggccacagaggagatcgagcgagacctgcaccgctccatgcccgagcaccctgccttccagaacgagctggggattgctgccctccggcgggtgctgactgcctatgccttccgaaaccccaccatcggctactgccaggcaatgaacatcgtgacctcggtgctcctgctctatggcagtgaggaggaggccttctggctcctggtggccctgtgcgagcgcatgctgcccgactactacaacaccagggtggtgggagccctggtggaccaaggcatcttcgaagagctcacgagagacttcctgccgcagctctcggagaagatgcaggacctgggggtgatctccagcatctcgctgtcctggttcctgaccctcttcctcagcgtcatgcccttcgagagcgccgtggtcatcgtcgactgctttttctatgagggcatcaaggtgatcctgcaggtggccctggccgtcctggacgccaacatggagcagctgctgggctgcagcgacgagggcgaggccatgaccatgctgggcagatacctggataatgtggtcaacaagcagagtgtctctcctcctatcccgcacctccgtgccttgctgagcagcagcgatgacccccctgcagaggtggacatctttgagctcctgaaagtgtcctatgagaaattcagcagcctgagggccgaagacattgagcagatgcggtttaaacagaggctgaaagtgatccagtccttggaggacacggccaagaggagtgtggtccgagctatacctgtggacattggtttctccattgaagagctggaggacctttacatggtgtttaaggccaagcacctggctagccagtactgggggtgcagccgcacaatggccggccgtcgggaccccagcctgccctacctggagcagtaccggattgatgccagccagttccgggaactctttgccagcctgacaccctgggcctgtggctcccacacacctctgctggcagggcgcatgttcaggctcctggacgaaaacaaggactcgctgatcaacttcaaggagttcgtgacagggatgagcgggatgtaccacggggacctgacagagaagctcaaggtgctctacaagctacaccttcccccagctctgagcccagaggaagccgagtcagccctggaggcggcccattatttcacagaggacagctcctcagaagcatctcctctggcctcagatctggatcttttcctgccctgggaggctcaagaagcactaccacaggaagagcaagaaggaagtggaagtgaggagagaggagaggagaaggggaccagctctccggactatcggcactaccttcgaatgtgggccaaggagaaagaggctcagaaggagacgattaaggatcttcccaagatgaaccaggagcagttcattgagctgtgcaagacgctttacaacatgttcagtgaagaccccatggagcaggacctgtaccacgccatcgccaccgtggccagcctcctgctccgcatcggagaggtggggaagaagttctcagcccgcacaggcaggaagcccagggactgtgccactgaggaggacgagccaccagcacccgaactgcatcaggacgcagccagggagcttcagcccccagctgcaggagacccccaagccaaagcaggcggagacacacacctcggaacagccccacaggagagccaggtggtggtggaggggggcagcggcgagggacagggctcaccctcccagctgctgtctgacgatgaaaccaaagacgacatgtccatgtcctcctactcggtggtcagcacgggctccctgcaatgtgaagaccttgcagacgacacggtgctggtgggcggggaggcctgcagccccacagcgcgcatcggcggcaccgtcgacaccgactggtgcatctcctttgagcagatcctggcctccatcctgacggagtccgtgctggtgaacttctttgagaagagagtggacattggactcaagatcaaggaccaaaagaaagtggagagacagttcagcaccgccagtgaccatgagcagcctggagtttccggctgatgcctgcagctgtgaggcctggcccaaggtgtcatcagtggggctggcctcatctcctcctgcctttcctcccttatcagtttctctttaaaggtgtgcccctcctgctctcccaggagcagtgagttgtgagtggaaagaaggctggtgcagacccagctgccttagacagattccctgggcctgcatctcctggcgccggctgcttctgggcccaggaagaggctgtggctcccaccttccttacacctggtgggagcccgcctcgcaccagctgcacctgcctagcattagaggctctcagatctgcccttgcttgcctcatacctctgtgctccacactgcggccaggccagctgagtccctccatccgtggatgctttcctgcagctatgtggtatgggggtcattcctgcctcttgggcaccaggttggggggcatgtgcttgttgggcaccaaagtgatggaaccctcaggtgctctccgggagcctgaacctcctgactgaggaacatgggcagaacatgtttattgcacagagtgggcgctgcgcacaggcgtggctgtacacgtgctctcagctcatcatcctttccagtaactttaaaaaaacatccctcaggtcctgatatatttccttggattcatttcacttggctagaaattacactgtgctcaatgccttaataaatccctgaaagaacaacttctccccaggccaagtatggggccctggctgtgttctggaagttcaagacacttagtcctccacagtgggtggaagagtgcaaggtctgccaggtcagatggagacgcagaacctgctggtgcaagctgggcaggtcctgaccaacctgcatcaggggatgccctgagctccacaggtcttcatgggcaggggttgtgggtcctggtgaaggaagtgcatcctcaggcctgggctgtagcaagctgtctgcccttgggttcaagaaccagactgtggagccaaaggtgaccgcagggggccccagggctggagccacaaggataccctcactttgcatgaggagctgaaactgaccagtgtccagtgttagcccccacatggggctgctcttgcttctactaaaagatacagcagttacccccttatccacaggggatacagtggatatctaaaaccagacccccagtggatgtctaaaaccacagataataacaaaccttatacatactgttttttcctatgcatacatacctgtgattaagtttatgaattaggcaccttaagagattgacaacaataactaataataaaatgtaacggttatactgtaa

SEQ ID NO: 456781 - DNA, 5403 bp, Homo sapiens
cgccgacggcggcgggcgcttccgcctcgcgggcctcggcccggtgcgagcggctccgcgatgtggctgagcccggaggaggtgctggtggccaatgcgctgtgggtgacggagcgggccaaccccttcttcgtgctgcagcgacgccggggccacggcaggggcggcggccttacgggtcttctcgtgggcaccctggacgtggtgctggactccagtgcccgcgtggccccttaccgcatcctgcaccagacccaggactcccaggtctactggacagtggcgtgtggttcttcccgcaaagagatcacaaaacactgggaatggctggaaaataacttgctccagacactgtccatcttcgacagtgaggaagatatcaccaccttcgtcaagggcaagatacacggaatcatcgcagaagagaacaagaacctgcagccccagggagacgaggaccccgggaagttcaaggaggctgagctgaagatgcggaagcagtttgggatgcctgagggcgagaagctggtgaattactactcctgcagctactggaagggccgcgtgccccggcagggctggctgtacctgacggtcaaccacctgtgcttctactccttcctgctggggaaggaagtgagcctcgtggtgcagtgggtggacataacgcgtctggagaagaacgccaccctgctcttccccgagagcatccgtgtggacacccgcgaccaggagctcttcttctccatgttcctcaacatcggcgagaccttcaagctcatggagcagttggccaacctggccatgcggcagctgctggacagcgagggcttcctggaggacaaggccctgcctaggcccatccggccacacaggaacatctcagccctgaagcgagacctggacgcccgagccaagaatgagtgctaccgagccacgttccggctgcccagggatgagcggctagacggccacacaagctgcaccctgtggacgccgttcaacaagctgcacatccctggccagatgttcatctccaacaactacatctgcttcgccagcaaggaggaggacgcttgccacctcatcatacccctgagggaggtgaccattgtcgaaaaagctgacagctccagcgtgctgcccagccccctgtccatcagcaccaaaagcaaaatgacattcctgtttgccaacctgaaagaccgtgatttcttggtgcagaggatctctgacttcctccagaaaacaccatccaagcagccaggcagtatcgggagcaggaaagccagtgttgtggaccctagcacagagtcttccccagctcctcaggaggggtcggagcagcccgccagcccagcctctcccctcagcagccgccagagcttctgtgcgcaggaggcgccaaccgcatcccagggcctgctgaagctcttccagaaaaactcgcccatggaggaccttggagccaagggggccaaggagaagatgaaagaggagtcatggcacatccacttcttcgagtacgggcgtggcgtgtgcatgtaccgcacagccaagacgcgggcactggtcctgaagggtatccctgagagcctccggggagagctgtggctcctcttctccggggcctggaatgagatggtgactcaccccgggtactatgctgagctggtggagaagtccaccgggaagtacagcctggccacagaggagatcgagcgagacctgcaccgctccatgcccgagcaccctgccttccagaacgagctggggattgctgccctccggcgggtgctgactgcctatgccttccgaaaccccaccatcggctactgccaggcaatgaacatcgtgacctcggtgctcctgctctatggcagtgaggaggaggccttctggctcctggtggccctgtgcgagcgcatgctgcccgactactacaacaccagggtggtgggagccctggtggaccaaggcatcttcgaagagctcacgagagacttcctgccgcagctctcggagaagatgcaggacctgggggtgatctccagcatctcgctgtcctggttcctgaccctcttcctcagcgtcatgcccttcgagagcgccgtggtcatcgtcgactgctttttctatgagggcatcaaggtgatcctgcaggtggccctggccgtcctggacgccaacatggagcagctgctgggctgcagcgacgagggcgaggccatgaccatgctgggcagatacctggataatgtggtcaacaagcagagtgtctctcctcctatcccgcacctccgtgccttgctgagcagcagcgatgacccccctgcagaggtggacatctttgagctcctgaaagtgtcctatgagaaattcagcagcctgagggccgaagacattgagcagatgcggtttaaacagaggctgaaagtgatccagtccttggaggacacggccaagaggagtgtggtccgagctatacctgtggacattggtttctccattgaagagctggaggacctttacatggtgtttaaggccaagcacctggctagccagtactgggggtgcagccgcacaatggccggccgtcgggaccccagcctgccctacctggagcagtaccggattgatgccagccagttccgggaactctttgccagcctgacaccctgggcctgtggctcccacacacctctgctggcagggcgcatgttcaggctcctggacgaaaacaaggactcgctgatcaacttcaaggagttcgtgacagggatgagcgggatgtaccacggggacctgacagagaagctcaaggtgctctacaagctacaccttcccccagctctgagcccagaggaagccgagtcagccctggaggcggcccattatttcacagaggacagctcctcagaagcatctcctctggcctcagatctggatcttttcctgccctgggaggctcaagaagcactaccacaggaagagcaagaaggaagtggaagtgaggagagaggagaggagaaggggaccagctctccggactatcggcactaccttcgaatgtgggccaaggagaaagaggctcagaaggagacgattaaggatcttcccaagatgaaccaggagcagttcattgagctgtgcaagacgctttacaacatgttcagtgaagaccccatggagcaggacctgtaccacgccatcgccaccgtggccagcctcctgctccgcatcggagaggtggggaagaagttctcagcccgcacaggcaggaagcccagggactgtgccactgaggaggacgagccaccagcacccgaactgcatcaggacgcagccagggagcttcagcccccagctgcaggagacccccaagccaaagcaggcggagacacacacctcggaacagccccacaggagagccaggtggtggtggaggggggcagcggcgagggacagggctcaccctcccagctgctgtctgacgatgaaaccaaagacgacatgtccatgtcctcctactcggtggtcagcacgggctccctgcaatgtgaagaccttgcagacgacacggtgctggtgggcggggaggcctgcagccccacagcgcgcatcggcggcaccgtcgacaccgactggtgcatctcctttgagcagatcctggcctccatcctgacggagtccgtgctggtgaacttctttgagaagagagtggacattggactcaagatcaaggaccaaaagaaagtggagagacagttcagcaccgccagtgaccatgagcagcctggagtttccggctgatgcctgcagctgtgaggcctggcccaaggtgtcatcagtggggctggcctcatctcctcctgcctttcctcccttatcagtttctctttaaaggtgtgcccctcctgctctcccaggagcagtgagttgtgagtggaaagaaggctggtgcagacccagctgccttagacagattccctgggcctgcatctcctggcgccggctgcttctgggcccaggaagaggctgtggctcccaccttccttacacctggtgggagcccgcctcgcaccagctgcacctgcctagcattagaggctctcagatctgcccttgcttgcctcatacctctgtgctccacactgcggccaggccagctgagtccctccatccgtggatgctttcctgcagctatgtggtatgggggtcattcctgcctcttgggcaccaggttggggggcatgtgcttgttgggcaccaaagtgatggaaccctcaggtgctctccgggagcctgaacctcctgactgaggaacatgggcagaacatgtttattgcacagagtgggcgctgcgcacaggcgtggctgtacacgtgctctcagctcatcatcctttccagtaactttaaaaaaacatccctcaggtcctgatatatttccttggattcatttcacttggctagaaattacactgtgctcaatgccttaataaatccctgaaagaaataaaaaccactgtgtgcaatgccttgctgtggcccccaaccactgcttaggcctcccaacttctccccaggccaagtatggggccctggctgtgttctggaagttcaagacacttagtcctccacagtgggtggaagagtgcaaggtctgccaggtcagatggagacgcagaacctgctggtgcaagctgggcaggtcctgaccaacctgcatcaggggatgccctgagctccacaggtcttcatgggcaggggttgtgggtcctggtgaaggaagtgcatcctcaggcctgggctgtagcaagctgtctgcccttgggttcaagaaccagactgtggagccaaaggtgaccgcagggggccccagggctggagccacaaggataccctcactttgcatgaggagctgaaactgaccagtgtccagtgttagcccccacatggggctgctcttgcttctactaaaagatacagcagttacccccttatccacaggggatacagtggatatctaaaaccagacccccagtggatgtctaaaaccacagataataacaaaccttatacatactgttttttcctatgcatacatacctgtgattaagtttatgaattaggcaccttaagagattgacaacaataactaataataaaatgtaacggttatactgtaatgaaagttgtaaatgtggtctgtctcacaatatcttcttgtactgtactcatctcttttccaggtggctgttgactctgggtaactaaagctgcagaaggtgaaactcaggtactattgtatatctctgtggctgctgtttttgttttaattaagtagctttgtttttttgtttttttgtttttttgttttttgagaccaagtcttgctctg

SEQ ID NO: 456782 - DNA, 3134 bp, Homo sapiens
cgccgacggcggcgggcgcttccgcctcgcgggcctcggcccggtgcgagcggctccgcgatgtggctgagcccggaggaggtgctggtggccaatgcgctgtgggtgacggagcgggccaaccccttcttcgtgctgcagcgacgccggggccacggcaggggcggcggccttacgggtcttctcgtgggcaccctggacgtggtgctggactccagtgcccgcgtggccccttaccgcatcctgcaccagacccaggactcccaggtctactggacagtggcgtgtggttcttcccgcaaagagatcacaaaacactgggaatggctggaaaataacttgctccagacactgtccatcttcgacagtgaggaagatatcaccaccttcgtcaagggcaagatacacggaatcatcgcagaagagaacaagaacctgcagccccagggagacgaggaccccgggaagttcaaggaggctgagctgaagatgcggaagcagtttgggatgcctgagggcgagaagctggtgaattactactcctgcagctactggaagggccgcgtgccccggcagggctggctgtacctgacggtcaaccacctgtgcttctactccttcctgctggggaaggaagtgagcctcgtggtgcagtgggtggacataacgcgtctggagaagaacgccaccctgctcttccccgagagcatccgtgtggacacccgcgaccaggagctcttcttctccatgttcctcaacatcggcgagaccttcaagctcatggagcagttggccaacctggccatgcggcagctgctggacagcgagggcttcctggaggacaaggccctgcctaggcccatccggccacacaggaacatctcagccctgaagcgagacctggacgcccgagccaagaatgagtgctaccgagccacgttccggctgcccagggatgagcggctagacggccacacaagctgcaccctgtggacgccgttcaacaagctgcacatccctggccagatgttcatctccaacaactacatctgcttcgccagcaaggaggaggacggagcagttcattgagctgtgcaagacgctttacaacatgttcagtgaagaccccatggagcaggacctgtaccacgccatcgccaccgtggccagcctcctgctccgcatcggagaggtggggaagaagttctcagcccgcacaggcaggaagcccagggactgtgccactgaggaggacgagccaccagcacccgaactgcatcaggacgcagccagggagcttcagcccccagctgcaggagacccccaagccaaagcaggcggagacacacacctcggaacagccccacaggagagccaggtggtggtggaggggggcagcggcgagggacagggctcaccctcccagctgctgtctgacgatgaaaccaaagacgacatgtccatgtcctcctactcggtggtcagcacgggctccctgcaatgtgaagaccttgcagacgacacggtgctggtgggcggggaggcctgcagccccacagcgcgcatcggcggcaccgtcgacaccgactggtgcatctcctttgagcagatcctggcctccatcctgacggagtccgtgctggtgaacttctttgagaagagagtggacattggactcaagatcaaggaccaaaagaaagtggagagacagttcagcaccgccagtgaccatgagcagcctggagtttccggctgatgcctgcagctgtgaggcctggcccaaggtgtcatcagtggggctggcctcatctcctcctgcctttcctcccttatcagtttctctttaaaggtgtgcccctcctgctctcccaggagcagtgagttgtgagtggaaagaaggctggtgcagacccagctgccttagacagattccctgggcctgcatctcctggcgccggctgcttctgggcccaggaagaggctgtggctcccaccttccttacacctggtgggagcccgcctcgcaccagctgcacctgcctagcattagaggctctcagatctgcccttgcttgcctcatacctctgtgctccacactgcggccaggccagctgagtccctccatccgtggatgctttcctgcagctatgtggtatgggggtcattcctgcctcttgggcaccaggttggggggcatgtgcttgttgggcaccaaagtgatggaaccctcaggtgctctccgggagcctgaacctcctgactgaggaacatgggcagaacatgtttattgcacagagtgggcgctgcgcacaggcgtggctgtacacgtgctctcagctcatcatcctttccagtaactttaaaaaaacatccctcaggtcctgatatatttccttggattcatttcacttggctagaaattacactgtgctcaatgccttaataaatccctgaaagaaataaaaaccactgtgtgcaatgccttgctgtggcccccaaccactgcttaggcctcccaacttctccccaggccaagtatggggccctggctgtgttctggaagttcaagacacttagtcctccacagtgggtggaagagtgcaaggtctgccaggtcagatggagacgcagaacctgctggtgcaagctgggcaggtcctgaccaacctgcatcaggggatgccctgagctccacaggtcttcatgggcaggggttgtgggtcctggtgaaggaagtgcatcctcaggcctgggctgtagcaagctgtctgcccttgggttcaagaaccagactgtggagccaaaggtgaccgcagggggccccagggctggagccacaaggataccctcactttgcatgaggagctgaaactgaccagtgtccagtgttagcccccacatggggctgctcttgcttctactaaaagatacagcagttacccccttatccacaggggatacagtggatatctaaaaccagacccccagtggatgtctaaaaccacagataataacaaaccttatacatactgttttttcctatgcatacatacctgtgattaagtttatgaattaggcaccttaagagattgacaacaataactaataataaaatgtaacggttatactgtaa

SEQ ID NO: 456783 - DNA, 5086 bp, Homo sapiens
cgccgacggcggcgggcgcttccgcctcgcgggcctcggcccggtgcgagcggctccgcgatgtggctgagcccggaggaggtgctggtggccaatgcgctgtgggtgacggagcgggccaaccccttcttcgtgctgcagcgacgccggggccacggcaggggcggcggccttacgggtcttctcgtgggcaccctggacgtggtgctggactccagtgcccgcgtggccccttaccgcatcctgcaccagacccaggactcccaggtctactggacagtggcgtgtggttcttcccgcaaagagatcacaaaacactgggaatggctggaaaataacttgctccagacactgtccatcttcgacagtgaggaagatatcaccaccttcgtcaagggcaagatacacggaatcatcgcagaagagaacaagaacctgcagccccagggagacgaggaccccgggaagttcaaggaggctgagctgaagatgcggaagcagtttgggatgcctgagggcgagaagctggtgaattactactcctgcagctactggaagggccgcgtgccccggcagggctggctgtacctgacggtcaaccacctgtgcttctactccttcctgctggggaaggaagtgagcctcgtggtgcagtgggtggacataacgcgtctggagaagaacgccaccctgctcttccccgagagcatccgtgtggacacccgcgaccaggagctcttcttctccatgttcctcaacatcggcgagaccttcaagctcatggagcagttggccaacctggccatgcggcagctgctggacagcgagggcttcctggaggacaaggccctgcctaggcccatccggccacacaggaacatctcagccctgaagcgagacctggacgcccgagccaagaatgagtgctaccgagccacgttccggctgcccagggatgagcggctagacggccacacaagctgcaccctgtggacgccgttcaacaagctgcacatccctggccagatgttcatctccaacaactacatctgcttcgccagcaaggaggaggacgcttgccacctcatcatacccctgagggaggtgaccattgtcgaaaaagctgacagctccagcgtgctgcccagccccctgtccatcagcaccaaaagcaaaatgacattcctgtttgccaacctgaaagaccgtgatttcttggtgcagaggatctctgacttcctccagaaaacaccatccaagcagccaggcagtatcgggagcaggaaagccagtgttgtggaccctagcacagagtcttccccagctcctcaggaggggtcggagcagcccgccagcccagcctctcccctcagcagccgccagagcttctgtgcgcaggaggcgccaaccgcatcccagggcctgctgaagctcttccagaaaaactcgcccatggaggaccttggagccaagggggccaaggagaagatgaaagaggagtcatggcacatccacttcttcgagtacgggcgtggcgtgtgcatgtaccgcacagccaagacgcgggcactggtcctgaagggtatccctgagagcctccggggagagctgtggctcctcttctccggggcctggaatgagatggtgactcaccccgggtactatgctgagctggtggagaagtccaccgggaagtacagcctggccacagaggagatcgagcgagacctgcaccgctccatgcccgagcaccctgccttccagaacgagctggggattgctgccctccggcgggtgctgactgcctatgccttccgaaaccccaccatcggctactgccaggcaatgaacatcgtgacctcggtgctcctgctctatggcagtgaggaggaggccttctggctcctggtggccctgtgcgagcgcatgctgcccgactactacaacaccagggtggtgggagccctggtggaccaaggcatcttcgaagagctcacgagagacttcctgccgcagctctcggagaagatgcaggacctgggggtgatctccagcatctcgctgtcctggttcctgaccctcttcctcagcgtcatgcccttcgagagcgccgtggtcatcgtcgactgctttttctatgagggcatcaaggtgatcctgcaggtggccctggccgtcctggacgccaacatggagcagctgctgggctgcagcgacgagggcgaggccatgaccatgctgggcagatacctggataatgtggtcaacaagcagagtgtctctcctcctatcccgcacctccgtgccttgctgagcagcagcgatgacccccctgcagaggtggacatctttgagctcctgaaagtgtcctatgagaaattcagcagcctgagggccgaagacattgagcagatgcggtttaaacagaggctgaaagtgatccagtccttggaggacacggccaagaggagtgtggtccgagctatacctgtggacattggtttctccattgaagagctggaggacctttacatggtgtttaaggccaagcacctggctagccagtactgggggtgcagccgcacaatggccggccgtcgggaccccagcctgccctacctggagcagtaccggattgatgccagccagttccgggaactctttgccagcctgacaccctgggcctgtggctcccacacacctctgctggcagggcgcatgttcaggctcctggacgaaaacaaggactcgctgatcaacttcaaggagttcgtgacagggatgagcgggatgtaccacggggacctgacagagaagctcaaggtgctctacaagctacaccttcccccagctctgagcccagaggaagccgagtcagccctggaggcggcccattatttcacagaggacagctcctcagaagaagcactaccacaggaagagcaagaaggaagtggaagtgaggagagaggagaggagaaggggaccagctctccggactatcggcactaccttcgaatgtgggccaaggagaaagaggctcagaaggagacgattaaggatcttcccaagatgaaccaggagcagttcattgagctgtgcaagacgctttacaacatgttcagtgaagaccccatggagcaggacctgtaccacgccatcgccaccgtggccagcctcctgctccgcatcggagaggtggggaagaagttctcagcccgcacaggcaggaagcccagggactgtgccactgaggaggacgagccaccagcacccgaactgcatcaggacgcagccagggagcttcagcccccagctgcaggagacccccaagccaaagcaggcggagacacacacctcggaacagccccacaggagagccaggtggtggtggaggggggcagcggcgagggacagggctcaccctcccagctgctgtctgacgatgaaaccaaagacgacatgtccatgtcctcctactcggtggtcagcacgggctccctgcaatgtgaagaccttgcagacgacacggtgctggtgggcggggaggcctgcagccccacagcgcgcatcggcggcaccgtcgacaccgactggtgcatctcctttgagcagatcctggcctccatcctgacggagtccgtgctggtgaacttctttgagaagagagtggacattggactcaagatcaaggaccaaaagaaagtggagagacagttcagcaccgccagtgaccatgagcagcctggagtttccggctgatgcctgcagctgtgaggcctggcccaaggtgtcatcagtggggctggcctcatctcctcctgcctttcctcccttatcagtttctctttaaaggtgtgcccctcctgctctcccaggagcagtgagttgtgagtggtcctggcgccggctgcttctgggcccaggaagaggctgtggctcccaccttccttacacctggtgggagcccgcctcgcaccagctgcacctgcctagcattagaggctctcagatctgcccttgcttgcctcatacctctgtgctccacactgcggccaggccagctgagtccctccatccgtggatgctttcctgcagctatgtggtatgggggtcattcctgcctcttgggcaccaggttggggggcatgtgcttgttgggcaccaaagtgatggaaccctcaggtgctctccgggagcctgaacctcctgactgaggaacatgggcagaacatgtttattgcacagagtgggcgctgcgcacaggcgtggctgtacacgtgctctcagctcatcatcctttccagtaactttaaaaaaacatccctcaggtcctgatatatttccttggattcatttcacttggctagaaattacactgtgctcaatgccttaataaatccctgaaagaaataaaaaccactgtgtgcaatgccttgctgtggcccccaaccactgcttaggcctcccaacttctccccaggccaagtatggggccctggctgtgttctggaagttcaagacacttagtcctccacagtgggtggaagagtgcaaggtctgccaggtcagatggagacgcagaacctgctggtgcaagctgggcaggtcctgaccaacctgcatcaggggatgccctgagctccacaggtcttcatgggcaggggttgtgggtcctggtgaaggaagtgcatcctcaggcctgggctgtagcaagctgtctgcccttgggttcaagaaccagactgtggagccaaaggtgaccgcagggggccccagggctggagccacaaggataccctcactttgcatgaggagctgaaactgaccagtgtccagtgttagcccccacatggggctgctcttgcttctactaaaagatacagcagttacccccttatccacaggggatacagtggatatctaaaaccagacccccagtggatgtctaaaaccacagataataacaaaccttatacatactgttttttcctatgcatacatacctgtgattaagtttatgaattaggcaccttaagagattgacaacaataactaataataaaatgtaacggttatactgtaa

SEQ ID NO: 456784 - DNA, 5086 bp, Homo sapiens
cgccgacggcggcgggcgcttccgcctcgcgggcctcggcccggtgcgagcggctccgcgatgtggctgagcccggaggaggtgctggtggccaatgcgctgtgggtgacggagcgggccaaccccttcttcgtgctgcagcgacgccggggccacggcaggggcggcggccttacgggtcttctcgtgggcaccctggacgtggtgctggactccagtgcccgcgtggccccttaccgcatcctgcaccagacccaggactcccaggtctactggacagtggcgtgtggttcttcccgcaaagagatcacaaaacactgggaatggctggaaaataacttgctccagacactgtccatcttcgacagtgaggaagatatcaccaccttcgtcaagggcaagatacacggaatcatcgcagaagagaacaagaacctgcagccccagggagacgaggaccccgggaagttcaaggaggctgagctgaagatgcggaagcagtttgggatgcctgagggcgagaagctggtgaattactactcctgcagctactggaagggccgcgtgccccggcagggctggctgtacctgacggtcaaccacctgtgcttctactccttcctgctggggaaggaagtgagcctcgtggtgcagtgggtggacataacgcgtctggagaagaacgccaccctgctcttccccgagagcatccgtgtggacacccgcgaccaggagctcttcttctccatgttcctcaacatcggcgagaccttcaagctcatggagcagttggccaacctggccatgcggcagctgctggacagcgagggcttcctggaggacaaggccctgcctaggcccatccggccacacaggaacatctcagccctgaagcgagacctggacgcccgagccaagaatgagtgctaccgagccacgttccggctgcccagggatgagcggctagacggccacacaagctgcaccctgtggacgccgttcaacaagctgcacatccctggccagatgttcatctccaacaactacatctgcttcgccagcaaggaggaggacgcttgccacctcatcatacccctgagggaggtgaccattgtcgaaaaagctgacagctccagcgtgctgcccagccccctgtccatcagcaccaaaagcaaaatgacattcctgtttgccaacctgaaagaccgtgatttcttggtgcagaggatctctgacttcctccagaaaacaccatccaagcagccaggcagtatcgggagcaggaaagccagtgttgtggaccctagcacagagtcttccccagctcctcaggaggggtcggagcagcccgccagcccagcctctcccctcagcagccgccagagcttctgtgcgcaggaggcgccaaccgcatcccagggcctgctgaagctcttccagaaaaactcgcccatggaggaccttggagccaagggggccaaggagaagatgaaagaggagtcatggcacatccacttcttcgagtacgggcgtggcgtgtgcatgtaccgcacagccaagacgcgggcactggtcctgaagggtatccctgagagcctccggggagagctgtggctcctcttctccggggcctggaatgagatggtgactcaccccgggtactatgctgagctggtggagaagtccaccgggaagtacagcctggccacagaggagatcgagcgagacctgcaccgctccatgcccgagcaccctgccttccagaacgagctggggattgctgccctccggcgggtgctgactgcctatgccttccgaaaccccaccatcggctactgccaggcaatgaacatcgtgacctcggtgctcctgctctatggcagtgaggaggaggccttctggctcctggtggccctgtgcgagcgcatgctgcccgactactacaacaccagggtggtgggagccctggtggaccaaggcatcttcgaagagctcacgagagacttcctgccgcagctctcggagaagatgcaggacctgggggtgatctccagcatctcgctgtcctggttcctgaccctcttcctcagcgtcatgcccttcgagagcgccgtggtcatcgtcgactgctttttctatgagggcatcaaggtgatcctgcaggtggccctggccgtcctggacgccaacatggagcagctgctgggctgcagcgacgagggcgaggccatgaccatgctgggcagatacctggataatgtggtcaacaagcagagtgtctctcctcctatcccgcacctccgtgccttgctgagcagcagcgatgacccccctgcagaggtggacatctttgagctcctgaaagtgtcctatgagaaattcagcagcctgagggccgaagacattgagcagatgcggtttaaacagaggctgaaagtgatccagtccttggaggacacggccaagaggagtgtggtccgagctatacctgtggacattggtttctccattgaagagctggaggacctttacatggtgtttaaggccaagcacctggctagccagtactgggggtgcagccgcacaatggccggccgtcgggaccccagcctgccctacctggagcagtaccggattgatgccagccagttccgggaactctttgccagcctgacaccctgggcctgtggctcccacacacctctgctggcagggcgcatgttcaggctcctggacgaaaacaaggactcgctgatcaacttcaaggagttcgtgacagggatgagcgggatgtaccacggggacctgacagagaagctcaaggtgctctacaagctacaccttcccccagctctgagcccagaggaagccgagtcagccctggaggcggcccattatttcacagaggacagctcctcagaagaagcactaccacaggaagagcaagaaggaagtggaagtgaggagagaggagaggagaaggggaccagctctccggactatcggcactaccttcgaatgtgggccaaggagaaagaggctcagaaggagacgattaaggatcttcccaagatgaaccaggagcagttcattgagctgtgcaagacgctttacaacatgttcagtgaagaccccatggagcaggacctgtaccacgccatcgccaccgtggccagcctcctgctccgcatcggagaggtggggaagaagttctcagcccgcacaggcaggaagcccagggactgtgccactgaggaggacgagccaccagcacccgaactgcatcaggacgcagccagggagcttcagcccccagctgcaggagacccccaagccaaagcaggcggagacacacacctcggaacagccccacaggagagccaggtggtggtggaggggggcagcggcgagggacagggctcaccctcccagctgctgtctgacgatgaaaccaaagacgacatgtccatgtcctcctactcggtggtcagcacgggctccctgcaatgtgaagaccttgcagacgacacggtgctggtgggcggggaggcctgcagccccacagcgcgcatcggcggcaccgtcgacaccgactggtgcatctcctttgagcagatcctggcctccatcctgacggagtccgtgctggtgaacttctttgagaagagagtggacattggactcaagatcaaggacctttccggctgatgcctgcagctgtgaggcctggcccaaggtgtcatcagtggggctggcctcatctcctcctgcctttcctcccttatcagtttctctttaaaggtgtgcccctcctgctctcccaggagcagtgagttgtgagtggaaagaaggctggtgcagacccagctgccttagacagattccctgggcctgcatctcctggcgccggctgcttctgggcccaggaagaggctgtggctcccaccttccttacacctggtgggagcccgcctcgcaccagctgcacctgcctagcattagaggctctcagatctgcccttgcttgcctcatacctctgtgctccacactgcggccaggccagctgagtccctccatccgtggatgctttcctgcagctatgtggtatgggggtcattcctgcctcttgggcaccaggttggggggcatgtgcttgttgggcaccaaagtgatggaaccctcaggtgctctccgggagcctgaacctcctgactgaggaacatgggcagaacatgtttattgcacagagtgggcgctgcgcacaggcgtggctgtacacgtgctctcagctcatcatcctttccagtaactttaaaaaaacatccctcaggtcctgatatatttccttggattcatttcacttggctagaaattacactgtgctcaatgccttaataaatccctgaaagaaataaaaaccactgtgtgcaatgccttgctgtggcccccaaccactgcttaggcctcccaacttctccccaggccaagtatggggccctggctgtgttctggaagttcaagacacttagtcctccacagtgggtggaagagtgcaaggtctgccaggtcagatggagacgcagaacctgctggtgcaagctgggcaggtcctgaccaacctgcatcaggggatgccctgagctccacaggtcttcatgggcaggggttgtgggtcctggtgaaggaagtgcatcctcaggcctgggctgtagcaagctgtctgcccttgggttcaagaaccagactgtggagccaaaggtgaccgcagggggccccagggctggagccacaaggataccctcactttgcatgaggagctgaaactgaccagtgtccagtgttagcccccacatggggctgctcttgcttctactaaaagatacagcagttacccccttatccacaggggatacagtggatatctaaaaccagacccccagtggatgtctaaaaccacagataataacaaaccttatacatactgttttttcctatgcatacatacctgtgattaagtttatgaattaggcaccttaagagattgacaacaataactaataataaaatgtaacggttatactgtaa

SEQ ID NO: 456785 - DNA, 4965 bp, Homo sapiens
cgccgacggcggcgggcgcttccgcctcgcgggcctcggcccggtgcgagcggctccgcgatgtggctgagcccggaggaggtgctggtggccaatgcgctgtgggtgacggagcgggccaaccccttcttcgtgctgcagcgacgccggggccacggcaggggcggcggccttacgggtcttctcgtgggcaccctggacgtggtgctggactccagtgcccgcgtggccccttaccgcatcctgcaccagacccaggactcccaggtctactggacagtggcgtgtggttcttcccgcaaagagatcacaaaacactgggaatggctggaaaataacttgctccagacactgtccatcttcgacagtgaggaagatatcaccaccttcgtcaagggcaagatacacggaatcatcgcagaagagaacaagaacctgcagccccagggagacgaggaccccgggaagttcaaggaggctgagctgaagatgcggaagcagtttgggatgcctgagggcgagaagctggtgaattactactcctgcagctactggaagggccgcgtgccccggcagggctggctgtacctgacggtcaaccacctgtgcttctactccttcctgctggggaaggaagtgagcctcgtggtgcagtgggtggacataacgcgtctggagaagaacgccaccctgctcttccccgagagcatccgtgtggacacccgcgaccaggagctcttcttctccatgttcctcaacatcggcgagaccttcaagctcatggagcagttggccaacctggccatgcggcagctgctggacagcgagggcttcctggaggacaaggccctgcctaggcccatccggccacacaggaacatctcagccctgaagcgagacctggacgcccgagccaagaatgagtgctaccgagccacgttccggctgcccagggatgagcggctagacggccacacaagctgcaccctgtggacgccgttcaacaagctgcacatccctggccagatgttcatctccaacaactacatctgcttcgccagcaaggaggaggacgcttgccacctcatcatacccctgagggaggtgaccattgtcgaaaaagctgacagctccagcgtgctgcccagccccctgtccatcagcaccaaaagcaaaatgacattcctgtttgccaacctgaaagaccgtgatttcttggtgcagaggatctctgacttcctccagaaaacaccatccaagcagccaggcagtatcgggagcaggaaagccagtgttgtggaccctagcacagagtcttccccagctcctcaggaggggtcggagcagcccgccagcccagcctctcccctcagcagccgccagagcttctgtgcgcaggaggcgccaaccgcatcccagggcctgctgaagctcttccagaaaaactcgcccatggaggaccttggagccaagggggccaaggagaagatgaaagaggagtcatggcacatccacttcttcgagtacgggcgtggcgtgtgcatgtaccgcacagccaagacgcgggcactggtcctgaagggtatccctgagagcctccggggagagctgtggctcctcttctccggggcctggaatgagatggtgactcaccccgggtactatgctgagctggtggagaagtccaccgggaagtacagcctggccacagaggagatcgagcgagacctgcaccgctccatgcccgagcaccctgccttccagaacgagctggggattgctgccctccggcgggtgctgactgcctatgccttccgaaaccccaccatcggctactgccaggcaatgaacatcgtgacctcggtgctcctgctctatggcagtgaggaggaggccttctggctcctggtggccctgtgcgagcgcatgctgcccgactactacaacaccagggtggtgggagccctggtggaccaaggcatcttcgaagagctcacgagagacttcctgccgcagctctcggagaagatgcaggacctgggggtgatctccagcatctcgctgtcctggttcctgaccctcttcctcagcgtcatgcccttcgagagcgccgtggtcatcgtcgactgctttttctatgagggcatcaaggtgatcctgcaggtggccctggccgtcctggacgccaacatggagcagctgctgggctgcagcgacgagggcgaggccatgaccatgctgggcagatacctggataatgtggtcaacaagcagagtgtctctcctcctatcccgcacctccgtgccttgctgagcagcagcgatgacccccctgcagaggtggacatctttgagctcctgaaagtgtcctatgagaaattcagcagcctgagggccgaagacattgagcagatgcggtttaaacagaggctgaaagtgatccagtccttggaggacacggccaagaggagtgtggtccgagctatacctgtggacattggtttctccattgaagagctggaggacctttacatggtgtttaaggccaagcacctggctagccagtactgggggtgcagccgcacaatggccggccgtcgggaccccagcctgccctacctggagcagtaccggattgatgccagccagttccgggaactctttgccagcctgacaccctgggcctgtggctcccacacacctctgctggcagggcgcatgttcaggctcctggacgaaaacaaggactcgctgatcaacttcaaggagttcgtgacagggatgagcgggatgtaccacggggacctgacagagaagctcaaggtgctctacaagctacaccttcccccagctctgagcccagaggaagccgagtcagccctggaggcggcccattatttcacagaggacagctcctcagaagaagcactaccacaggaagagcaagaaggaagtggaagtgaggagagaggagaggagaaggggaccagctctccggactatcggcactaccttcgaatgtgggccaaggagaaagaggctcagaaggagacgattaaggatcttcccaagatgaaccaggagcagttcattgagctgtgcaagacgctttacaacatgttcagtgaagaccccatggagcaggacctgtaccacgccatcgccaccgtggccagcctcctgctccgcatcggagaggtggggaagaagttctcagcccgcacaggcaggaagcccagggactgtgccactgaggaggacgagccaccagcacccgaactgcatcaggacgcagccagggagcttcagcccccagctgcaggagacccccaagccaaagcaggcggagacacacacctcggaacagccccacaggagagccaggtggtggtggaggggggcagcggcgagggacagggctcaccctcccagctgctgtctgacgatgaaaccaaagacgacattccgtgctggtgaacttctttgagaagagagtggacattggactcaagatcaaggaccaaaagaaagtggagagacagttcagcaccgccagtgaccatgagcagcctggagtttccggctgatgcctgcagctgtgaggcctggcccaaggtgtcatcagtggggctggcctcatctcctcctgcctttcctcccttatcagtttctctttaaaggtgtgcccctcctgctctcccaggagcagtgagttgtgagtggaaagaaggctggtgcagacccagctgccttagacagattccctgggcctgcatctcctggcgccggctgcttctgggcccaggaagaggctgtggctcccaccttccttacacctggtgggagcccgcctcgcaccagctgcacctgcctagcattagaggctctcagatctgcccttgcttgcctcatacctctgtgctccacactgcggccaggccagctgagtccctccatccgtggatgctttcctgcagctatgtggtatgggggtcattcctgcctcttgggcaccaggttggggggcatgtgcttgttgggcaccaaagtgatggaaccctcaggtgctctccgggagcctgaacctcctgactgaggaacatgggcagaacatgtttattgcacagagtgggcgctgcgcacaggcgtggctgtacacgtgctctcagctcatcatcctttccagtaactttaaaaaaacatccctcaggtcctgatatatttccttggattcatttcacttggctagaaattacactgtgctcaatgccttaataaatccctgaaagaaataaaaaccactgtgtgcaatgccttgctgtggcccccaaccactgcttaggcctcccaacttctccccaggccaagtatggggccctggctgtgttctggaagttcaagacacttagtcctccacagtgggtggaagagtgcaaggtctgccaggtcagatggagacgcagaacctgctggtgcaagctgggcaggtcctgaccaacctgcatcaggggatgccctgagctccacaggtcttcatgggcaggggttgtgggtcctggtgaaggaagtgcatcctcaggcctgggctgtagcaagctgtctgcccttgggttcaagaaccagactgtggagccaaaggtgaccgcagggggccccagggctggagccacaaggataccctcactttgcatgaggagctgaaactgaccagtgtccagtgttagcccccacatggggctgctcttgcttctactaaaagatacagcagttacccccttatccacaggggatacagtggatatctaaaaccagacccccagtggatgtctaaaaccacagataataacaaaccttatacatactgttttttcctatgcatacatacctgtgattaagtttatgaattaggcaccttaagagattgacaacaataactaataataaaatgtaacggttatactgtaa

SEQ ID NO: 456786 - DNA, 1261 bp, Homo sapiens
cgagctcgggtacccgttctaatacgactcactgttgccttcgccgctgtctgcgttagagggcggtgtcacacccttgcccttgtctgccgaggatgctctcacagagtgccgtacttctgtgccaggagcttgtgatccagctatataccctgtttctccttccttctaggtccgagctatacctgtggacattggtttctccattgaagagctggaggacctttacatggtgtttaaggccaagcacctggctagccagtactgggggtgcagccgcacaatggccggccgtcgggaccccagcctgccctacctggagcagtaccggattgatgccagccagttccgggaactctttgccagcctgacaccctgggcctcctgactgaggaacatgggcagaacatgtttattgcacagagtgggcgctgcgcacaggcgtggctgtacacgtgctctcagctcatcatcctttccagtaactttaaaaaaacatccctcaggtcctgatatatttccttggattcatttcacttggctagaaattacactgtgctcaatgccttaataaatccctgaaagaaataaaaaccactgtgtgcaatgccttgctgtggcccccaaccactgcttaggcctcccaacttctccccaggccaagtatggggccctggctgtgttctggaagttcaagacacttagtcctccacagtgggtggaagagtgcaaggtctgccaggtcagatggagacgcagaacctgctggtgcaagctgggcaggtcctgaccaacctgcatcaggggatgccctgagctccacaggtcttcatgggcaggggttgtgggtcctggtgaaggaagtgcatcctcaggcctgggctgtagcaagctgtctgcccttgggttcaagaaccagactgtggagccaaaggtgaccgcagggggccccagggctggagccacaaggataccctcactttgcatgaggagctgaaactgaccagtgtccagtgttagcccccacatggggctgctcttgcttctactaaaagatacagcagttacccccttatccacaggggatacagtggatatctaaaaccagacccccagtggatgtctaaaaccacagataataacaaaccttatacatactgttttttcctatgcatacatacctgtgattaagtttatgaattaggcaccttaagagattgacaacaataactaataataaaatgtaacggttatactgtaa

SEQ ID NO: 456787 - DNA, 3540 bp, Homo sapiens
  misc_feature (3268)..(3268): n is a, c, g, or t
  misc_feature (3520)..(3520): n is a, c, g, or t
cgccgacggcggcgggcgcttccgcctcgcgggcctcggcccggtgcgagcggctccgcgatgtggctgagcccggaggaggtgctggtggccaatgcgctgtgggtgacggagcgggccaaccccttcttcgtgctgcagcgacgccggggccacggcaggggcggcggccttacgggtcttctcgtgggcaccctggacgtggtgctggactccagtgcccgcgtggccccttaccgcatcctgcaccagacccaggactcccaggtctactggacagtggcgtgtggttcttcccgcaaagagatcacaaaacactgggaatggctggaaaataacttgctccagacactgtccatcttcgacagtgaggaagatatcaccaccttcgtcaagggcaagatacacggaatcatcgcagaagagaacaagaacctgcagccccagggagacgaggaccccgggaagttcaaggaggctgagctgaagatgcggaagcagtttgggatgcctgagggcgagaagctggtgaattactactcctgcagctactggaagggccgcgtgccccggcagggctggctgtacctgacggtcaaccacctgtgcttctactccttcctgctggggaaggaagtgagcctcgtggtgcagtgggtggacataacgcgtctggagaagaacgccaccctgctcttccccgagagcatccgtgtggacacccgcgaccaggagctcttcttctccatgttcctcaacatcggcgagaccttcaagctcatggagcagttggccaacctggccatgcggcagctgctggacagcgagggcttcctggaggacaaggccctgcctaggcccatccggccacacaggaacatctcagccctgaagcgagacctggacgcccgagccaagaatgagtgctaccgagccacgttccggctgcccagggatgagcggctagacggccacacaagctgcaccctgtggacgccgttcaacaagctgcacatccctggccagatgttcatctccaacaactacatctgcttcgccagcaaggaggaggacgcttgccacctcatcatacccctgagggaggtgaccattgtcgaaaaagctgacagctccagcgtgctgcccagccccctgtccatcagcaccaaaagcaaaatgacattcctgtttgccaacctgaaagaccgtgatttcttggtgcagaggatctctgacttcctccagaaaacaccatccaagcagccaggcagtatcgggagcaggaaagccagtgttgtggaccctagcacagagtcttccccagctcctcaggaggggtcggagcagcccgccagcccagcctctcccctcagcagccgccagagcttctgtgcgcaggaggcgccaaccgcatcccagggcctgctgaagctcttccagaaaaactcgcccatggaggaccttggagccaagggggccaaggagaagatgaaagaggagtcatggcacatccacttcttcgagtacgggcgtggcgtgtgcatgtaccgcacagccaagacgcgggcactggtcctgaagggtatccctgagagcctccggggagagctgtggctcctcttctccggggcctggaatgagatggtgactcaccccgggtactatgctgagctggtggagaagtccaccgggaagtacagcctggccacagaggagatcgagcgagacctgcaccgctccatgcccgagcaccctgccttccagaacgagctggggattgctgccctccggcgggtgctgactgcctatgccttccgaaaccccaccatcggctactgccaggcaatgaacatcgtgacctcggtgctcctgctctatggcagtgaggaggaggccttctggctcctggtggccctgtgcgagcgcatgctgcccgactactacaacaccagggtggtgggagccctggtggaccaaggcatcttcgaagagctcacgagagacttcctgccgcagctctcggagaagatgcaggacctgggggtgatctccagcatctcgctgtcctggttcctgaccctcttcctcagcgtcatgcccttcgagagcgccgtggtcatcgtcgactgctttttctatgagggcatcaaggtgatcctgcaggtggccctggccgtcctggacgccaacatggagcagctgctgggctgcagcgacgagggcgaggccatgaccatgctgggcagatacctggataatgtggtcaacaagcagagtgtctctcctcctatcccgcacctccgtgccttgctgagcagcagcgatgacccccctgcagaggtggacatctttgagctcctgaaagtgtcctatgagaaattcagcagcctgagggccgaagacattgagcagatgcggtttaaacagaggctgaaagtgatccagtccttggaggacacggccaagaggagtgtggtccgagctatacctgtggacattggtttctccattgaagagctggaggacctttacatggtgtttaaggccaagcacctggctagccagtactgggggtgcagccgcacaatggccggccgtcgggaccccagcctgccctacctggagcagtaccggattgatgccagccagttccgggaactctttgccagcctgacaccctgggcctgtggctcccacacacctctgctggcagggcgcatgttcaggctcctggacgaaaacaaggactcgctgatcaacttcaaggagttcgtgacagggatgagcgggatgtaccacggggacctgacagagaagctcaaggtgctctacaagctacaccttcccccagctctgagcccagaggaagccgagtcagccctggaggcggcccattatttcacagaggacagctcctcagaagaagcactaccacaggaagagcaagaaggaagtggaagtgaggagagaggagaggagaaggggaccagctctccggactatcggcactaccttcgaatgtgggccaaggagaaagaggctcagaaggagacgattaaggatcttcccaagatgaaccaggagcagttcattgagctgtgcaagacgctttacaacatgttcagtgaagaccccatggagcaggacctgtaccacgccatcgccaccgtggccagcctcctgctccgcatcggagagtctccgtcgaatagttcgacggagactctcaccaaattccagggaccactgggtgagagaggaataaggnccagagcgaggaaaggattttaccaaagcatcaatacaaccagcccaaccatcggtccacacctgggcatttggtgagagtcaaagctgaccatggatccctggggccaacggcaacagcatgggcctcacctcctctgtgatttctttctttgcaccaaagacatcagtctccaacatgtttctgttttgttgtttgattcagcaaaaatctcccagtgacaacatcgcaatagttttttacttctcttangtggctctgggaatgggaga

SEQ ID NO: 456788 - DNA, 1877 bp, Homo sapiens
cgccgacggcggcgggcgcttccgcctcgcgggcctcggcccggtgcgagcggctccgcgatgtggctgagcccggaggaggtgctggtggccaatgcgctgtgggtgacggagcgggccaaccccttcttcgtgctgcagcgacgccggggccacggcaggggcggcggccttacgggtcttctcgtgggcaccctggacgtggtgctggactccagtgcccgcgtggccccttaccgcatcctgcaccagacccaggactcccaggtctactggacagtggcgtgtggttcttcccgcaaagagatcacaaaacactgggaatggctggaaaataacttgctccagacactgtccatcttcgacagtgaggaagatatcaccaccttcgtcaagggcaagatacacggaatcatcgcagaagagaacaagaacctgcagccccagggagacgaggaccccgggaagttcaaggaggctgagctgaagatgcggaagcagtttgggatgcctgagggcgagaagctggtgaattactactcctgcagctactggaagggccgcgtgccccggcagggctggctgtacctgacggtcaaccacctgtgcttctactccttcctgctggggaaggaagtgagcctcgtggtgcagtgggtggacataacgcgtctggagaagaacgccaccctgctcttccccgagagcatccgtgtggacacccgcgaccaggagctcttcttctccatgttcctcaacatcggcgagaccttcaagctcatggagcagttggccaacctggccatgcggcagctgctggacagcgagggcttcctggaggacaaggccctgcctaggcccatccggccacacaggaacatctcagccctgaagcgagacctggacgcccgagccaagaatgagtgctaccgagccacgttccggctgcccagggatgagcggctagacggccacacaagctgcaccctgtggacgccgttcaacaagctgcacatccctggccagatgttcatctccaacaactacatctgcttcgccagcaaggaggaggacgcttgccacctcatcatacccctgagggaggtgaccattgtcgaaaaagctgacagctccagcgtgctgcccagccccctgtccatcagcaccaaaagcaaaatgacattcctgtttgccaacctgaaagaccgtgatttcttggtgcagaggatctctgacttcctccagaaaacaccatccaagcagccaggcagtatcgggagcaggaaagccagtgttgtggaccctagcacagagtcttccccagctcctcaggaggggtcggagcagcccgccagcccagcctctcccctcagcagccgccagagcttctgtgcgcaggaggcgccaaccgcatcccagggcctgctgaagctcttccagaaaaactcgcccatggaggaccttggagccaagggggaagtgcatcctcaggcctgggctgtagcaagctgtctgcccttgggttcaagaaccagactgtggagccaaaggtgaccgcagggggccccagggctggagccacaaggataccctcactttgcatgaggagctgaaactgaccagtgtccagtgttagcccccacatggggctgctcttgcttctactaaaagatacagcagttacccccttatccacaggggatacagtggatatctaaaaccagacccccagtggatgtctaaaaccacagataataacaaaccttatacatactgttttttcctatgcatacatacctgtgattaagtttatgaattaggcaccttaagagattgacaacaataactaataataaaatgtaacggttatactgtaa

SEQ ID NO: 456789 - DNA, 2182 bp, Homo sapiens
cgccgacggcggcgggcgcttccgcctcgcgggcctcggcccggtgcgagcggctccgcgatgtggctgagcccggaggaggtgctggtggccaatgcgctgtgggtgacggagcgggccaaccccttcttcgtgctgcagcgacgccggggccacggcaggggcggcggccttacgggtcttctcgtgggcaccctggacgtggtgctggactccagtgcccgcgtggccccttaccgcatcctgcaccagacccaggactcccaggtctactggacagtggcgtgtggttcttcccgcaaagagatcacaaaacactgggaatggctggaaaataacttgctccagacactgtccatcttcgacagtgaggaagatatcaccaccttcgtcaagggcaagatacacggaatcatcgcagaagagaacaagaacctgcagccccagggagacgaggaccccgggaagttcaaggaggctgagctgaagatgcggaagcagtttgggatgcctgagggcgagaagctggtgaattactactcctgcagctactggaagggccgcgtgccccggcagggctggctgtacctgacggtcaaccacctgtgcttctactccttcctgctggggaaggaagtgagcctcgtggtgcagtgggtggacataacgcgtctggagaagaacgccaccctgctcttccccgagagcatccgtgtggacacccgcgaccaggagctcttcttctccatgttcctcaacatcggcgagaccttcaagctcatggagcagttggccaacctggccatgcggcagctgctggacagcgagggcttcctggaggacaaggccctgcctaggcccatccggccacacaggaacatctcagccctgaagcgagacctggacgcccgagccaagaatgagtgctaccgagccacgttccggctgcccagggatgagcggctagacggccacacaagctgcaccctgtggacgccgttcaacaagctgcacatccctggccagatgttcatctccaacaactacatctgcttcgccagcaaggaggaggacgcttgccacctcatcatacccctgagggaggtgaccattgtcgaaaaagctgacagctccagcgtgctgcccagccccctgtccatcagcaccaaaagcaaaatgacattcctgtttgccaacctgaaagaccgtgatttcttggtgcagaggatctctgacttcctccagaaaacaccatccaagcagccaggcagtatcgggagcaggaaagccagtgttgtggaccctagcacagagccacacacccggtactcctcactcctgctgggcccattgcccatgaggaaccttctctggctgtcctttctgcattgctgctgcactcagagcaaagccacactgtggaggcctgtacacttcggctttgttcccatgaccttccctgccaggcgttcaggctgaagttcttgacggtagaactgcagtatcactattgtaccagcaaacttaacaagaattccttaatatcaccaaatattgtattcacacttccccgtgtgcaagtgtacttttcacggtttgattatttgaactgaggcagacgaaagtcacacatgtcactcttggttgataggtctcttaaatctgtttaatctacgggcttctgctccacctagctctcgtttattcttccacaatatttttttgaaggaatcggtcacttgtgccatagagtctctcatcgtctggttttgctgattgcatccgctgcaggcgtttagcaagctcctgtgtctcttgtttaagttggttgagcggtgagaccgagagccgtgatcacattcaggctcagctgattttggttctggcaggtccgcctgtgggcaggcttgaggtgctgtttattcccaacaagagatgtctggcaaccagccacctctctatgctactgtcagtcattgagaatatgcctggatccagcggccagtggccagcggcatgctcattccattcctcctttcgtctgggagctgaaattctcccaaagagggaagctgaccccaggcacagttcatagaggaaaggtggaatacatgttttactctttcctcttactcaccagttgtcaaaataatgatgagttggttttctagtgtcttccaca

SEQ ID NO: 456790 - DNA, 1848 bp, Homo sapiens
gagctcagtggccgcctcccctgggaccacccagccttccctcttcccagcactcacccctgctgactgtgctcagctggtgcatccctcgtccgtctccctgccaggccttgggctctgcagaggtgcccactgaaagcttgtcctgtgccctctacacctcagaggggttcagagccaagctccaggacccctgctgtcaaaaagtgttccctgggaacaagtgcagggaacagtcctgcaagcaagggactgcttgccctgctttcggacagccttctgagagccagtgaaggccagcagctgggctgaacactacatcatcctcagaaccaccctgcacagccggtgtgctccccgccatcgacaggaaaaacgggcccttagaggcacaggcaacttgctcggggttaggtgcagcgggtggcagagtcagaatgtgaggacagttgggccactcactgcattgtgcccaggagaggacagctgcatgacagtctgccattcacaaagcatgcccagctgcagggcctgagatgcagacacccaaaagagttctttcaccttctcaggtgaccattgtcgaaaaagctgacagctccagcgtgctgcccagccccctgtccatcagcaccaaaagcaaaatgacattcctgtttgccaacctgaaagaccgtgatttcttggtgcagaggatctctgacttcctccagaaaacaccatccaagcagccaggcagtatcgggagcaggaaagccagtgttgtggaccctagcacagaggtgagaagccccttgggagcagcagggtcgagttgggcccaggaagagccagggcatccatcagcctccccgctggagcctgaccccatggttccggctgtgggcctccgcctaggggtggatgtgtcagagctggcaagagacccctagcccagacccacactgcccagcaacatcacagcctctctgcacccccagccacacacccggtactcctcactcctgctgggcccattgcccatgaggaaccttctctggctgtcctttctgcattgctgctgcactcagagcaaagccacactgtggaggcctgtacacttcggctttgttcccatgaccttccctgccaggcgttcaggctgaagttcttgacggtagaactgcagtatcactattgtaccagcaaacttaacaagaattccttaatatcaccaaatattgtattcacacttccccgtgtgcaagtgtacttttcacggtttgattatttgaactgaggcagacgaaagtcacacatgtcactcttggttgataggtctcttaaatctgtttaatctacgggcttctgctccacctagctctcgtttattcttccacaatatttttttgaaggaatcggtcacttgtgccatagagtctctcatcgtctggttttgctgattgcatccgctgcaggcgtttagcaagctcctgtgtctcttgtttaagttggttgagcggtgagaccgagagccgtgatcacattcaggctcagctgattttggttctggcaggtccgcctgtgggcaggcttgaggtgctgtttattcccaacaagagatgtctggcaaccagccacctctctatgctactgtcagtcattgagaatatgcctggatccagcggccagtggccagcggcatgctcattccattcctcctttcgtctgggagctgaaattctcccaaagagggaagctgaccccaggcacagttcatagaggaaaggtggaatacatgttttactctttcctcttactcaccagttgtcaaaataatgatgagttggttttctagtgtcttccaca

SEQ ID NO: 456791 - DNA, 473 bp, Homo sapiens
ctacaacaccagggtggtgggtgagtgtccccgggtgctgcctcgcctgggtctccaggtgcctgctggttccatgagggtggcagcccttcccaggccaagctccaggcttcacgtgggttccctaggagttagagggtagtattacacattcggtggtttataaaagtcccctcagagcctaaattcctatccatctaacttcctgtcaactttttgattatggaaaatttcaaacatcaaaactagagagtatatatcccccatgtaacctgatgctcaactttactgaactcatatccagtgaaatctgttatgaagtggaaatggacttgcaagagtgtttaattaggttcatatttaagcatgttatcctgtccttcccctgctgtctggtgtttggagttaccgctcttggggtccttcagagctgcgtctattcacaatcatcaggatgggacagagtcattgag

SEQ ID NO: 456792 - DNA, 5140 bp, Homo sapiens
cgccgacggcggcgggcgcttccgcctcgcgggcctcggcccggtgcgagcggctccgcgatgtggctgagcccggaggaggtgctggtggccaatgcgctgtgggtgacggagcgggccaaccccttcttcgtgctgcagcgacgccggggccacggcaggggcggcggccttacgggtcttctcgtgggcaccctggacgtggtgctggactccagtgcccgcgtggccccttaccgcatcctgcaccagacccaggactcccaggtctactggacagtggcgtgtggttcttcccgcaaagagatcacaaaacactgggaatggctggaaaataacttgctccagacactgtccatcttcgacagtgaggaagatatcaccaccttcgtcaagggcaagatacacggaatcatcgcagaagagaacaagaacctgcagccccagggagacgaggaccccgggaagttcaaggaggctgagctgaagatgcggaagcagtttgggatgcctgagggcgagaagctggtgaattactactcctgcagctactggaagggccgcgtgccccggcagggctggctgtacctgacggtcaaccacctgtgcttctactccttcctgctggggaaggaagtgagcctcgtggtgcagtgggtggacataacgcgtctggagaagaacgccaccctgctcttccccgagagcatccgtgtggacacccgcgaccaggagctcttcttctccatgttcctcaacatcggcgagaccttcaagctcatggagcagttggccaacctggccatgcggcagctgctggacagcgagggcttcctggaggacaaggccctgcctaggcccatccggccacacaggaacatctcagccctgaagcgagacctggacgcccgagccaagaatgagtgctaccgagccacgttccggctgcccagggatgagcggctagacggccacacaagctgcaccctgtggacgccgttcaacaagctgcacatccctggccagatgttcatctccaacaactacatctgcttcgccagcaaggaggaggacgcttgccacctcatcatacccctgagggaggtgaccattgtcgaaaaagctgacagctccagcgtgctgcccagccccctgtccatcagcaccaaaagcaaaatgacattcctgtttgccaacctgaaagaccgtgatttcttggtgcagaggatctctgacttcctccagaaaacaccatccaagcagccaggcagtatcgggagcaggaaagccagtgttgtggaccctagcacagagtcttccccagctcctcaggaggggtcggagcagcccgccagcccagcctctcccctcagcagccgccagagcttctgtgcgcaggaggcgccaaccgcatcccagggcctgctgaagctcttccagaaaaactcgcccatggaggaccttggagccaagggggccaaggagaagatgaaagaggagtcatggcacatccacttcttcgagtacgggcgtggcgtgtgcatgtaccgcacagccaagacgcgggcactggtcctgaagggtatccctgagagcctccggggagagctgtggctcctcttctccggggcctggaatgagatggtgactcaccccgggtactatgctgagctggtggagaagtccaccgggaagtacagcctggccacagaggagatcgagcgagacctgcaccgctccatgcccgagcaccctgccttccagaacgagctggggattgctgccctccggcgggtgctgactgcctatgccttccgaaaccccaccatcggctactgccaggcaatgaacatcgtgacctcggtgctcctgctctatggcagtgaggaggaggccttctggctcctggtggccctgtgcgagcgcatgctgcccgactactacaacaccagggtggtgggagccctggtggaccaaggcatcttcgaagagctcacgagagacttcctgccgcagctctcggagaagatgcaggacctgggggtgatctccagcatctcgctgtcctggttcctgaccctcttcctcagcgtcatgcccttcgagagcgccgtggtcatcgtcgactgctttttctatgagggcatcaaggtgatcctgcaggtggccctggccgtcctggacgccaacatggagcagctgctgggctgcagcgacgagggcgaggccatgaccatgctgggcagatacctggataatgtggtcaacaagcagagtgtctctcctcctatcccgcacctccgtgccttgctgagcagcagcgatgacccccctgcagaggtggacatctttgagctcctgaaagtgtcctatgagaaattcagcagcctgagggccgaagacattgagcagatgcggtttaaacagaggctgaaagtgatccagtccttggaggacacggccaagaggagtgtggtccgagctatacctgtggacattggtttctccattgaagagctggaggacctttacatggtgtttaaggccaagcacctggctagccagtactgggggtgcagccgcacaatggccggccgtcgggaccccagcctgccctacctggagcagtaccggattgatgccagccagttccgggaactctttgccagcctgacaccctgggcctgtggctcccacacacctctgctggcagggcgcatgttcaggctcctggacgaaaacaaggactcgctgatcaacttcaaggagttcgtgacagggatgagcgggatgtaccacggggacctgacagagaagctcaaggtgctctacaagctacaccttcccccagctctgagcccagaggaagccgagtcagccctggaggcggcccattatttcacagaggacagctcctcagaagaagcactaccacaggaagagcaagaaggaagtggaagtgaggagagaggagaggagaaggggaccagctctccggactatcggcactaccttcgaatgtgggccaaggagaaagaggctcagaaggagacgattaaggatcttcccaagatgaaccaggagcagttcattgagctgtgcaagacgctttacaacatgttcagtgaagaccccatggagcaggacctgtaccacgccatcgccaccgtggccagcctcctgctccgcatcggagaggtggggaagaagttctcagcccgcacaggcaggaagcccagggactgtgccactgaggaggacgagccaccagcacccgaactgcatcaggacgcagccagggagcttcagcccccagctgcaggagacccccaagccaaagcaggcggagacacacacctcggaacagccccacaggagagccaggtggtggtggaggggggcagcggcgagggacagggctcaccctcccagctgctgtctgacgatgaaaccaaagacgacatgtccatgtcctcctactcggtggtcagcacgggctccctgcaatgtgaagaccttgcagacgacacggtgctggtgggcggggaggcctgcagccccacagcgcgcatcggcggcaccgtcgacaccgactggtgcatctcctttgagcagatcctggcctccatcctgacggagtccgtgctggtgaacttctttgagaagagagtggacattggactcaagatcaaggaccaaaagaaagtggagagacagttcagcaccgccagtgaccatgagcagcctggagtttccggctgatgcctgcagctgtgaggcctggcccaaggtgtcatcagtggggctggcctcatctcctcctgcctttcctcccttatcagtttctctttaaaggtgtgcccctcctgctctcccaggagcagtgagttgtgagtggaaagaaggctggtgcagacccagctgccttagacagattccctgggcctgcatctcctggcgccggctgcttctgggcccaggaagaggctgtggctcccaccttccttacacctggtgggagcccgcctcgcaccagctgcacctgcctagcattagaggctctcagatctgcccttgcttgcctcatacctctgtgctccacactgcggccaggccagctgagtccctccatccgtggatgctttcctgcagctatgtggtatgggggtcattcctgcctcttgggcaccaggttggggggcatgtgcttgttgggcaccaaagtgatggaaccctcaggtgctctccgggagcctgaacctcctgactgaggaacatgggcagaacatgtttattgcacagagtgggcgctgcgcacaggcgtggctgtacacgtgctctcagctcatcatcctttccagtaactttaaaaaaacatccctcaggtcctgatatatttccttggattcatttcacttggctagaaattacactgtgctcaatgccttaataaatccctgaaagaaataaaaaccactgtgtgcaatgccttgctgtggcccccaaccactgcttaggcctcccaacttctccccaggccaagtatggggccctggctgtgttctggaagttcaagacacttagtcctccacagtgggtggaagagtgcaaggtctgccaggtcagatggagacgcagaacctgctggtgcaagctgggcaggtcctgaccaacctgcatcaggggatgccctgagctccacaggtcttcatgggcaggggttgtgggtcctggtgaaggaagtgcatcctcaggcctgggctgtagcaagctgtctgcccttgggttcaagaaccagactgtggagccaaaggtgaccgcagggggccccagggctggagccacaaggataccctcactttgcatgaggagctgaaactgaccagtgtccagtgttagcccccacatggggctgctcttgcttctactaaaagatacagcagttacccccttatccacaggggatacagtggatatctaaaaccagacccccagtggatgtctaaaaccacagataataacaaaccttatacatactgttttttcctatgcatacatacctgtgattaagtttatgaattaggcaccttaagagattgacaacaataactaataataaaatgtaacggttatactgtaa

SEQ ID NO: 456793 - DNA, 4395 bp, Homo sapiens
cgccgacggcggcgggcgcttccgcctcgcgggcctcggcccggtgcgagcggctccgcgatgtggctgagcccggaggaggtgctggtggccaatgcgctgtgggtgacggagcgggccaaccccttcttcgtgctgcagcgacgccggggccacggcaggggcggcggccttacgggtcttctcgtgggcaccctggacgtggtgctggactccagtgcccgcgtggccccttaccgcatcctgcaccagacccaggactcccaggtctactggacagtggcgtgtggttcttcccgcaaagagatcacaaaacactgggaatggctggaaaataacttgctccagacactgtccatcttcgacagtgaggaagatatcaccaccttcgtcaagggcaagatacacggaatcatcgcagaagagaacaagaacctgcagccccagggagacgaggaccccgggaagttcaaggaggctgagctgaagatgcggaagcagtttgggatgcctgagggcgagaagctggtgaattactactcctgcagctactggaagggccgcgtgccccggcagggctggctgtacctgacggtcaaccacctgtgcttctactccttcctgctggggaaggaagtgagcctcgtggtgcagtgggtggacataacgcgtctggagaagaacgccaccctgctcttccccgagagcatccgtgtggacacccgcgaccaggagctcttcttctccatgttcctcaacatcggcgagaccttcaagctcatggagcagttggccaacctggccatgcggcagctgctggacagcgagggcttcctggaggacaaggccctgcctaggcccatccggccacacaggaacatctcagccctgaagcgagacctggacgcccgagccaagaatgagtgctaccgagccacgttccggctgcccagggatgagcggctagacggccacacaagctgcaccctgtggacgccgttcaacaagctgcacatccctggccagatgttcatctccaacaactacatctgcttcgccagcaaggaggaggacgcttgccacctcatcatacccctgagggaggtgaccattgtcgaaaaagctgacagctccagcgtgctgcccagccccctgtccatcagcaccaaaagcaaaatgacattcctgtttgccaacctgaaagaccgtgatttcttggtgcagaggatctctgacttcctccagaaaacaccatccaagcagccaggcagtatcgggagcaggaaagccagtgttgtggaccctagcacagagtcttccccagctcctcaggaggggtcggagcagcccgccagcccagcctctcccctcagcagccgccagagcttctgtgcgcaggaggcgccaaccgcatcccagggcctgctgaagctcttccagaaaaactcgcccatggaggaccttggagccaagggggccaaggagaagatgaaagaggagtcatggcacatccacttcttcgagtacgggcgtggcgtgtgcatgtaccgcacagccaagacgcgggcactggtcctgaagggtatccctgagagcctccggggagagctgtggctcctcttctccggggcctggaatgagatggtgactcaccccgggtactatgctgagctggtggagaagtccaccgggaagtacagcctggccacagaggagatcgagcgagacctgcaccgctccatgcccgagcaccctgccttccagaacgagctggggattgctgccctccggcgggtgctgactgcctatgccttccgaaaccccaccatcggctactgccaggcaatgaacatcgtgacctcggtgctcctgctctatggcagtgaggaggaggccttctggctcctggtggccctgtgcgagcgcatgctgcccgactatgtggctcccacacacctctgctggcagggcgcatgttcaggctcctggacgaaaacaaggactcgctgatcaacttcaaggagttcgtgacagggatgagcgggatgtaccacggggacctgacagagaagctcaaggtgctctacaagctacaccttcccccagctctgagcccagaggaagccgagtcagccctggaggcggcccattatttcacagaggacagctcctcagaagaagcactaccacaggaagagcaagaaggaagtggaagtgaggagagaggagaggagaaggggaccagctctccggactatcggcactaccttcgaatgtgggccaaggagaaagaggctcagaaggagacgattaaggatcttcccaagatgaaccaggagcagttcattgagctgtgcaagacgctttacaacatgttcagtgaagaccccatggagcaggacctgtaccacgccatcgccaccgtggccagcctcctgctccgcatcggagaggtggggaagaagttctcagcccgcacaggcaggaagcccagggactgtgccactgaggaggacgagccaccagcacccgaactgcatcaggacgcagccagggagcttcagcccccagctgcaggagacccccaagccaaagcaggcggagacacacacctcggaacagccccacaggagagccaggtggtggtggaggggggcagcggcgagggacagggctcaccctcccagctgctgtctgacgatgaaaccaaagacgacatgtccatgtcctcctactcggtggtcagcacgggctccctgcaatgtgaagaccttgcagacgacacggtgctggtgggcggggaggcctgcagccccacagcgcgcatcggcggcaccgtcgacaccgactggtgcatctcctttgagcagatcctggcctccatcctgacggagtccgtgctggtgaacttctttgagaagagagtggacattggactcaagatcaaggaccaaaagaaagtggagagacagttcagcaccgccagtgaccatgagcagcctggagtttccggctgatgcctgcagctgtgaggcctggcccaaggtgtcatcagtggggctggcctcatctcctcctgcctttcctcccttatcagtttctctttaaaggtgtgcccctcctgctctcccaggagcagtgagttgtgagtggaaagaaggctggtgcagacccagctgccttagacagattccctgggcctgcatctcctggcgccggctgcttctgggcccaggaagaggctgtggctcccaccttccttacacctggtgggagcccgcctcgcaccagctgcacctgcctagcattagaggctctcagatctgcccttgcttgcctcatacctctgtgctccacactgcggccaggccagctgagtccctccatccgtggatgctttcctgcagctatgtggtatgggggtcattcctgcctcttgggcaccaggttggggggcatgtgcttgttgggcaccaaagtgatggaaccctcaggtgctctccgggagcctgaacctcctgactgaggaacatgggcagaacatgtttattgcacagagtgggcgctgcgcacaggcgtggctgtacacgtgctctcagctcatcatcctttccagtaactttaaaaaaacatccctcaggtcctgatatatttccttggattcatttcacttggctagaaattacactgtgctcaatgccttaataaatccctgaaagaaataaaaaccactgtgtgcaatgccttgctgtggcccccaaccactgcttaggcctcccaacttctccccaggccaagtatggggccctggctgtgttctggaagttcaagacacttagtcctccacagtgggtggaagagtgcaaggtctgccaggtcagatggagacgcagaacctgctggtgcaagctgggcaggtcctgaccaacctgcatcaggggatgccctgagctccacaggtcttcatgggcaggggttgtgggtcctggtgaaggaagtgcatcctcaggcctgggctgtagcaagctgtctgcccttgggttcaagaaccagactgtggagccaaaggtgaccgcagggggccccagggctggagccacaaggataccctcactttgcatgaggagctgaaactgaccagtgtccagtgttagcccccacatggggctgctcttgcttctactaaaagatacagcagttacccccttatccacaggggatacagtggatatctaaaaccagacccccagtggatgtctaaaaccacagataataacaaaccttatacatactgttttttcctatgcatacatacctgtgattaagtttatgaattaggcaccttaagagattgacaacaataactaataataaaatgtaacggttatactgtaa

SEQ ID NO: 456794 - DNA, 2459 bp, Homo sapiens
  misc_feature (26)..(26): n is a, c, g, or t
  misc_feature (30)..(30): n is a, c, g, or t
  misc_feature (45)..(45): n is a, c, g, or t
gggggggagaacgaactataggctanggtngaggccgggtgttgngctcctggacgaaaacaaggactcgctgatcaacttcaaggagttcgtgacagggatgagcgggatgtaccacggggacctgacagagaagctcaaggtgctctacaagctacaccttcccccagctctgagcccagaggaagccgagtcagccctggaggcggcccattatttcacagaggacagctcctcagaagaagcactaccacaggaagagcaagaaggaagtggaagtgaggagagaggagaggagaaggggaccagctctccggactatcggcactaccttcgaatgtgggccaaggagaaagaggctcagaaggagacgattaaggatcttcccaagatgaaccaggagcagttcattgagctgtgcaagacgctttacaacatgttcagtgaagaccccatggagcaggacctgtaccacgccatcgccaccgtggccagcctcctgctccgcatcggagaggtggggaagaagttctcagcccgcacaggcaggaagcccagggactgtgccactgaggaggacgagccaccagcacccgaactgcatcaggacgcagccagggagcttcagcccccagctgcaggagacccccaagccaaagcaggcggagacacacacctcggaacagccccacaggagagccaggtggtggtggaggggggcagcggcgagggacagggctcaccctcccagctgctgtctgacgatgaaaccaaagacgacatgtccatgtcctcctactcggtggtcagcacgggctccctgcaatgtgaagaccttgcagacgacacggtgctggtgggcggggaggcctgcagccccacagcgcgcatcggcggcaccgtcgacaccgactggtgcatctcctttgagcagatcctggcctccatcctgacggagtccgtgctggtgaacttctttgagaagagagtggacattggactcaagatcaaggaccaaaagaaagtggagagacagttcagcaccgccagtgaccatgagcagcctggagtttccggctgatgcctgcagctgtgaggcctggcccaaggtgtcatcagtggggctggcctcatctcctcctgcctttcctcccttatcagtttctctttaaaggtgtgcccctcctgctctcccaggagcagtgagttgtgagtggaaagaaggctggtgcagacccagctgccttagacagattccctgggcctgcatctcctggcgccggctgcttctgggcccaggaagaggctgtggctcccaccttccttacacctggtgggagcccgcctcgcaccagctgcacctgcctagcattagaggctctcagatctgcccttgcttgcctcatacctctgtgctccacactgcggccaggccagctgagtccctccatccgtggatgctttcctgcagctatgtggtatgggggtcattcctgcctcttgggcaccaggttggggggcatgtgcttgttgggcaccaaagtgatggaaccctcaggtgctctccgggagcctgaacctcctgactgaggaacatgggcagaacatgtttattgcacagagtgggcgctgcgcacaggcgtggctgtacacgtgctctcagctcatcatcctttccagtaactttaaaaaaacatccctcaggtcctgatatatttccttggattcatttcacttggctagaaattacactgtgctcaatgccttaataaatccctgaaagaaataaaaaccactgtgtgcaatgccttgctgtggcccccaaccactgcttaggcctcccaacttctccccaggccaagtatggggccctggctgtgttctggaagttcaagacacttagtcctccacagtgggtggaagagtgcaaggtctgccaggtcagatggagacgcagaacctgctggtgcaagctgggcaggtcctgaccaacctgcatcaggggatgccctgagctccacaggtcttcatgggcaggggttgtgggtcctggtgaaggaagtgcatcctcaggcctgggctgtagcaagctgtctgcccttgggttcaagaaccagactgtggagccaaaggtgaccgcagggggccccagggctggagccacaaggataccctcactttgcatgaggagctgaaactgaccagtgtccagtgttagcccccacatggggctgctcttgcttctactaaaagatacagcagttacccccttatccacaggggatacagtggatatctaaaaccagacccccagtggatgtctaaaaccacagataataacaaaccttatacatactgttttttcctatgcatacatacctgtgattaagtttatgaattaggcaccttaagagattgacaacaataactaataataaaatgtaacggttatactgtaa

SEQ ID NO: 456795 - DNA, 2640 bp, Homo sapiens
ggcacagcaggcgcgggtggaaggggtcattagggttcccctgagttctagcaggaacattccccagagttctagcaggaactatagaattcgttagtcctcagactggtctatagccctcatcattgttcacgtcaaaaccagcatgttgagacttgtattcatttgaaaaaaggaattgagggtttggcggcctttattttaacctgaccaagtgagggaatgctcaggcccttttgctctggtgccatagggcggggctgggcgggccaggcaggaggtgtggcatgggagacctgctccccagggcctggcctggggctggctgtacagaaacacagactacatctcaaggaccccaggagcttgcagtcccaacagcagaatgttattcatgttctttttatttttgcgtttgtccagaagcactaccacaggaagagcaagaaggaagtggaagtgaggagagaggagaggagaaggggaccagctctccggactatcggcactaccttcgaatgtgggccaaggagaaagaggctcagaaggagacgattaaggatcttcccaagatgaaccaggagcagttcattgagctgtgcaagacgctttacaacatgttcagtgaagaccccatggagcaggacctgtaccacgccatcgccaccgtggccagcctcctgctccgcatcggagaggtggggaagaagttctcagcccgcacaggcaggaagcccagggactgtgccactgaggaggacgagccaccagcacccgaactgcatcaggacgcagccagggagcttcagcccccagctgcaggagacccccaagccaaagcaggcggagacacacacctcggaacagccccacaggagagccaggtggtggtggaggggggcagcggcgagggacagggctcaccctcccagctgctgtctgacgatgaaaccaaagacgacatgtccatgtcctcctactcggtggtcagcacgggctccctgcaatgtgaagaccttgcagacgacacggtgctggtgggcggggaggcctgcagccccacagcgcgcatcggcggcaccgtcgacaccgactggtgcatctcctttgagcagatcctggcctccatcctgacggagtccgtgctggtgaacttctttgagaagagagtggacattggactcaagatcaaggaccaaaagaaagtggagagacagttcagcaccgccagtgaccatgagcagcctggagtttccggctgatgcctgcagctgtgaggcctggcccaaggtgtcatcagtggggctggcctcatctcctcctgcctttcctcccttatcagtttctctttaaaggtgtgcccctcctgctctcccaggagcagtgagttgtgagtggaaagaaggctggtgcagacccagctgccttagacagattccctgggcctgcatctcctggcgccggctgcttctgggcccaggaagaggctgtggctcccaccttccttacacctggtgggagcccgcctcgcaccagctgcacctgcctagcattagaggctctcagatctgcccttgcttgcctcatacctctgtgctccacactgcggccaggccagctgagtccctccatccgtggatgctttcctgcagctatgtggtatgggggtcattcctgcctcttgggcaccaggttggggggcatgtgcttgttgggcaccaaagtgatggaaccctcaggtgctctccgggagcctgaacctcctgactgaggaacatgggcagaacatgtttattgcacagagtgggcgctgcgcacaggcgtggctgtacacgtgctctcagctcatcatcctttccagtaactttaaaaaaacatccctcaggtcctgatatatttccttggattcatttcacttggctagaaattacactgtgctcaatgccttaataaatccctgaaagaaataaaaaccactgtgtgcaatgccttgctgtggcccccaaccactgcttaggcctcccaacttctccccaggccaagtatggggccctggctgtgttctggaagttcaagacacttagtcctccacagtgggtggaagagtgcaaggtctgccaggtcagatggagacgcagaacctgctggtgcaagctgggcaggtcctgaccaacctgcatcaggggatgccctgagctccacaggtcttcatgggcaggggttgtgggtcctggtgaaggaagtgcatcctcaggcctgggctgtagcaagctgtctgcccttgggttcaagaaccagactgtggagccaaaggtgaccgcagggggccccagggctggagccacaaggataccctcactttgcatgaggagctgaaactgaccagtgtccagtgttagcccccacatggggctgctcttgcttctactaaaagatacagcagttacccccttatccacaggggatacagtggatatctaaaaccagacccccagtggatgtctaaaaccacagataataacaaaccttatacatactgttttttcctatgcatacatacctgtgattaagtttatgaattaggcaccttaagagattgacaacaataactaataataaaatgtaacggttatactgtaa

SEQ ID NO: 456796 - DNA, 5146 bp, Homo sapiens
cgccgacggcggcgggcgcttccgcctcgcgggcctcggcccggtgcgagcggctccgcgatgtggctgagcccggaggaggtgctggtggccaatgcgctgtgggtgacggagcgggccaaccccttcttcgtgctgcagcgacgccggggccacggcaggggcggcggccttacgggtcttctcgtgggcaccctggacgtggtgctggactccagtgcccgcgtggccccttaccgcatcctgcaccagacccaggactcccaggtctactggacagtggcgtgtggttcttcccgcaaagagatcacaaaacactgggaatggctggaaaataacttgctccagacactgtccatcttcgacagtgaggaagatatcaccaccttcgtcaagggcaagatacacggaatcatcgcagaagagaacaagaacctgcagccccagggagacgaggaccccgggaagttcaaggaggctgagctgaagatgcggaagcagtttgggatgcctgagggcgagaagctggtgaattactactcctgcagctactggaagggccgcgtgccccggcagggctggctgtacctgacggtcaaccacctgtgcttctactccttcctgctggggaaggaagtgagcctcgtggtgcagtgggtggacataacgcgtctggagaagaacgccaccctgctcttccccgagagcatccgtgtggacacccgcgaccaggagctcttcttctccatgttcctcaacatcggcgagaccttcaagctcatggagcagttggccaacctggccatgcggcagctgctggacagcgagggcttcctggaggacaaggccctgcctaggcccatccggccacacaggaacatctcagccctgaagcgagacctggacgcccgagccaagaatgagtgctaccgagccacgttccggctgcccagggatgagcggctagacggccacacaagctgcaccctgtggacgccgttcaacaagctgcacatccctggccagatgttcatctccaacaactacatctgcttcgccagcaaggaggaggacgcttgccacctcatcatacccctgagggaggtgaccattgtcgaaaaagctgacagctccagcgtgctgcccagccccctgtccatcagcaccaaaagcaaaatgacattcctgtttgccaacctgaaagaccgtgatttcttggtgcagaggatctctgacttcctccagaaaacaccatccaagcagccaggcagtatcgggagcaggaaagccagtgttgtggaccctagcacagagtcttccccagctcctcaggaggggtcggagcagcccgccagcccagcctctcccctcagcagccgccagagcttctgtgcgcaggaggcgccaaccgcatcccagggcctgctgaagctcttccagaaaaactcgcccatggaggaccttggagccaagggggccaaggagaagatgaaagaggagtcatggcacatccacttcttcgagtacgggcgtggcgtgtgcatgtaccgcacagccaagacgcgggcactggtcctgaagggtatccctgagagcctccggggagagctgtggctcctcttctccggggcctggaatgagatggtgactcaccccgggtactatgctgagctggtggagaagtccaccgggaagtacagcctggccacagaggagatcgagcgagacctgcaccgctccatgcccgagcaccctgccttccagaacgagctggggattgctgccctccggcgggtgctgactgcctatgccttccgaaaccccaccatcggctactgccaggcaatgaacatcgtgacctcggtgctcctgctctatggcagtgaggaggaggccttctggctcctggtggccctgtgcgagcgcatgctgcccgactactacaacaccagggtggtgggagccctggtggaccaaggcatcttcgaagagctcacgagagacttcctgccgcagctctcggagaagatgcaggacctgggggtgatctccagcatctcgctgtcctggttcctgaccctcttcctcagcgtcatgcccttcgagagcgccgtggtcatcgtcgactgctttttctatgagggcatcaaggtgatcctgcaggtggccctggccgtcctggacgccaacatggagcagctgctgggctgcagcgacgagggcgaggccatgaccatgctgggcagatacctggataatgtggtcaacaagcagagtgtctctcctcctatcccgcacctccgtgccttgctgagcagcagcgatgacccccctgcagaggtggacatctttgagctcctgaaagtgtcctatgagaaattcagcagcctgagggccgaagacattgagcagatgcggtttaaacagaggctgaaagtgatccagtccttggaggacacggccaagaggagtgtggtccgagctatacctgtggacattggtttctccattgaagagctggaggacctttacatggtgtttaaggccaagcacctggctagccagtactgggggtgcagccgcacaatggccggccgtcgggaccccagcctgccctacctggagcagtaccggattgatgccagccagttccgggaactctttgccagcctgacaccctgggcctgtggctcccacacacctctgctggcagggcgcatgttcaggctcctggacgaaaacaaggactcgctgatcaacttcaaggagttcgtgacagggatgagcgggatgtaccacggggacctgacagagaagctcaaggtgctctacaagctacaccttcccccagctctgagcccagaggaagccgagtcagccctggaggcggcccattatttcacagaggacagctcctcagaagcatctcctctggcctcagatctggatcttttcctgccctgggaggctcaagaagcactaccacaggaagagcaagaaggaagtggaagtgaggagagaggagaggagaaggggaccagctctccggactatcggcactaccttcgaatgtgggccaaggagaaagaggctcagaaggagacgattaaggatcttcccaagatgaaccaggagcagttcattgagctgtgcaagacgctttacaacatgttcagtgaagaccccatggagcaggacctgtaccacgccatcgccaccgtggccagcctcctgctccgcatcggagaggtggggaagaagttctcagcccgcacaggcaggaagcccagggactgtgccactgaggaggacgagccaccagcacccgaactgcatcaggacgcagccagggagcttcagcccccagctgcaggagacccccaagccaaagcaggcggagacacacacctcggaacagccccacaggagagccaggtggtggtggaggggggcagcggcgagggacagggctcaccctcccagctgctgtctgacgatgaaaccaaagacgacatgtccatgtcctcctactcggtggtcagcacgggctccctgcaatgtgaagaccttgcagacgacacggtgctggtgggcggggaggcctgcagccccacagcgcgcatcggcggcaccgtcgacaccgactggtgcatctcctttgagcagatcctggcctccatcctgacggagtccgtgctggtgaacttctttgagaagagagtggacattggactcaagatcaaggaccaaaagaaagtggagagacagttcagcaccgccagtgaccatgagcagcctggagtttccggctgatgcctgcagctgtgaggcctggcccaaggtgtcatcagtggggctggcctcatctcctcctgcctttcctcccttatcagtttctctttaaaggtgtgcccctcctgctctcccaggagcagtgagttgtgagtggaaagaaggctggtgcagacccagctgccttagacagattccctgggcctgcatctcctggcgccggctgcttctgggcccaggaagaggctgtggctcccaccttccttacacctggtgggagcccgcctcgcaccagctgcacctgcctagcattagaggctctcagatctgcccttgcttgcctcatacctctgtgctccacactgcggccaggccagctgagtccctccatccgtggatgctttcctgcagctatgtggtatgggggtcattcctgcctcttgggcaccaggttggggggcatgtgcttgttgggcaccaaagtgatggaaccctcaggtgctctccgggagcctgaacctcctgactgaggaacatgggcagaacatgtttattgcacagagtgggcgctgcgcacaggcgtggctgtacacgtgctctcagctcatcatcctttccagtaactttaaaaaaacatccctcaggtcctgatatatttccttggattcatttcacttggctagaaattacactgtgctcaatgccttaataaatccctgaaagaaataaaaaccactgtgtgcaatgccttgctgtggcccccaaccactgcttaggcctcccaacttctccccaggccaagtatggggccctggctgtgttctggaagttcaagacacttagtcctccacagtgggtggaagagtgcaaggtctgccaggtcagatggagacgcagaacctgctggtgcaagctgggcaggtcctgaccaacctgcatcaggggatgccctgagctccacaggtcttcatgggcaggggttgtgggtcctggtgaaggaagtgcatcctcaggcctgggctgtagcaagctgtctgcccttgggttcaagaaccagactgtggagccaaaggtgaccgcagggggccccagggctggagccacaaggataccctcactttgcatgaggagctgaaactgaccagtgtccagtgttagcccccacatggggctgctcttgcttctactaaaagatacagcagttacccccttatccacaggggatacagtggatatctaaaaccagacccccagtggatgtctaaaaccacaggtatgtatgcacaggaaaaaacagtatgtataaggtttgttattatctgtggttttagacatccactgggggtcgtcgacg

SEQ ID NO: 456797 - DNA, 2209 bp, Homo sapiens
gtctcacatgacaaagattaatctctttcctcctaacctgcagaggagaaggggaccagctctccggactatcggcactaccttcgaatgtgggccaaggagaaagaggctcagaaggagacgattaaggatcttcccaagatgaaccaggagcagttcattgagctgtgcaagacgctttacaacatgttcagtgaagaccccatggagcaggacctgtaccacgccatcgccaccgtggccagcctcctgctccgcatcggagaggtggggaagaagttctcagcccgcacaggcaggaagcccagggactgtgccactgaggaggacgagccaccagcacccgaactgcatcaggacgcagccagggagcttcagcccccagctgcaggagacccccaagccaaagcaggcggagacacacacctcggaacagccccacaggagagccaggtggtggtggaggggggcagcggcgagggacagggctcaccctcccagctgctgtctgacgatgaaaccaaagacgacatgtccatgtcctcctactcggtggtcagcacgggctccctgcaatgtgaagaccttgcagacgacacggtgctggtgggcggggaggcctgcagccccacagcgcgcatcggcggcaccgtcgacaccgactggtgcatctcctttgagcagatcctggcctccatcctgacggagtccgtgctggtgaacttctttgagaagagagtggacattggactcaagatcaaggaccaaaagaaagtggagagacagttcagcaccgccagtgaccatgagcagcctggagtttccggctgatgcctgcagctgtgaggcctggcccaaggtgtcatcagtggggctggcctcatctcctcctgcctttcctcccttatcagtttctctttaaaggtgtgcccctcctgctctcccaggagcagtgagttgtgagtggaaagaaggctggtgcagacccagctgccttagacagattccctgggcctgcatctcctggcgccggctgcttctgggcccaggaagaggctgtggctcccaccttccttacacctggtgggagcccgcctcgcaccagctgcacctgcctagcattagaggctctcagatctgcccttgcttgcctcatacctctgtgctccacactgcggccaggccagctgagtccctccatccgtggatgctttcctgcagctatgtggtatgggggtcattcctgcctcttgggcaccaggttggggggcatgtgcttgttgggcaccaaagtgatggaaccctcaggtgctctccgggagcctgaacctcctgactgaggaacatgggcagaacatgtttattgcacagagtgggcgctgcgcacaggcgtggctgtacacgtgctctcagctcatcatcctttccagtaactttaaaaaaacatccctcaggtcctgatatatttccttggattcatttcacttggctagaaattacactgtgctcaatgccttaataaatccctgaaagaaataaaaaccactgtgtgcaatgccttgctgtggcccccaaccactgcttaggcctcccaacttctccccaggccaagtatggggccctggctgtgttctggaagttcaagacacttagtcctccacagtgggtggaagagtgcaaggtctgccaggtcagatggagacgcagaacctgctggtgcaagctgggcaggtcctgaccaacctgcatcaggggatgccctgagctccacaggtcttcatgggcaggggttgtgggtcctggtgaaggaagtgcatcctcaggcctgggctgtagcaagctgtctgcccttgggttcaagaaccagactgtggagccaaaggtgaccgcagggggccccagggctggagccacaaggataccctcactttgcatgaggagctgaaactgaccagtgtccagtgttagcccccacatggggctgctcttgcttctactaaaagatacagcagttacccccttatccacaggggatacagtggatatctaaaaccagacccccagtggatgtctaaaaccacagataataacaaaccttatacatactgttttttcctatgcatacatacctgtgattaagtttatgaattaggcaccttaagagattgacaacaataactaataataaaatgtaacggttatactgtaa

SEQ ID NO: 456798 - DNA, 5044 bp, Homo sapiens
cgccgacggcggcgggcgcttccgcctcgcgggcctcggcccggtgcgagcggctccgcgatgtggctgagcccggaggaggtgctggtggccaatgcgctgtgggtgacggagcgggccaaccccttcttcgtgctgcagcgacgccggggccacggcaggggcggcggccttacgggtcttctcgtgggcaccctggacgtggtgctggactccagtgcccgcgtggccccttaccgcatcctgcaccagacccaggactcccaggtctactggacagtggcgtgtggttcttcccgcaaagagatcacaaaacactgggaatggctggaaaataacttgctccagacactgtccatcttcgacagtgaggaagatatcaccaccttcgtcaagggcaagatacacggaatcatcgcagaagagaacaagaacctgcagccccagggagacgaggaccccgggaagttcaaggaggctgagctgaagatgcggaagcagtttgggatgcctgagggcgagaagctggtgaattactactcctgcagctactggaagggccgcgtgccccggcagggctggctgtacctgacggtcaaccacctgtgcttctactccttcctgctggggaaggaagtgagcctcgtggtgcagtgggtggacataacgcgtctggagaagaacgccaccctgctcttccccgagagcatccgtgtggacacccgcgaccaggagctcttcttctccatgttcctcaacatcggcgagaccttcaagctcatggagcagttggccaacctggccatgcggcagctgctggacagcgagggcttcctggaggacaaggccctgcctaggcccatccggccacacaggaacatctcagccctgaagcgagacctggacgcccgagccaagaatgagtgctaccgagccacgttccggctgcccagggatgagcggctagacggccacacaagctgcaccctgtggacgccgttcaacaagctgcacatccctggccagatgttcatctccaacaactacatctgcttcgccagcaaggaggaggacgcttgccacctcatcatacccctgagggaggtgaccattgtcgaaaaagctgacagctccagcgtgctgcccagccccctgtccatcagcaccaaaagcaaaatgacattcctgtttgccaacctgaaagaccgtgatttcttggtgcagaggatctctgacttcctccagaaaacaccatccaagcagccaggcagtatcgggagcaggaaagccagtgttgtggaccctagcacagagtcttccccagctcctcaggaggggtcggagcagcccgccagcccagcctctcccctcagcagccgccagagcttctgtgcgcaggaggcgccaaccgcatcccagggcctgctgaagctcttccagaaaaactcgcccatggaggaccttggagccaagggggccaaggagaagatgaaagaggagtcatggcacatccacttcttcgagtacgggcgtggcgtgtgcatgtaccgcacagccaagacgcgggcactggtcctgaagggtatccctgagagcctccggggagagctgtggctcctcttctccggggcctggaatgagatggtgactcaccccgggtactatgctgagctggtggagaagtccaccgggaagtacagcctggccacagaggagatcgagcgagacctgcaccgctccatgcccgagcaccctgccttccagaacgagctggggattgctgccctccggcgggtgctgactgcctatgccttccgaaaccccaccatcggctactgccaggcaatgaacatcgtgacctcggtgctcctgctctatggcagtgaggaggaggccttctggctcctggtggccctgtgcgagcgcatgctgcccgactactacaacaccagggtggtgggagccctggtggaccaaggcatcttcgaagagctcacgagagacttcctgccgcagctctcggagaagatgcaggacctgggggtgatctccagcatctcgctgtcctggttcctgaccctcttcctcagcgtcatgcccttcgagagcgccgtggtcatcgtcgactgctttttctatgagggcatcaaggtgatcctgcaggtggccctggccgtcctggacgccaacatggagcagctgctgggctgcagcgacgagggcgaggccatgaccatgctgggcagatacctggataatgtggtcaacaagcagagtgtctctcctcctatcccgcacctccgtgccttgctgagcagcagcgatgacccccctgcagaggtggacatctttgagctcctgaaagtgtcctatgagaaattcagcagcctgagggccgaagacattgagcagatgcggtttaaacagaggctgaaagtgatccagtccttggaggacacggccaagaggagtgtggtccgagctatacctgtggacattggtttctccattgaagagctggaggacctttacatggtgtttaaggccaagcacctggctagccagtactgggggtgcagccgcacaatggccggccgtcgggaccccagcctgccctacctggagcagtaccggattgatgccagccagttccgggaactctttgccagcctgacaccctgggcctgtggctcccacacacctctgctggcagggcgcatgttcaggctcctggacgaaaacaaggactcgctgatcaacttcaaggagttcgtgacagggatgagcgggatgtaccacggggacctgacagagaagctcaaggtgctctacaagctacaccttcccccagctctgagcccagaggaagccgagtcagccctggaggcggcccattatttcacagaggacagctcctcagaagaagcactaccacaggaagagcaagaaggaagtggaagtgaggagagaggagaggagaaggggaccagctctccggactatcggcactaccttcgaatgtgggccaaggagaaagaggctcagaaggagacgattaaggatcttcccaagatgaaccaggagcagttcattgagctgtgcaagacgctttacaacatgttcagtgaagaccccatggagcaggacctgtaccacgccatcgccaccgtggccagcctcctgctccgcatcggagaggtggggaagaagttctcagcccgcacaggcaggaagcccagggactgtgccactgaggaggacgagccaccagcacccgaactgcatcaggacgcagccagggagcttcagcccccagctgcaggagacccccaagccaaagcaggcggagacacacacctcggaacagccccacaggagagccaggtggtggtggaggggggcagcggcgagggacagggctcaccctcccagctgctgtctgacgatgaaaccaaagacgacatgtccatgtcctcctactcggtggtcagcacgggctccctgcaatgtgaagaccttgcagacgacacggtgctggtgggcggggaggcctgcagccccacagcgcgcatcggcggcaccgtcgacaccgactggtgcatctcctttgagcagatcctggcctccatcctgacggagtccgtgctggtgaacttctttgagaagagagtggacattggactcaagatcaaggaccaaaagaaagtggagagacagttcagcaccgccagtgaccatgagcagcctggagtttccggctgatgcctgcagctgtgaggcctggcccaaggtgtcatcagtggggctggcctcatctcctcctgcctttcctcccttatcagtttctctttaaaggtgtgcccctcctgctctcccaggagcagtgagttgtgagtggaaagaaggctggtgcagacccagctgccttagacagattccctgggcctgcatctcctggcgccggctgcttctgggcccaggaagaggctgtggctcccaccttccttacacctggtgggagcccgcctcgcaccagctgcacctgcctagcattagaggctctcagatctgcccttgcttgcctcttgggcaccaggttggggggcatgtgcttgttgggcaccaaagtgatggaaccctcaggtgctctccgggagcctgaacctcctgactgaggaacatgggcagaacatgtttattgcacagagtgggcgctgcgcacaggcgtggctgtacacgtgctctcagctcatcatcctttccagtaactttaaaaaaacatccctcaggtcctgatatatttccttggattcatttcacttggctagaaattacactgtgctcaatgccttaataaatccctgaaagaaataaaaaccactgtgtgcaatgccttgctgtggcccccaaccactgcttaggcctcccaacttctccccaggccaagtatggggccctggctgtgttctggaagttcaagacacttagtcctccacagtgggtggaagagtgcaaggtctgccaggtcagatggagacgcagaacctgctggtgcaagctgggcaggtcctgaccaacctgcatcaggggatgccctgagctccacaggtcttcatgggcaggggttgtgggtcctggtgaaggaagtgcatcctcaggcctgggctgtagcaagctgtctgcccttgggttcaagaaccagactgtggagccaaaggtgaccgcagggggccccagggctggagccacaaggataccctcactttgcatgaggagctgaaactgaccagtgtccagtgttagcccccacatggggctgctcttgcttctactaaaagatacagcagttacccccttatccacaggggatacagtggatatctaaaaccagacccccagtggatgtctaaaaccacagataataacaaaccttatacatactgttttttcctatgcatacatacctgtgattaagtttatgaattaggcaccttaagagattgacaacaataactaataataaaatgtaacggttatactgtaa

SEQ ID NO: 456799 - DNA, 4990 bp, Homo sapiens
cgccgacggcggcgggcgcttccgcctcgcgggcctcggcccggtgcgagcggctccgcgatgtggctgagcccggaggaggtgctggtggccaatgcgctgtgggtgacggagcgggccaaccccttcttcgtgctgcagcgacgccggggccacggcaggggcggcggccttacgggtcttctcgtgggcaccctggacgtggtgctggactccagtgcccgcgtggccccttaccgcatcctgcaccagacccaggactcccaggtctactggacagtggcgtgtggttcttcccgcaaagagatcacaaaacactgggaatggctggaaaataacttgctccagacactgtccatcttcgacagtgaggaagatatcaccaccttcgtcaagggcaagatacacggaatcatcgcagaagagaacaagaacctgcagccccagggagacgaggaccccgggaagttcaaggaggctgagctgaagatgcggaagcagtttgggatgcctgagggcgagaagctggtgaattactactcctgcagctactggaagggccgcgtgccccggcagggctggctgtacctgacggtcaaccacctgtgcttctactccttcctgctggggaaggaagtgagcctcgtggtgcagtgggtggacataacgcgtctggagaagaacgccaccctgctcttccccgagagcatccgtgtggacacccgcgaccaggagctcttcttctccatgttcctcaacatcggcgagaccttcaagctcatggagcagttggccaacctggccatgcggcagctgctggacagcgagggcttcctggaggacaaggccctgcctaggcccatccggccacacaggaacatctcagccctgaagcgagacctggacgcccgagccaagaatgagtgctaccgagccacgttccggctgcccagggatgagcggctagacggccacacaagctgcaccctgtggacgccgttcaacaagctgcacatccctggccagatgttcatctccaacaactacatctgcttcgccagcaaggaggaggacgcttgccacctcatcatacccctgagggaggtgaccattgtcgaaaaagctgacagctccagcgtgctgcccagccccctgtccatcagcaccaaaagcaaaatgacattcctgtttgccaacctgaaagaccgtgatttcttggtgcagaggatctctgacttcctccagaaaacaccatccaagcagccaggcagtatcgggagcaggaaagccagtgttgtggaccctagcacagagtcttccccagctcctcaggaggggtcggagcagcccgccagcccagcctctcccctcagcagccgccagagcttctgtgcgcaggaggcgccaaccgcatcccagggcctgctgaagctcttccagaaaaactcgcccatggaggaccttggagccaagggggccaaggagaagatgaaagaggagtcatggcacatccacttcttcgagtacgggcgtggcgtgtgcatgtaccgcacagccaagacgcgggcactggtcctgaagggtatccctgagagcctccggggagagctgtggctcctcttctccggggcctggaatgagatggtgactcaccccgggtactatgctgagctggtggagaagtccaccgggaagtacagcctggccacagaggagatcgagcgagacctgcaccgctccatgcccgagcaccctgccttccagaacgagctggggattgctgccctccggcgggtgctgactgcctatgccttccgaaaccccaccatcggctactgccaggcaatgaacatcgtgacctcggtgctcctgctctatggcagtgaggaggaggccttctggctcctggtggccctgtgcgagcgcatgctgcccgactactacaacaccagggtggtgggagccctggtggaccaaggcatcttcgaagagctcacgagagacttcctgccgcagctctcggagaagatgcaggacctgggggtgatctccagcatctcgctgtcctggttcctgaccctcttcctcagcgtcatgcccttcgagagcgccgtggtcatcgtcgactgctttttctatgagggcatcaaggtgatcctgcaggtggccctggccgtcctggacgccaacatggagcagctgctgggctgcagcgacgagggcgaggccatgaccatgctgggcagatacctggataatgtggtcaacaagcagagtgtctctcctcctatcccgcacctccgtgccttgctgagcagcagcgatgacccccctgcagaggtggacatctttgagctcctgaaagtgtcctatgagaaattcagcagcctgagggccgaagacattgagcagatgcggtttaaacagaggctgaaagtgatccagtccttggaggacacggccaagaggagtgtggtccgagctatacctgtggacattggtttctccattgaagagctggaggacctttacatggtgtttaaggccaagcacctggctagccagtactgggggtgcagccgcacaatggccggccgtcgggaccccagcctgccctacctggagcagtaccggattgatgccagccagttccgggaactctttgccagcctgacaccctgggcctgtggctcccacacacctctgctggcagggcgcatgttcaggctcctggacgaaaacaaggactcgctgatcaacttcaaggagttcgtgacagggatgagcgggatgtaccacggggacctgacagagaagctcaaggtgctctacaagctacaccttcccccagctctgagcccagaggaagccgagtcagccctggaggcggcccattatttcacagaggacagctcctcagaagaagcactaccacaggaagagcaagaaggaagtggaagtgaggagagaggagaggagaaggggaccagctctccggactatcggcactaccttcgaatgtgggccaaggagaaagaggctcagaaggagacgattaaggatcttcccaagatgaaccaggagcagttcattgagctgtgcaagacgctttacaacatgttcagtgaagaccccatggagcaggacctgtaccacgccatcgccaccgtggccagcctcctgctccgcatcggagaggtggggaagaagttctcagcccgcacaggcaggaagcccagggactgtgccactgaggaggacgagccaccagcacccgaactgcatcaggacgcagccagggagcttcagcccccagctgcaggagacccccaagccaaagcaggcggagacacacacctcggaacagccccacaggagagccaggtggtggtggaggggggcagcggcgagggacagggctcaccctcccagctgctgtctgacgatgaaaccaaagacgacatgtccatgtcctcctactcggtggtcagcacgggctccctgcaatgtgaagaccttgcagacgacacggtgctggtgggcggggaggcctgcagccccacagcgcgcatcggcggcaccgtcgacaccgactggtgcatctcctttgagcagatcctggcctccatcctgacggagtccgtgctggtgaacttctttgagaagagagtggacattggactcaagatcaaggacctttccggctgatgcctgcagctgtgaggcctggcccaaggtgtcatcagtggggctggcctcatctcctcctgcctttcctcccttatcagtttctctttaaaggtgtgcccctcctgctctcccaggagcagtgagttgtgagtggaaagaaggctggtgcagacccagctgccttagacagattccctgggcctgcatctcctggcgccggctgcttctgggcccaggaagaggctgtggctcccaccttccttacacctggtgggagcccgcctcgcaccagctgcacctgcctagcattagaggctctcagatctgcccttgcttgcctcttgggcaccaggttggggggcatgtgcttgttgggcaccaaagtgatggaaccctcaggtgctctccgggagcctgaacctcctgactgaggaacatgggcagaacatgtttattgcacagagtgggcgctgcgcacaggcgtggctgtacacgtgctctcagctcatcatcctttccagtaactttaaaaaaacatccctcaggtcctgatatatttccttggattcatttcacttggctagaaattacactgtgctcaatgccttaataaatccctgaaagaaataaaaaccactgtgtgcaatgccttgctgtggcccccaaccactgcttaggcctcccaacttctccccaggccaagtatggggccctggctgtgttctggaagttcaagacacttagtcctccacagtgggtggaagagtgcaaggtctgccaggtcagatggagacgcagaacctgctggtgcaagctgggcaggtcctgaccaacctgcatcaggggatgccctgagctccacaggtcttcatgggcaggggttgtgggtcctggtgaaggaagtgcatcctcaggcctgggctgtagcaagctgtctgcccttgggttcaagaaccagactgtggagccaaaggtgaccgcagggggccccagggctggagccacaaggataccctcactttgcatgaggagctgaaactgaccagtgtccagtgttagcccccacatggggctgctcttgcttctactaaaagatacagcagttacccccttatccacaggggatacagtggatatctaaaaccagacccccagtggatgtctaaaaccacagataataacaaaccttatacatactgttttttcctatgcatacatacctgtgattaagtttatgaattaggcaccttaagagattgacaacaataactaataataaaatgtaacggttatactgtaa

SEQ ID NO: 456800 - DNA, 2380 bp, Homo sapiens
cgccgacggcggcgggcgcttccgcctcgcgggcctcggcccggtgcgagcggctccgcgatgtggctgagcccggaggaggtgctggtggccaatgcgctgtgggtgacggagcgggccaaccccttcttcgtgctgcagcgacgccggggccacggcaggggcggcggccttacgggtcttctcgtgggcaccctggacgtggtgctggactccagtgcccgcgtggccccttaccgcatcctgcaccagacccaggactcccaggtctactggacagtggcgtgtggttcttcccgcaaagagatcacaaaacactgggaatggctggaaaataacttgctccagacactgtccatcttcgacagtgaggaagatatcaccaccttcgtcaagggcaagatacacggaatcatcgcagaagagaacaagaacctgcagccccagggagacgaggaccccgggaagttcaaggaggctgagctgaagatgcggaagcagtttgggatgcctgagggcgagaagctggtgaattactactcctgcagctactggaagggccgcgtgccccggcagggctggctgtacctgacggtcaaccacctgtgcttctactccttcctgctggggaaggaagtgagcctcgtggtgcagtgggtggacataacgcgtctggagaagaacgccaccctgctcttccccgagagcatccgtgtggacacccgcgaccaggagctcttcttctccatgttcctcaacatcggcgagaccttcaagctcatggagcagttggccaacctggccatgcggcagctgctggacagcgagggcttcctggaggacaaggccctgcctaggcccatccggccacacaggaacatctcagccctgaagcgagacctggacgcccgagccaagaatgagtgctaccgagccacgttccggctgcccagggatgagcggctagacggccacacaagctgcaccctgtggacgccgttcaacaagctgcacatccctggccagatgttcatctccaacaactacatctgcttcgccagcaaggaggaggacgcttgccacctcatcatacccctgagggaggtgaccattgtcgaaaaagctgacagctccagcgtgctgcccagccccctgtccatcagcaccaaaagcaaaatgacattcctgtttgccaacctgaaagaccgtgatttcttggtgcagaggatctctgacttcctccagaaaacaccatccaagcagccaggcagtatcgggagcaggaaagccagtgttgtggaccctagcacagaggtgagaagccccttgggagcagcagggtcgagttgggcccaggaagagccagggcatccatcagcctccccgctggagcctgaccccatggttccggctgtgggcctccgcctaggggtggatgtgtcagagctggcaagagacccctagcccagacccacactgcccagcaacatcacagcctctctgcacccccagccacacacccggtactcctcactcctgctgggcccattgcccatgaggaaccttctctggctgtcctttctgcattgctgctgcactcagagcaaagccacactgtggaggcctgtacacttcggctttgttcccatgaccttccctgccaggcgttcaggctgaagttcttgacggtagaactgcagtatcactattgtaccagcaaacttaacaagaattccttaatatcaccaaatattgtattcacacttccccgtgtgcaagtgtacttttcacggtttgattatttgaactgaggcagacgaaagtcacacatgtcactcttggttgataggtctcttaaatctgtttaatctacgggcttctgctccacctagctctcgtttattcttccacaatatttttttgaaggaatcggtcacttgtgccatagagtctctcatcgtctggttttgctgattgcatccgctgcaggcgtttagcaagctcctgtgtctcttgtttaagttggttgagcggtgagaccgagagccgtgatcacattcaggctcagctgattttggttctggcaggtccgcctgtgggcaggcttgaggtgctgtttattcccaacaagagatgtctggcaaccagccacctctctatgctactgtcagtcattgagaatatgcctggatccagcggccagtggccagcggcatgctcattccattcctcctttcgtctgggagctgaaattctcccaaagagggaagctgaccccaggcacagttcatagaggaaaggtggaatacatgttttactctttcctcttactcaccagttgtcaaaataatgatgagttggttttctagtgtcttccaca

SEQ ID NO: 456801 - DNA, 1182 bp, Homo sapiens
cgccgacggcggcgggcgcttccgcctcgcgggcctcggcccggtgcgagcggctccgcgatgtggctgagcccggaggaggtgctggtggccaatgcgctgtgggtgacggagcgggccaaccccttcttcgtgctgcagcgacgccggggccacggcaggggcggcggccttacgggtcttctcgtgggcaccctggacgtggtgctggactccagtgcccgcgtggccccttaccgcatcctgcaccagacccaggactcccaggtctactggacagtggcgtgtggttcttcccgcaaagagatcacaaaacactgggaatggctggaaaataacttgctccagacactgtccatcttcgacagtgaggaagatatcaccaccttcgtcaagggcaagatacacggaatcatcgcagaagagaacaagaacctgcagccccagggagacgaggaccccgggaagttcaaggaggctgagctgaagatgcggaagcagtttgggatgcctgagggcgagaagctggtgaattactactcctgcagctactggaagggccgcgtgccccggcagggctggctgtacctgacggtcaaccacctgtgcttctactccttcctgctggggaaggaagtgagcctcgtggtgcagtgggtggacataacgcgtctggagaagaacgccaccctgctcttccccgagagcatccgtgtggacacccgcgaccaggagctcttcttctccatgttcctcaacatcggcgagaccttcaagctcatggagcagttggccaacctggccatgcggcagctgctggacagcgagggcttcctggaggacaaggccctgcctaggcccatccggccacacaggaacatctcagccctgaagcgagacctggacgcccgagccaagaatgagtgctaccgagccacgttccggctgcccagggatgagcggctagacggccacacaagctgcaccctgtggacgccgttcaacaagctgcacatccctggccagatgttcatctccaacaactacatctgcttcgccagcaaggaggaggacgcttgccacctcatcatacccctgagggaggtgaccattgtcgaaaaagctgactatccagcgtgctgcccttcccccgtagtcataagggatcgtctagatcacccg

SEQ ID NO: 456802 - DNA, 374 bp, Homo sapiens
tgccctgttactgcccccaaagtaccagaagaaggacagagacagctggcacccgtgtctccccaggggcctggaatgagatggtgactcaccccgggtactatgctgagctggtggagaagtccaccgggaagtacagcctggccacagaggagatcgagcgagacctgcaccgctccatgcccgagcaccctgccttccagaacgagctggggattgctgccctccggcgggtgctgactgcctatgccttccgaaaccccaccatcggctactgccaggtaaggggcctgacaggggcccagagacagcatctgccaccagaggttcacaggagcaggtccctgtggtcccaggcctgtgtggtgaccctg

SEQ ID NO: 456803 - DNA, 2007 bp, Homo sapiens
gtggagggaacacgtgcagtgccgtggtgtggggatctcggcccctctctctgggttcgtcgtggttgagatgattacctcggacgtctacggaaacgagcgggcgcattgttgtccgcttgtgtgtgtgtgtgtgtgtgtgtgtgtgcgcgtacattgattactatccatttctttagtcaacgctctccacttcctgatttctgctttaaggaaaactgtgaactttctgcttcatgtatcagttttaaagcagcccaggcaaagatcatctacagattctaggaattctctcccctgaaatcaaaacctggaagacttttttttcttattttagttgagaagtttcataaactgctcaaggattagttttccaggactctgcggaggaacggcaggaagaacctcagagagggcagaggtgacttcaaagtgctggggactccgtcctgagggtcacttggccctgagcccctgcgtgcccttgcggaagcccagaagcttcttcctgctgcacctcccgtttccgctgctgctgacgtttatgcatttcatgatggggtccaacaagaacacctgacttgggtgaagttgtgcaatattggaggctgactgtagggctgggcagctgggagacaggctcatggctcatggctcatggctcagggcggtgcctgccctgggccgggacccccctccccaccccccacctaggctttttgggttttgttcaaggaaggtaaagtgagaggtttaggtcagtgtttttaagtttttgttttttttttaaagcaaatcctgtatatgtatctacatgggagacaggtagacactacttatttgttacattttgtactacacgtttgtgttccaggtttcagcttccctcgctcctgttgttaagaagcgtccctgtcagcacaggtgtgcattgaggaaggggccccagggccttcgctccctcagcactggggtggaggcggcaggaaggggcggcccttacctggcaggtctgggcgcacctttagcaggtggactccgtggggctccaccagccagaagcctttggaaggcaacgaaggcaatgctgctccctgagtccagtccccgcccccaaacccagcccaggtgccttcagctacttcggcttcttaaaccctgcagtgttaaacagaggcattgagaaaggggaaaggcgggtatttttaaaagccaaagattgacccagttacttgagggtagggaggcgggcccagtgcaggaggctgcatccctggcctgctggtgcccaccgggggctgtgcctgtgccgggccgcagggaagctggctgcccccattcctgctgctgctgctgctgctgctctgtggctgtttcaaagactgggcgaaaggctgtccggagggcagaccaggtgccttgccgcagagaaaacaccaaagtctcctgttcgctcataaagaagtttttgggatgggagagaatccagaccatcttggggcagccaggcccttgccttcatttttacagaggtagcacaattgattccaacacaaaactccttcccctttttaaaatgatttctgttctaatgccatagatcaaaggcctcagaaaccattgtgtgtttcctctttgaagcaatgacaagcactttactttcacggtggtttttgttttttcttattgctgtggaacctcttttggaggacgttaaaggcgtgttttacttgtttttttaagagtgtgtgatgtgtgttttgtagatttcttgacagtgctgtaatacagacggcaatgcaatagcctatttaaagacactacgtgatctgattgagatgtacatagtttttttttttaccataactgaattattttatctcttatgttaacatgagaaatgtatgccaaatgattagttgatgtatgttttttaatttaatatttaaataaaatatttggaaggaaaaaaccttgactttttcccttcctctctctctcatctct

SEQ ID NO: 456804 - DNA, 1967 bp, Homo sapiens
gtggagggaacacgtgcagtgccgtggtgtggggatctcggcccctctctctgggttcgtcgtggttgagatgattacctcggacgtctacggaaacgagcgggcgcattgttgtccgcttgtgtgtgtgtgtgtgtgtgtgtgtgtgcgcgtacattgattactatccatttctttagtcaacgctctccacttcctgatttctgctttaaggaaaactgtgaactttctgcttcatgtatcagttttaaagcagcccaggcaaagatcatctacagattctaggaattctctcccctgaaatcaaaacctggaagacttttttttcttattttagttgagaagtttcataaactgctcaaggattagttttccaggactctgcggaggaacggcaggaagaacctcagagagggcagaggtgacttcaaagtgctggggactccgtcctgagggtcacttggccctgagcccctgcgtgcccttgcggaagcccagaagcttcttcctgctgcacctcccgtttccgctgctgctgacgtttatgcatttcatgatggggtccaacaagaacacctgacttgggtgaagttgtgcaatattggaggctgactgtagggctgggcagctgggagacaggctcatggctcatggctcatggctcagggcggtgcctgccctgggccgggacccccctccccaccccccacctaggctttttgggttttgttcaaggaaggtaaagtgagaggtttaggtcagtgtttttaagtttttgttttttttttaaagcaaatcctgtatatgtatctacatgggagacaggtagacactacttatttgttacattttgtactacacgtttgtgttccaggtttcagcttccctcgctcctgttgttaagaagcgtccctgtcagcacaggtgtgcattgaggaaggggccccagggccttcgctccctcagcactggggtggaggcggcaggaaggggcggcccttacctggcaggtctgggcgcacctttagcaggtggactccgtggggctccaccagccagaagcctttggaaggcaacgaaggcaatgctgctccctgagtccagtccccgcccccaaacccagcccaggtgccttcagctacttcggcttcttaaaccctgcagtgttaaacagaggcattgagaaaggggaaaggcgggtatttttaaaagccaaagattgacccagttacttgagggtagggaggcgggcccagtgcaggaggctgcatccctggcctgctggtgcccaccgggggctgtgcctgtgccgggccgcagggaagctggctgcccccattcctgctgctgctgctgctgctgctctgtggctgtttcaaagactgggcgaaaggctgtccggagggcagaccaggtgccttgccgcagagaaaacaccaaagtctcctgttcgctcataaagaagtttttgggatgggagagaatccagaccatcttggggcagccaggcccttgccttcatttttacagaggtagcacaattgattccaacacaaaactccttcccctttttaaaatgatttctgttctaatgccatagatcaaaggcctcagaaaccattgtgtgtttcctctttgaagcaatgacaagcactttactttcacggtggtttttgttttttcttattgctgtggaacctcttttggaggacgttaaaggcgtgttttacttgtttttttaagagtgtgtgatgtgtgttttgtagatttcttgacagtgctgtaatacagacggcaatgcaatagcctatttaaagacactacgtgatctgattgagatgtacatagtttttttttttaccataactgaattattttatctcttatgttaacatgagaaatgtatgccaaatgattagttgatgtatgttttttaatttaatatttaaataaaatatttggaagga

SEQ ID NO: 456805 - DNA, 2083 bp, Homo sapiens
gttgcggtaggtgcataactgtatattctctggaggtaagatacctagaagtgggatggcggggtcgtgcgtaaatgcagattggtaagattcttaagtgtagacttataagaaaatgtcaaggtggtttccaaagtggctgtagcattctgcattcctaaaagccagtacgagtttttatttttattttttttgttgtgtgtgtgtgtgtgtgtgtgtgtgtgcgcgtacattgattactatccatttctttagtcaacgctctccacttcctgatttctgctttaaggaaaactgtgaactttctgcttcatgtatcagttttaaagcagcccaggcaaagatcatctacagattctaggaattctctcccctgaaatcaaaacctggaagacttttttttcttattttagttgagaagtttcataaactgctcaaggattagttttccaggactctgcggaggaacggcaggaagaacctcagagagggcagaggtgacttcaaagtgctggggactccgtcctgagggtcacttggccctgagcccctgcgtgcccttgcggaagcccagaagcttcttcctgctgcacctcccgtttccgctgctgctgacgtttatgcatttcatgatggggtccaacaagaacacctgacttgggtgaagttgtgcaatattggaggctgactgtagggctgggcagctgggagacaggctcatggctcatggctcatggctcagggcggtgcctgccctgggccgggacccccctccccaccccccacctaggctttttgggttttgttcaaggaaggtaaagtgagaggtttaggtcagtgtttttaagtttttgttttttttttaaagcaaatcctgtatatgtatctacatgggagacaggtagacactacttatttgttacattttgtactacacgtttgtgttccaggtttcagcttccctcgctcctgttgttaagaagcgtccctgtcagcacaggtgtgcattgaggaaggggccccagggccttcgctccctcagcactggggtggaggcggcaggaaggggcggcccttacctggcaggtctgggcgcacctttagcaggtggactccgtggggctccaccagccagaagcctttggaaggcaacgaaggcaatgctgctccctgagtccagtccccgcccccaaacccagcccaggtgccttcagctacttcggcttcttaaaccctgcagtgttaaacagaggcattgagaaaggggaaaggcgggtatttttaaaagccaaagattgacccagttacttgagggtagggaggcgggcccagtgcaggaggctgcatccctggcctgctggtgcccaccgggggctgtgcctgtgccgggccgcagggaagctggctgcccccattcctgctgctgctgctgctgctgctctgtggctgtttcaaagactgggcgaaaggctgtccggagggcagaccaggtgccttgccgcagagaaaacaccaaagtctcctgttcgctcataaagaagtttttgggatgggagagaatccagaccatcttggggcagccaggcccttgccttcatttttacagaggtagcacaattgattccaacacaaaactccttcccctttttaaaatgatttctgttctaatgccatagatcaaaggcctcagaaaccattgtgtgtttcctctttgaagcaatgacaagcactttactttcacggtggtttttgttttttcttattgctgtggaacctcttttggaggacgttaaaggcgtgttttacttgtttttttaagagtgtgtgatgtgtgttttgtagatttcttgacagtgctgtaatacagacggcaatgcaatagcctatttaaagacactacgtgatctgattgagatgtacatagtttttttttttaccataactgaattattttatctcttatgttaacatgagaaatgtatgccaaatgattagttgatgtatgttttttaatttaatatttaaataaaatatttggaaggaaaaaaccttgactttttcccttcctctctctctcatctct

SEQ ID NO: 456806 - DNA, 1954 bp, Homo sapiens
gtggagggaacacgtgcagtgccgtggtgtggggatctcggcccctctctctgggttcgtcgtggttgagatgattacctcggacgtctacggaaacgagcgggcgcattgttgtccgcttgtgtgtgtgtgtgtgtgtgtgtgtgtgcgcgtacattgattactatccatttctttagtcaacgctctccacttcctgatttctgctttaaggaaaactgtgaactttctgcttcatgtatcagttttaaagcagcccaggcaaagatcatctacagattctaggaattctctcccctgaaatcaaaacctggaagacttttttttcttattttagttgagaagtttcataaactgctcaaggattagttttccaggactctgcggaggaacggcaggaagaacctcagagagggcagaggtgacttcaaagtgctggggactccgtcctgagggtcacttggccctgagcccctgcgtgcccttgcggaagcccagaagcttcttcctgctgcacctcccgtttccgctgctgctgacgtttatgcatttcatgatggggtccaacaagaacacctgacttgggtgaagttgtgcaatattggaggctgactgtagggctgggcagctgggagacaggctcatggctcatggctcatggctcagggcggtgcctgccctgggccgggacccccctccccaccccccacctaggctttttgggttttgttcaaggaaggtaaagtgagaggtttaggtcagtgtttttaagtttttgttttttttttaaagcaaatcctgtatatgtatctacatgggagacaggtagacactacttatttgttacattttgtactacacgtttgtgttccaggtttcagcttccctcgctcctgttgttaagaagcgtccctgtcagcacaggtgtgcattgaggaaggggccccagggccttcgctccctcagcactggggtggaggcggcaggaaggggcggcccttacctggcaggtctgggcgcacctttagcaggtggactccgtggggctccaccagccagaagcctttggaaggcaacgaaggcaatgctgctccctgagtccagtccccgcccccaaacccagcccaggtgccttcagctacttcggcttcttaaaccctgcagtgttaaacagaggcattgagaaaggggaaaggcgggtatttttaaaagccaaagattgacccagttacttgagggtagggaggcgggcccagtgcaggaggctgcatccctggcctgctggtgcccaccgggggctgtgcctgtgccgggccgcagggaagctggctgcccccattcctgctgctgctgctgctgctgctctgtggctgtttcaaagactgggcgaaaggctgtccggagggcagaccaggtgccttgccgcagagaaaacaccaaagtctcctgttcgctcataaagaagtttttgggatgggagagaatccagaccatcttggggcagccaggcccttgccttcatttttacagaggtagcacaattgattccaacacaaaactccttcccctttttaaaatgatttctgttctaatgccatagatcaaaggcctcagaaaccattgtgtgtttcctctttgaagcaatgacaagcactttactttcacggtggtttttgttttttcttattgctgtggaacctcttttggaggacgttaaaggcgtgttttacttgtttttttaagagtgtgtgatgtgtgttttgtagatttcttgacagtgctgtaatacagacggcaatgcaatagcctatttaaagacactacgtgatctgattgagatgtacatagtttttttttttaccataactgaattattttatctcttatgttaacatgtccccgtacatcgttagaagcttgaattcgagcagtagtagtagtagtaggcggccgc

SEQ ID NO: 456807 - DNA, 1687 bp, Homo sapiens
ctccattaggaattcactgttagaaatctgatcttttctcctctgttgagctttacttgggcattttattgatttgatatcacttagtagaaacccattcaacaaaaggtatctcttcaggccactagtcaatacagcattttttatttgctgagatttttacttctattttgccccacatcagctggtaagttttataagtaagcaaaaagtaggagctatagacaataaggaagcagaatgaacctctgcaattcatatttatgtatgatttcacttggagtgggaggagatgttttttttccccatctttgaataagtagaaaaacatctcacgtaacctggggtggtggtggtgaattttcagctgaagggaatccttcctcgtgaagctcactgctatcctgttaatctagcattttacttttgtggtaagattctgggtggaaagggaaaatgaaatgatacagcatctcaaacataggca[450 bp omitted]aatctctcttggtatgctgctgagttggtgggacctgggcaattacaagggaggtcactgcacccccaggcagttcccagcaagtgttttttccaatttcactgacattctttccgggctcaactcaatttgttttcaacttctctatggcaattgatgactgactgtgtaattcagcaggatctcctgtgaagtgcttcttccccagttgaataggagctggtgtttgtctaagcctctgcttatgcatgaggtataatgctttttatatgttatataatgctcttacgcgttagctatctgaatgatagatttaataaaatatacctcataatattatggggaaaggatgacgactgttatagagaggaacttgggagtatcacttctgtaatccttatctaacctgaatctgttagcaggaaactgaaaaggcctgtgtatgacaatgagataaacaattttaatctcttagcaatgtcaagtggaaaatctaactacctgccagtagtttaagaaatggctaagagattttgttgggcacaaataatcctgagacccagattgctgagccaagggtaggaaaattggttttgctatgtgttacagctgggaagtgagaaggtcactgtttgacaaactactaaaaaaaccttatggattaaacattcgccagtgtaggggacattttgaatgtgttataattgatattttagtctatatgcggccgctgaacgctttttcttttac

SEQ ID NO: 456808 - DNA, 1651 bp, Homo sapiens
  misc_feature (1625)..(1625): n is a, c, g, or t
  misc_feature (1636)..(1636): n is a, c, g, or t
  misc_feature (1643)..(1643): n is a, c, g, or t
ctccattaggaattcactgttagaaatctgatcttttctcctctgttgagctttacttgggcattttattgatttgatatcacttagtagaaacccattcaacaaaaggtatctcttcaggccactagtcaatacagcattttttatttgctgagatttttacttctattttgccccacatcagctggtaagttttataagtaagcaaaaagtaggagctatagacaataaggaagcagaatgaacctctgcaattcatatttatgtatgatttcacttggagtgggaggagatgttttttttccccatctttgaataagtagaaaaacatctcacgtaacctggggtggtggtggtgaattttcagctgaagggaatccttcctcgtgaagctcactgctatcctgttaatctagcattttacttttgtggtaagattctgggtggaaagggaaaatgaaatgatacagcatctcaaacataggca[450 bp omitted]aatctctcttggtatgctgctgagttggtgggacctgggcaattacaagggaggtcactgcacccccaggcagttcccagcaagtgttttttccaatttcactgacattctttccgggctcaactcaatttgttttcaacttctctatggcaattgatgactgactgtgtaattcagcaggatctcctgtgaagtgcttcttccccagttgaataggagctggtgtttgtctaagcctctgcttatgcatgaggtataatgctttttatatgttatataatgctcttacgcgttagctatctgaatgatagatttaataaaatatacctcataatattatggggaaaggatgacgactgttatagagaggaacttgggagtatcacttctgtaatccttatctaacctgaatctgttagcaggaaactgaaaaggcctgtgtatgacaatgagataaacaattttaatctcttagcaatgtcaagtggaaaatctaactacctgccagtagtttaagaaatggctaagagattttgttgggcacaaataatcctgagacccagattgctgagccaagggtaggaaaattggttttgctatgtgttacagctgggaagtgagaaggtcactgtttgacaaactactaaaaaaaccttatggattaaacattcgccagtgtaggggacanatattactctnaagcggncccgttgt

SEQ ID NO: 456809 - DNA, 229 bp, Homo sapiens
atggatgtttgtagtaacgaagatataaaagctgacttactgaaacttcaccagattgtatgagaaagaaaaatatgtgttcaaactgggacctaatttgataaccatagtttgttaaaattaaaagtattaattttcaaattacaaagtattacatacaatagaaaatacaaataaaaagggcatttaaaaacccgccctgtaatcagtattaccactttggtatata

SEQ ID NO: 456810 - DNA, 2650 bp, Homo sapiens
agctgccagagggcggggccgcaggagggcggggcgcgagcgagagctgggagaaggcagtgagcgagcaggcggcaggcacggtccgtgcggagcaggcgagcgagcgggaagacgcagccaccttcctcaccagccagcccacagcggtttgttccccttctcgggagtgcgccaatgcctgggccgacccaaaccctgtccccaaatggcgagaacaacaacgacatcatccaggataataacgggaccatcattcctttccggaagcacacagtgcgcggggagcgttcctacagttggggaatggcggtcaatgtgtattctacctcgataacccaagagactatgagcagacatgacatcattgcatgggttaatgacatagtatctttaaactacacaaaagtggaacagctttgttcaggagcggcctattgccaattcatggacatgctcttccctggctgcattagtttgaagaaagtaaaatttcaagcaaagctggaacatgaatatattcacaattttaaacttctgcaagcatcatttaagcgaatgaacgttgataaggtaattccagtggagaagctagtgaaaggacgtttccaggacaacctggattttattcaatggtttaagaaattctatgatgctaactacgatgggaaggagtatgatcctgtagaggcacgacaagggcaagatgcaattcctcctcctgaccctggtgaacagatcttcaacctgccaaaaaagtctcaccatgcaaactcccccacagcaggtgcagctaaatcaagtccagcagctaaaccaggatccacaccttctcgaccctcatcagccaaaagggcttcttccagtggctcagcatccaaatccgataaagatttagaaacgcaggtcatacagcttaatgaacaggtacattcattaaaacttgcccttgaaggcgtggaaaaggaaagggatttctactttgggaagttgagagagatcgagctactctgccaagaacacgggcaggaaaatgatgacctcgtgcagagactaatggacatcctgtatgcttcagaagaacacgagggccacacagaagagccggaagcagaggagcaagcccacgaacagcagcccccgcagcaggaagagtactgacccaccccggctgctcttgacacttccattgtgtgtgggaacgtttcttctggagaattggaacatgtgtggccccaagctcaacagaaaccagttgttcccaatctgccgttaccatcaacgcactgttgcatatgccagccactgcgcttggttcccattttctttgccaaggtgtattagcggacggccctctggccacctacccgagagatcgtagggtcacatacatccaacttcaccacttggctgcttgagattggttctgctcttttcttcatttctttccagaacaactctttcccaccccaacaccactgccaccacccctctttttatcctggtgtgaaacaatggtaatttgatatatggtatttatattggcatttttcaacccagtgtcactagatgtcacacacatttgtggtgctttgatgtttgcaagtctaacctctgaacataaatttggtcaaataattggaacaaagggaaacagatacttgatatgaaagccataatgacggtgacttgtgtcgtgggggaaaacataaggtcattttctccctctactcacaatactaaagggaaaaaatggattcaaagctaggatttcagggcccagcagtgttcctccatcagcatgttagacaactacacagtatgttgttagttttgaaagacattcactcaaggaaaacaccatctcaactttgcccgctcaccatgtcccttgcccccatgtagcccatttcccaggttatgctcttttctttctcagggtcctctttggtgggcagccactccccgagatgttgccatcagttttctgcagtccaaagagggtatggttaggtacgggtcttcctgcctcattcctcttcctctttgtgtaggtttcagccacaaaactgtcattcactctaggggacccctactaaagggtaacttcaggtgtgcagccctgagctccaaggctctgcaccatgccacacacttgctgtaaggctagaagtgaagaccttattaataggagcataattgcgagggagaatcatggttctgcagtctggtgtagacactggaataacagcacagaaaaatctatgactcccaatatcttctagaataaagaattttccctctttaacacaagggccctccttgtcattgaccttagctaaaccatggcaattcataaatagaggaaacattaatgaattaaaagcattccttattttttaactaatatttgtacattttcttagtctctttccaagtctttgcctcttttttttctttatttttattttttcctttgacagatggtatcccttcctggatcattcatttcaccttggtttctaactttaggtttactttcacttgttatttgacttagcaggtgcaacaaaaacaagaaacaaatgtgcccaccccactttccgcttaactgaaaagcttaaaataaatttctgaattatgtatcctg

SEQ ID NO: 456811 - DNA, 2614 bp, Homo sapiens
ctagaattcagcggccgctgaattctagcgagcaggcggcaggcacggtccgtgcggagcaggcgagcgagcgggaagacgcagccaccttcctcaccagccagcccacagcggtttgttccccttctcgggagtgcgccaatgcctgggccgacccaaaccctgtccccaaatggcgagaacaacaacgacatcatccaggataataacgggaccatcattcctttccggaagcacacagtgcgcggggagcgttcctacagttggggaatggcggtcaatgtgtattctacctcgataacccaagagactatgagcagacatgacatcattgcatgggttaatgacatagtatctttaaactacacaaaagtggaacagctttgttcaggagcggcctattgccaattcatggacatgctcttccctggctgcattagtttgaagaaagtaaaatttcaagcaaagctggaacatgaatatattcacaattttaaacttctgcaagcatcatttaagcgaatgaacgttgataaggtaattccagtggagaagctagtgaaaggacgtttccaggacaacctggattttattcaatggtttaagaaattctatgatgctaactacgatgggaaggagtatgatcctgtagaggcacgacaagggcaagatgcaattcctcctcctgaccctggtgaacagatcttcaacctgccaaaaaagtctcaccatgcaaactcccccacagcaggtgcagctaaatcaagtccagcagctaaaccaggatccacaccttctcgaccctcatcagccaaaagggcttcttccagtggctcagcatccaaatccgataaagatttagaaacgcaggtcatacagcttaatgaacaggtacattcattaaaacttgcccttgaaggcgtggaaaaggaaagggatttctactttgggaagttgagagagatcgagctactctgccaagaacacgggcaggaaaatgatgacctcgtgcagagactaatggacatcctgtatgcttcagaagaacacgagggccacacagaagagccggaagcagaggagcaagcccacgaacagcagcccccgcagcaggaagagtactgacccaccccggctgctcttgacacttccattgtgtgtgggaacgtttcttctggagaattggaacatgtgtggccccaagctcaacagaaaccagttgttcccaatctgccgttaccatcaacgcactgttgcatatgccagccactgcgcttggttcccattttctttgccaaggtgtattagcggacggccctctggccacctacccgagagatcgtagggtcacatacatccaacttcaccacttggctgcttgagattggttctgctcttttcttcatttctttccagaacaactctttcccaccccaacaccactgccaccacccctctttttatcctggtgtgaaacaatggtaatttgatatatggtatttatattggcatttttcaacccagtgtcactagatgtcacacacatttgtggtgctttgatgtttgcaagtctaacctctgaacataaatttggtcaaataattggaacaaagggaaacagatacttgatatgaaagccataatgacggtgacttgtgtcgtgggggaaaacataaggtcattttctccctctactcacaatactaaagggaaaaaatggattcaaagctaggatttcagggcccagcagtgttcctccatcagcatgttagacaactacacagtatgttgttagttttgaaagacattcactcaaggaaaacaccatctcaactttgcccgctcaccatgtcccttgcccccatgtagcccatttcccaggttatgctcttttctttctcagggtcctctttggtgggcagccactccccgagatgttgccatcagttttctgcagtccaaagagggtatggttaggtacgggtcttcctgcctcattcctcttcctctttgtgtaggtttcagccacaaaactgtcattcactctaggggacccctactaaagggtaacttcaggtgtgcagccctgagctccaaggctctgcaccatgccacacacttgctgtaaggctagaagtgaagaccttattaataggagcataattgcgagggagaatcatggttctgcagtctggtgtagacactggaataacagcacagaaaaatctatgactcccaatatcttctagaataaagaattttccctctttaacacaagggccctccttgtcattgaccttagctaaaccatggcaattcataaatagaggaaacattaatgaattaaaagcattccttattttttaactaatatttgtacattttcttagtctctttccaagtctttgcctcttttttttctttatttttattttttcctttgacagatggtatcccttcctggatcattcatttcaccttggtttctaactttaggtttactttcacttgttatttgacttagcaggtgcaacaaaaacaagaaacaaatgtgcccaccccactttccgcttaactgaaaagcttaaaataaatttctgaattatgtatcctg

SEQ ID NO: 456812 - DNA, 548 bp, Homo sapiens
cgactagcccgacagtccccgactagcccgacagtccccgactagcccgacactccccagccttctcagttataaacatgctggccagatctcttagcctgcaaagagaactttccccagtcaccatagaccattctccttcctgaaggcttggggcagaccattcgtttatttagagaagagctatacattcttctttctggtcccatcttaaacgtcttctgttgtgctgcaccccagatggtgtctcagatgctttggggaatctttaacagctgaatttgagtcagtcctcttaggctgcacctccagcctctgcagatcccccctcatttcccatggatggtgggaccccattattctctcatctcggcattcagggaacactttccttagcggcccctggtcacatgtcatcgggctgggcaggaagcgtccctgggtgcgtgctccacttctccctctcaggaagcccagtttcatccttagtaccccccctcgtgcccgctgtcgggctagtcggggggatctctagagtacttagcaat

SEQ ID NO: 456813 - DNA, 4269 bp, Homo sapiens
agctgccagagggcggggccgcaggagggcggggcgcgagcgagagctgggagaaggcagtgagcgagcaggcggcaggcacggtccgtgcggagcaggcgagcgagcgggaagacgcagccaccttcctcaccagccagcccacagcggtttgttccccttctcgggagtgcgccaatgcctgggccgacccaaaccctgtccccaaatggcgagaacaacaacgacatcatccaggataataacgggaccatcattcctttccggaagcacacagtgcgcggggagcgttcctacagttggggaatggcggtcaatgtgtattctacctcgataacccaagagactatgagcagacatgacatcattgcatgggttaatgacatagtatctttaaactacacaaaagtggaacagctttgttcaggagcggcctattgccaattcatggacatgctcttccctggctgcattagtttgaagaaagtaaaatttcaagcaaagctggaacatgaatatattcacaattttaaacttctgcaagcatcatttaagcgaatgaacgttgataaggtaattccagtggagaagctagtgaaaggacgtttccaggacaacctggattttattcaatggtttaagaaattctatgatgctaactacgatgggaaggagtatgatcctgtagaggcacgacaagggcaagatgcaattcctcctcctgaccctggtgaacagatcttcaacctgccaaaaaagtctcaccatgcaaactcccccacagcaggtgcagctaaatcaagtccagcagctaaaccaggatccacaccttctcgaccctcatcagccaaaagggcttcttccagtggctcagcatccaaatccgataaagatttagaaacgcaggtcatacagcttaatgaacaggtacattcattaaaacttgcccttgaaggcgtggaaaaggaaagggatttctactttgggaagttgagagagatcgagctactctgccaagaacacgggcaggaaaatgatgacctcgtgcagagactaatggacatcctgtatgcttcagaagaacacgagggccacacagaagagccggaagcagaggagcaagcccacgaacagcagcccccgcagcaggaagagtactgacccaccccggctgctcttgacacttccattgtgtgtgggaacgtttcttctggagaattggaacatgtgtggccccaagctcaacagaaaccagttgttcccaatctgccgttaccatcaacgcactgttgcatatgccagccactgcgcttggttcccattttctttgccaaggtgtattagcggacggccctctggccacctacccgagagatcgtagggtcacatacatccaacttcaccacttggctgcttgagattggttctgctcttttcttcatttctttccagaacaactctttcccaccccaacaccactgccaccacccctctttttatcctggtgtgaaacaatggtaatttgatatatggtatttatattggcatttttcaacccagtgtcactagatgtcacacacatttgtggtgctttgatgtttgcaagtctaacctctgaacataaatttggtcaaataattggaacaaagggaaacagatacttgatatgaaagccataatgacggtgacttgtgtcgtgggggaaaacataaggtcattttctccctctactcacaatactaaagggaaaaaatggattcaaagctaggatttcagggcccagcagtgttcctccatcagcatgttagacaactacacagtatgttgttagttttgaaagacattcactcaaggaaaacaccatctcaactttgcccgctcaccatgtcccttgcccccatgtagcccatttcccaggttatgctcttttctttctcagggtcctctttggtgggcagccactccccgagatgttgccatcagttttctgcagtccaaagagggtatggttaggtacgggtcttcctgcctcattcctcttcctctttgtgtaggtttcagccacaaaactgtcattcactctaggggacccctactaaagggtaacttcaggtgtgcagccctgagctccaaggctctgcaccatgccacacacttgctgtaaggctagaagtgaagaccttattaataggagcataattgcgagggagaatcatggttctgcagtctggtgtagacactggaataacagcacagaaaaatctatgactcccaatatcttctagaataaagaattttccctctttaacacaagggccctccttgtcattgaccttagctaaaccatggcaattcataaatagaggaaacattaatgaattaaaagcattccttattttttaactaatatttgtacattttcttagtctctttccaagtctttgcctcttttttttctttatttttattttttcctttgacagatggtatcccttcctggatcattcatttcaccttggtttctaactttaggtttactttcacttgttatttgacttagcaggtgcaacaaaaacaagaaacaaatgtgcccaccccactttccgcttaactgaaaagcttaaaataaatttctgaattatgtatcctgaagctttgaaatttctttattaatcgatgaaatatgaattctaaattctagcattgaagcttttcaccaaaagaagtctctccaaaataaatcttttgcagcaaagtgatatttattgagttatgtggaaaagatggcttgtatttttcagattattacaacacactgtgcagaattagacagatgttccgtggtgtttggtttccctttcttctctctcctgctcactctgcattatagcagcagcttatttctctaaggctggacagcctggctctcggcagtgacgtcctcccacacctggtcacaagtagtagtggctgtgctatacccagcatcatgcttaacagcgtgttgcccttctgagcctgttgtactcactgatctctttaaaaacaaaaaatagctcttgtaaaaggtcacaataactctatgcacctgatactgcagtggttcctaggccattcttcatctgctctggacatctcagtcatacccaatgctcagtggatcatgaccaaactcctgtcatgtggatgcacgtgagtgggtagcagggagtcaggatcctgccttctccagcaaccccttactgctgtataacttgcataagcctccctggtgactcttgcaggaaccactccattgccctccagctccccagccttctcagttataaacatgctggccagatctcttagcctgcaaagagaactttccccagtcaccatagaccattctccttcctgaaggcttggggcagaccattcgtttatttagagaagagctatacattcttctttctggtcccatcttaaacgtcttctgttgtgctgcaccccagatggtgtctcagatgctttggggaatctttaacagctgaatttgagtcagtcctcttaggctgcacctccagcctctgcagatcccccctcatttcccatggatggtgggaccccattattctctcatctcggcattcagggaacactttccttagcggcccctggtcacatgtcatcgggctgggcaggaagcgtccctgggtgcgtgctccacttctccctctcaggaagcccagtttcatccttagtaccccccctcgtgcccgctgtcggctggttatagcacttccactgctactgtcagataggaagtgatcgaagcagggggcaaagagaaagcccatatttgttctaagcagaaaagcaggaaaaaaaaaaaaaaaaaaagaaagaaaaacacctgttgacctgagagaagtaaattccagaagggaaccaagaactcttcccttccctggtgagtatttccattattccgttaaggtttaatatgcattcagattacttttactaaataggacaccataaagcttttgttatatattaaatgtaaactgaaaggaatgtaaacatatgtattgttaattataaatatagataagtaatgacataatagatgaaaaagtcttattcagatgtatcacattcattttacattacccacctattgtcgcatggtagaatagttttttgtctctgaatatgtgaataacttgacttgcattgatctttttacatatttaataaaaaaaaaagtatatgttaaaaaaaaaa

SEQ ID NO: 456814 - DNA, 4091 bp, Homo sapiens
agcggaaaaacaaagcccccagctgtcagcagaggaaggaggcgacagcgccggagcagtgtcctgtttcccagaggaacagttcatttcaacagccagggagaaagcctggatgctcaagttggggaatggcggtcaatgtgtattctacctcgataacccaagagactatgagcagacatgacatcattgcatgggttaatgacatagtatctttaaactacacaaaagtggaacagctttgttcaggagcggcctattgccaattcatggacatgctcttccctggctgcattagtttgaagaaagtaaaatttcaagcaaagctggaacatgaatatattcacaattttaaacttctgcaagcatcatttaagcgaatgaacgttgataaggtaattccagtggagaagctagtgaaaggacgtttccaggacaacctggattttattcaatggtttaagaaattctatgatgctaactacgatgggaaggagtatgatcctgtagaggcacgacaagggcaagatgcaattcctcctcctgaccctggtgaacagatcttcaacctgccaaaaaagtctcaccatgcaaactcccccacagcaggtgcagctaaatcaagtccagcagctaaaccaggatccacaccttctcgaccctcatcagccaaaagggcttcttccagtggctcagcatccaaatccgataaagatttagaaacgcaggtcatacagcttaatgaacaggtacattcattaaaacttgcccttgaaggcgtggaaaaggaaagggatttctactttgggaagttgagagagatcgagctactctgccaagaacacgggcaggaaaatgatgacctcgtgcagagactaatggacatcctgtatgcttcagaagaacacgagggccacacagaagagccggaagcagaggagcaagcccacgaacagcagcccccgcagcaggaagagtactgacccaccccggctgctcttgacacttccattgtgtgtgggaacgtttcttctggagaattggaacatgtgtggccccaagctcaacagaaaccagttgttcccaatctgccgttaccatcaacgcactgttgcatatgccagccactgcgcttggttcccattttctttgccaaggtgtattagcggacggccctctggccacctacccgagagatcgtagggtcacatacatccaacttcaccacttggctgcttgagattggttctgctcttttcttcatttctttccagaacaactctttcccaccccaacaccactgccaccacccctctttttatcctggtgtgaaacaatggtaatttgatatatggtatttatattggcatttttcaacccagtgtcactagatgtcacacacatttgtggtgctttgatgtttgcaagtctaacctctgaacataaatttggtcaaataattggaacaaagggaaacagatacttgatatgaaagccataatgacggtgacttgtgtcgtgggggaaaacataaggtcattttctccctctactcacaatactaaagggaaaaaatggattcaaagctaggatttcagggcccagcagtgttcctccatcagcatgttagacaactacacagtatgttgttagttttgaaagacattcactcaaggaaaacaccatctcaactttgcccgctcaccatgtcccttgcccccatgtagcccatttcccaggttatgctcttttctttctcagggtcctctttggtgggcagccactccccgagatgttgccatcagttttctgcagtccaaagagggtatggttaggtacgggtcttcctgcctcattcctcttcctctttgtgtaggtttcagccacaaaactgtcattcactctaggggacccctactaaagggtaacttcaggtgtgcagccctgagctccaaggctctgcaccatgccacacacttgctgtaaggctagaagtgaagaccttattaataggagcataattgcgagggagaatcatggttctgcagtctggtgtagacactggaataacagcacagaaaaatctatgactcccaatatcttctagaataaagaattttccctctttaacacaagggccctccttgtcattgaccttagctaaaccatggcaattcataaatagaggaaacattaatgaattaaaagcattccttattttttaactaatatttgtacattttcttagtctctttccaagtctttgcctcttttttttctttatttttattttttcctttgacagatggtatcccttcctggatcattcatttcaccttggtttctaactttaggtttactttcacttgttatttgacttagcaggtgcaacaaaaacaagaaacaaatgtgcccaccccactttccgcttaactgaaaagcttaaaataaatttctgaattatgtatcctgaagctttgaaatttctttattaatcgatgaaatatgaattctaaattctagcattgaagcttttcaccaaaagaagtctctccaaaataaatcttttgcagcaaagtgatatttattgagttatgtggaaaagatggcttgtatttttcagattattacaacacactgtgcagaattagacagatgttccgtggtgtttggtttccctttcttctctctcctgctcactctgcattatagcagcagcttatttctctaaggctggacagcctggctctcggcagtgacgtcctcccacacctggtcacaagtagtagtggctgtgctatacccagcatcatgcttaacagcgtgttgcccttctgagcctgttgtactcactgatctctttaaaaacaaaaaatagctcttgtaaaaggtcacaataactctatgcacctgatactgcagtggttcctaggccattcttcatctgctctggacatctcagtcatacccaatgctcagtggatcatgaccaaactcctgtcatgtggatgcacgtgagtgggtagcagggagtcaggatcctgccttctccagcaaccccttactgctgtataacttgcataagcctccctggtgactcttgcaggaaccactccattgccctccagctccccagccttctcagttataaacatgctggccagatctcttagcctgcaaagagaactttccccagtcaccatagaccattctccttcctgaaggcttggggcagaccattcgtttatttagagaagagctatacattcttctttctggtcccatcttaaacgtcttctgttgtgctgcaccccagatggtgtctcagatgctttggggaatctttaacagctgaatttgagtcagtcctcttaggctgcacctccagcctctgcagatcccccctcatttcccatggatggtgggaccccattattctctcatctcggcattcagggaacactttccttagcggcccctggtcacatgtcatcgggctgggcaggaagcgtccctgggtgcgtgctccacttctccctctcaggaagcccagtttcatccttagtaccccccctcgtgcccgctgtcggctggttatagcacttccactgctactgtcagataggaagtgatcgaagcagggggcaaagagaaagcccatatttgttctaagcagaaaagcaggaaaaaaaaaaaaaaaaaaagaaagaaaaacacctgttgacctgagagaagtaaattccagaagggaaccaagaactcttcccttccctggtgagtatttccattattccgttaaggtttaatatgcattcagattacttttactaaataggacaccataaagcttttgttatatattaaatgtaaactgaaaggaatgtaaacatatgtattgttaattataaatatagataagtaatgacataatagatgaaaaagtcttattcagatgtatcacattcattttacattacccacctattgtcgcatggtagaatagttttttgtctctgaatatgtgaataacttgacttgcattgatctttttacatatttaataaaaaaaaaagtatatgttaaaaaaaaaa

SEQ ID NO: 456815 - DNA, 4029 bp, Homo sapiens
agcggaaaaacaaagcccccagctgtcagcagaggaaggaggcgacagcgccggagcagttggggaatggcggtcaatgtgtattctacctcgataacccaagagactatgagcagacatgacatcattgcatgggttaatgacatagtatctttaaactacacaaaagtggaacagctttgttcaggagcggcctattgccaattcatggacatgctcttccctggctgcattagtttgaagaaagtaaaatttcaagcaaagctggaacatgaatatattcacaattttaaacttctgcaagcatcatttaagcgaatgaacgttgataaggtaattccagtggagaagctagtgaaaggacgtttccaggacaacctggattttattcaatggtttaagaaattctatgatgctaactacgatgggaaggagtatgatcctgtagaggcacgacaagggcaagatgcaattcctcctcctgaccctggtgaacagatcttcaacctgccaaaaaagtctcaccatgcaaactcccccacagcaggtgcagctaaatcaagtccagcagctaaaccaggatccacaccttctcgaccctcatcagccaaaagggcttcttccagtggctcagcatccaaatccgataaagatttagaaacgcaggtcatacagcttaatgaacaggtacattcattaaaacttgcccttgaaggcgtggaaaaggaaagggatttctactttgggaagttgagagagatcgagctactctgccaagaacacgggcaggaaaatgatgacctcgtgcagagactaatggacatcctgtatgcttcagaagaacacgagggccacacagaagagccggaagcagaggagcaagcccacgaacagcagcccccgcagcaggaagagtactgacccaccccggctgctcttgacacttccattgtgtgtgggaacgtttcttctggagaattggaacatgtgtggccccaagctcaacagaaaccagttgttcccaatctgccgttaccatcaacgcactgttgcatatgccagccactgcgcttggttcccattttctttgccaaggtgtattagcggacggccctctggccacctacccgagagatcgtagggtcacatacatccaacttcaccacttggctgcttgagattggttctgctcttttcttcatttctttccagaacaactctttcccaccccaacaccactgccaccacccctctttttatcctggtgtgaaacaatggtaatttgatatatggtatttatattggcatttttcaacccagtgtcactagatgtcacacacatttgtggtgctttgatgtttgcaagtctaacctctgaacataaatttggtcaaataattggaacaaagggaaacagatacttgatatgaaagccataatgacggtgacttgtgtcgtgggggaaaacataaggtcattttctccctctactcacaatactaaagggaaaaaatggattcaaagctaggatttcagggcccagcagtgttcctccatcagcatgttagacaactacacagtatgttgttagttttgaaagacattcactcaaggaaaacaccatctcaactttgcccgctcaccatgtcccttgcccccatgtagcccatttcccaggttatgctcttttctttctcagggtcctctttggtgggcagccactccccgagatgttgccatcagttttctgcagtccaaagagggtatggttaggtacgggtcttcctgcctcattcctcttcctctttgtgtaggtttcagccacaaaactgtcattcactctaggggacccctactaaagggtaacttcaggtgtgcagccctgagctccaaggctctgcaccatgccacacacttgctgtaaggctagaagtgaagaccttattaataggagcataattgcgagggagaatcatggttctgcagtctggtgtagacactggaataacagcacagaaaaatctatgactcccaatatcttctagaataaagaattttccctctttaacacaagggccctccttgtcattgaccttagctaaaccatggcaattcataaatagaggaaacattaatgaattaaaagcattccttattttttaactaatatttgtacattttcttagtctctttccaagtctttgcctcttttttttctttatttttattttttcctttgacagatggtatcccttcctggatcattcatttcaccttggtttctaactttaggtttactttcacttgttatttgacttagcaggtgcaacaaaaacaagaaacaaatgtgcccaccccactttccgcttaactgaaaagcttaaaataaatttctgaattatgtatcctgaagctttgaaatttctttattaatcgatgaaatatgaattctaaattctagcattgaagcttttcaccaaaagaagtctctccaaaataaatcttttgcagcaaagtgatatttattgagttatgtggaaaagatggcttgtatttttcagattattacaacacactgtgcagaattagacagatgttccgtggtgtttggtttccctttcttctctctcctgctcactctgcattatagcagcagcttatttctctaaggctggacagcctggctctcggcagtgacgtcctcccacacctggtcacaagtagtagtggctgtgctatacccagcatcatgcttaacagcgtgttgcccttctgagcctgttgtactcactgatctctttaaaaacaaaaaatagctcttgtaaaaggtcacaataactctatgcacctgatactgcagtggttcctaggccattcttcatctgctctggacatctcagtcatacccaatgctcagtggatcatgaccaaactcctgtcatgtggatgcacgtgagtgggtagcagggagtcaggatcctgccttctccagcaaccccttactgctgtataacttgcataagcctccctggtgactcttgcaggaaccactccattgccctccagctccccagccttctcagttataaacatgctggccagatctcttagcctgcaaagagaactttccccagtcaccatagaccattctccttcctgaaggcttggggcagaccattcgtttatttagagaagagctatacattcttctttctggtcccatcttaaacgtcttctgttgtgctgcaccccagatggtgtctcagatgctttggggaatctttaacagctgaatttgagtcagtcctcttaggctgcacctccagcctctgcagatcccccctcatttcccatggatggtgggaccccattattctctcatctcggcattcagggaacactttccttagcggcccctggtcacatgtcatcgggctgggcaggaagcgtccctgggtgcgtgctccacttctccctctcaggaagcccagtttcatccttagtaccccccctcgtgcccgctgtcggctggttatagcacttccactgctactgtcagataggaagtgatcgaagcagggggcaaagagaaagcccatatttgttctaagcagaaaagcaggaaaaaaaaaaaaaaaaaaagaaagaaaaacacctgttgacctgagagaagtaaattccagaagggaaccaagaactcttcccttccctggtgagtatttccattattccgttaaggtttaatatgcattcagattacttttactaaataggacaccataaagcttttgttatatattaaatgtaaactgaaaggaatgtaaacatatgtattgttaattataaatatagataagtaatgacataatagatgaaaaagtcttattcagatgtatcacattcattttacattacccacctattgtcgcatggtagaatagttttttgtctctgaatatgtgaataacttgacttgcattgatctttttacatatttaataaaaaaaaaagtatatgttaaaaaaaaaa

SEQ ID NO: 456816 - DNA, 3802 bp, Homo sapiens
agctgccagagggcggggccgcaggagggcggggcgcgagcgagagctgggagaaggcagtgagcgagcaggcggcaggcacggtccgtgcggagcaggcgagcgagcgggaagacgcagccaccttcctcaccagccagcccacagcggtttgttccccttctcgggagtgcgccaatgcctgggccgacccaaaccctgtccccaaatggcgagaacaacaacgacatcatccaggataataacgggaccatcattcctttccggaagcacacagtgcgcggggagcgttcctacagttggggaatggcggtcaatgtgtattctacctcgataacccaagagactatgagcagacatgacatcattgcatgggttaatgacatagtatctttaaactacacaaaagtggaacagctttgttcaggagcggcctattgccaattcatggacatgctcttccctggctgcattagtttgaagaaagtaaaatttcaagcaaagctggaacatgaatatattcacaattttaaacttctgcaagcatcatttaagcgaatgaacgttgataaggtaattccagtggagaagctagtgaaaggacgtttccaggacaacctggattttattcaatggtttaagaaattctatgatgctaactacgatgggaaggagtatgatcctgtagaggcacgacaagggcaagatgcaattcctcctcctgaccctggtgaacagatcttcaacctgccaaaaaagtctcaccatgcaaactcccccacagcaggtgcagctaaatcaagtccagcagctaaaccaggatccacaccttctcgaccctcatcagccaaaagggcttcttccagtggctcagcatccaaatccgataaagatttagaaacgcaggtcatacagcttaatgaacaggtacattcattaaaacttgcccttgaaggcgtggaaaaggaaagggatttctactttgggaagttgagagagatcgagctactctgccaagaacacgggcaggaaaatgatgacctcgtgcagagactaatggacatcctgtatgcttcagaagaacacgagggccacacagaagagccggaagcagaggagcaagcccacgaacagcagcccccgcagcaggaagagtactgacccaccccggctgctcttgacacttccattgtgtgtgggaacgtttcttctggagaattggaacatgtgtggccccaagctcaacagaaaccagttgttcccaatctgccgttaccatcaacgcactgttgcatatgccagccactgcgcttggttcccattttctttgccaaggtgtattagcggacggccctctggccacctacccgagagatcgtagggtcacatacatccaacttcaccacttggctgcttgagattggttctgctcttttcttcatttctttccagaacaactctttcccaccccaacaccactgccaccacccctctttttatcctggtgtgaaacaatggtaatttgatatatggtatttatattggcatttttcaacccagtgtcactagatgtcacacacatttgtggtgctttgatgtttgcaagtctaacctctgaacataaatttggtcaaataattggaacaaagggaaacagatacttgatatgaaagccataatgacggtgacttgtgtcgtgggggaaaacataaggtcattttctccctctactcacaatactaaagggaaaaaatggattcaaagctaggatttcagggcccagcagtgttcctccatcagcatgttagacaactacacagtatgttgttagttttgaaagacattcactcaaggaaaacaccatctcaactttgcccgctcaccatgtcccttgcccccatgtagcccatttcccaggttatgctcttttctttctcagggtcctctttggtgggcagccactccccgagatgttgccatcagttttctgcagtccaaagagggtatggttaggtacgggtcttcctgcctcattcctcttcctctttgtgtaggtttcagccacaaaactgtcattcactctaggggacccctactaaagggtaacttcaggtgtgcagccctgagctccaaggctctgcaccatgccacacacttgctgtaaggctagaagtgaagaccttattaataggagcataattgcgagggagaatcatggttctgcagtctggtgtagacactggaataacagcacagaaaaatctatgactcccaatatcttctagaataaagaattttccctctttaacacaagggccctccttgtcattgaccttagctaaaccatggcaattcataaatagaggaaacattaatgaattaaaagcattccttattttttaactaatatttgtacattttcttagtctctttccaagtctttgcctcttttttttctttatttttattttttcctttgacagatggtatcccttcctggatcattcatttcaccttggtttctaactttaggtttactttcacttgttatttgacttagcaggtgcaacaaaaacaagaaacaaatgtgcccaccccactttccgcttaactgaaaagcttaaaataaatttctgaattatgtatcctgaagctttgaaatttctttattaatcgatgaaatatgaattctaaattctagcattgaagcttttcaccaaaagaagtctctccaaaataaatcttttgcagcaaagtgatatttattgagttatgtggaaaagatggcttgtatttttcagattattacaacacactgtgcagaattagacagatgttccgtggtgtttggtttccctttcttctctctcctgctcactctgcattatagcagcagcttatttctctaaggctggacagcctggctctcggcagtgacgtcctcccacacctggtcacaagtagtagtggctgtgctatacccagcatcatgcttaacagcgtgttgcccttctgagcctgttgtactcactgatctctttaaaaacaaaaaatagctcttgtaaaaggtcacaataactctatgcacctgatactgcagtggttcctaggccattcttcatctgctctggacatctcagtcatacccaatgctcagtggatcatgaccaaactcctgtcatgtggatgcacgtgagtgggtagcagggagtcaggatcctgccttctccagcaaccccttactgctgtataacttgcataagcctccctggtgactcttgcaggaaccactccattgccctccagctccccagccttctcagttataaacatgctggccagatctcttagcctgcaaagagaactttccccagtcaccatagaccattctccttcctgaaggcttggggcagaccattcgtttatttagagaagagctatacattcttctttctggtcccatcttaaacgtcttctgttgtgctgcaccccagatggtgtctcagatgctttggggaatctttaacagctgaatttgagtcagtcctcttaggctgcacctccagcctctgcagatcccccctcatttcccatggatggtgggaccccattattctctcatctcggcattcagggaacactttccttagcggcccctggtcacatgtcatcgggctgggcaggaagcgtccctgggtgcgtgctccacttctccctctcaggaagcccagtttcatccttagtaccccccctcgtgcccgctgtcgggctagtcggggggatctctagagtacttagcaat

SEQ ID NO: 456817 - DNA, 2757 bp, Homo sapiens
agctgccagagggcggggccgcaggagggcggggcgcgagcgagagctgggagaaggcagtgagcgagcaggcggcaggcacggtccgtgcggagcaggcgagcgagcgggaagacgcagccaccttcctcaccagccagcccacagcggtttgttccccttctcgggagtgcgccaatgcctgggccgacccaaaccctgtccccaaatggcgagaacaacaacgacatcatccaggataataacgggaccatcattcctttccggaagcacacagtgcgcggggagcgttcctacagttggggaatggcggtcaatgtgtattctacctcgataacccaagagactatgagcagacatgacatcattgcatgggttaatgacatagtatctttaaactacacaaaagtggaacagctttgttcaggagcggcctattgccaattcatggacatgctcttccctggctgcattagtttgaagaaagtaaaatttcaagcaaagctggaacatgaatatattcacaattttaaacttctgcaagcatcatttaagcgaatgaacgttgataaggtaattccagtggagaagctagtgaaaggacgtttccaggacaacctggattttattcaatggtttaagaaattctatgatgctaactacgatgggaaggagtatgatcctgtagaggcacgacaagggcaagatgcaattcctcctcctgaccctggtgaacagatcttcaacctgccaaaaaagtctcaccatgcaaactcccccacagcaggtgcagctaaatcaagtccagcagctaaaccaggatccacaccttctcgaccctcatcagccaaaagggcttcttccagtggctcagcatccaaatccgataaagatttagaaacgcaggtcatacagcttaatgaacaggtacattcattaaaacttgcccttgaaggcgtggaaaaggaaagggatttctactttgggaagttgagagagatcgagctactctgccaagaacacgggcaggaaaatgatgacctcgtgcagagactaatggacatcctgtatgcttcagaagaacacgagggccacacagaagagccggaagcagaggagcaagcccacgaacagcagcccccgcagcaggaagagtactgacccaccccggctgctcttgacacttccattgtgtgtgggaacgtttcttctggagaattggaacatgtgtggccccaagctcaacagaaaccagttgttcccaatctgccgttaccatcaacgcactgttgcatatgccagccactgcgcttggttcccattttctttgccaaggtgtattagcggacggccctctggccacctacccgagagatcgtagggtcacatacatccaacttcaccacttggctgcttgagattggttctgctcttttcttcatttctttccagaacaactctttcccaccccaacaccactgccaccacccctctttttatcctggtgtgaaacaatggtaatttgatatatggtatttatattggcatttttcaacccagtgtcactagatgtcacacacatttgtggtgctttgatgtttgcaagtctaacctctgaacataaatttggtcaaataattggaacaaagggaaacagatacttgatatgaaagccataatgacggtgacttgtgtcgtgggggaaaacataaggtcattttctccctctactcacaatactaaagggaaaaaatggattcaaagctaggatttcagggcccagcagtgttcctccatcagcatgttagacaactacacagtatgttgttagttttgaaagacattcactcaaggaaaacaccatctcaactttgcccgctcaccatgtcccttgcccccatgtagcccatttcccaggttatgctcttttctttctcagggtcctctttggtgggcagccactccccgagatgttgccatcagttttctgcagtccaaagagggtatggttaggtacgggtcttcctgcctcattcctcttcctctttgtgtaggtttcagccacaaaactgtcattcactctaggggacccctactaaagggtaacttcaggtgtgcagccctgagctccaaggctctgcaccatgccacacacttgctgtaaggctagaagtgaagaccttattaataggagcataattgcgagggagaatcatggttctgcagtctggtgtagacactggaataacagcacagaaaaatctatgactcccaatatcttctagaataaagaattttccctctttaacacaagggccctccttgtcattgaccttagctaaaccatggcaattcataaatagaggaaacattaatgaattaaaagcattccttattttttaaaaaaaaaaaaaaaaaaaagggaaaacaaaaatacaaaaaagaaaaaaaaaaaggttgccggccggcctgccgggcacagagaaaaagattctaaaacccccttcggtgggggggccgcggcgacccaagtaggttagtggtacaactggcgccaaaagcgcggtaccaaaaggaagaccgcgcggcccagtgagacactggtggttgggttttccaccacaaataaaaaggcccgcgggcggcacacagcgggcgttccgcgaaacaactccagagtggggtccgagggcgaaaccggggccctactacacagggcgccaacccgagcccagataaaaataggcgggccgagca

SEQ ID NO: 456818 - DNA, 756 bp, Homo sapiens
agctgccagagggcggggccgcaggagggcggggcgcgagcgagagctgggagaaggcagtgagcgagcaggcggcaggcacggtccgtgcggagcaggcgagcgagcgggaagacgcagccaccttcctcaccagccagcccacagcggtttgttccccttctcgggagtgcgccaatgcctgggccgacccaaaccctgtccccaaatggcgagaacaacaacgacatcatccaggataataacgggaccatcattcctttccggaagcacacagtgcgcggggagcgttcctacagttggggaatggcggtcaatgtgtattctacctcgataacccaagagactatgagcagacatgacatcattgcatgggttaatgacatagtatctttaaactacacaaaagtggaacagctttgttcaggtaagacatattcttttaagtgtttacctaaatatttacagtctgtcatgtggaatgtgattttatgaaccacagctgctatattttgggtaggaaaaagtatatattgctattggcatgtaattaaagggggaaaaactcagatataactaaaggacgtattgggaaaagtgtttatgagcatccaggagcacaagcagagccacacggacacgtattggaaaggtctcttgcttgagcttcgtaatgcctttcactggctcctagcctcttctctgtcatcccatctgccatcacacttgcctcctgaaaacaccaattggttctta

SEQ ID NO: 456819 - DNA, 883 bp, Homo sapiens
ctagaattcagcggccgctgaattctagcgagcaggcggcaggcacggtccgtgcggagcaggcgagcgagcgggaagacgcagccaccttcctcaccagccagcccacagcggtttgttccccttctcgggagtgcgccaatgcctgggccgacccaaaccctgtccccaaatggcgagaacaacaacgacatcatccaggataataacgggaccatcattcctttccggaagcacacagtgcgcggggagcgttcctacaggtaatggggctggcacgagagcagcgccggggaccgccgtgagggcgcgcggaaatccagcccgttatataatggagcagacactgcctgcgacccctgctgcaggcatgcatttgtgaaggcggttgtgattatttggtatctgtttccatgtgtcatgttgggtttgcattgaggctccgcgactgcagatggaaagcattttgtgaataggtttgctgccttcgaggggtctccctccatctctttccttccacactgataaaaatgcatgctgttttcccccgctgtccaaagggagacaggcagtagcacttcctttcctccttcccttttagattttaaaggagccattaggtagcagtgccaaaaggcagaaaacgggagggtggggagaaaaacgtttgcgcttaacctggagagtgtgcaggaaagatggaatcctctagattaagctgcagtctgtgatgttaaaccgccagattgatggagctttgtaagaattctgctcgctgattggtgcagggattgacagcagaggtgatagtgtcagacattcaccaaaattttctccatagaaccctaggtttattagaaagagactggactgcaaaggactt

SEQ ID NO: 456820 - DNA, 448 bp, Homo sapiens
ctgctgaaatatttatactccttctatatgggaagggatcactggaggtatctcttatatgttgttgtaagctcttttcatatcattcattttctatgtatctaaaacacacttttaatattgccagtatttatcatttattctgattgctttcaggtgcagctaaatcaagtccagcagctaaaccaggatccacaccttctcgaccctcatcagccaaaagggcttcttccagtggctcagcatccaaatccgataaagatttagaaacgcaggtcatacagcttaatgaacaggtaatgcatcagctctggccacgcctctaggagcagtgacgtgtgtaagaggtagggggcctaggatcccctaggactggggtaagggagggaagggtaaggaagaatccttggtttcaagtaagtgagaataaaaagaattgttcgaagac

SEQ ID NO: 456821 - DNA, 1282 bp, Homo sapiens
  misc_feature (1280)..(1281): n is a, c, g, or t
agcggaaaaacaaagcccccagctgtcagcagaggaaggaggcgacagcgccggagcagtgtcctgtttcccagaggaacagttcatttcaacagccagggagaaagcctggatgctcaagttggggaatggcggtcaatgtgtattctacctcgataacccaagagactatgagcagacatgacatcattgcatgggttaatgacatagtatctttaaactacacaaaagtggaacagctttgttcaggagcggcctattgccaattcatggacatgctcttccctggctgcattagtttgaagaaagtaaaatttcaagcaaagctggaacatgaatatattcacaattttaaacttctgcaagcatcatttaagcgaatgaacgttgataaggtaattccagtggagaagctagtgaaaggacgtttccaggacaacctggattttattcaatggtttaagaaattctatgatgctaactacgatgggaaggagtatgatcctgtagaggcacgacaagggcaagatgcaattcctcctcctgaccctggtgaacagatcttcaacctgccaaaaaagtctcaccatgcaaactcccccacagcaggtgcagctaaatcaagtccagcagctaaaccaggatccacaccttctcgaccctcatcagccaaaagggcttcttccagtggctcagcatccaaatccgataaagatttagaaacgcaggtcatacagcttaatgaacaggtaatgcatcagctctggccacgcctctaggagcagtgacgtgtgtaagaggtagggggcctaggatcccctaggactggggtaagggagggaagggtaaggaagaatccttggtttcaagtaagtgagaataaaaagaattgttcgaagacaaaatcagtagcccatgatgaataaaaagtgttagtcacaaatctcaaagctgtacattaagatggggcagatggctcagccttgctgcagacttcaggctaccttcccctcccctgctcctcagggctgtcaagagctccaggctagaccgttgcccatcctgcccacttctggccattctagatagtgctgcattagggtgagtctgcctccctctctttttaaaggctgggtcagggttagtctgtctccctcccactctcttcttttttcccttcttcctttctttcttcagctattagtagttgagcttattctatatgaaagatattacgcttaatgctggtaatataaaggtagtaaaatagataccttccnnc

SEQ ID NO: 456822 - DNA, 4207 bp, Homo sapiens
agctgccagagggcggggccgcaggagggcggggcgcgagcgagagctgggagaaggcagtgagcgagcaggcggcaggcacggtccgtgcggagcaggcgagcgagcgggaagacgcagccaccttcctcaccagccagcccacagcggtttgttccccttctcgggagtgcgccaatgcctgggccgacccaaaccctgtccccaaatggcgagaacaacaacgacatcatccaggataataacgggaccatcattcctttccggaagcacacagtgcgcggggagcgttcctacagttggggaatggcggtcaatgtgtattctacctcgataacccaagagactatgagcagacatgacatcattgcatgggttaatgacatagtatctttaaactacacaaaagtggaacagctttgttcaggagcggcctattgccaattcatggacatgctcttccctggctgcattagtttgaagaaagtaaaatttcaagcaaagctggaacatgaatatattcacaattttaaacttctgcaagcatcatttaagcgaatgaacgttgataaggtaattccagtggagaagctagtgaaaggacgtttccaggacaacctggattttattcaatggtttaagaaattctatgatgctaactacgatgggaaggagtatgatcctgtagaggcacgacaagggcaagatgcaattcctcctcctgaccctggtgaacagatcttcaacctgccaaaaaagtctcaccatgcaaactcccccacagcaggtgcagctaaatcaagtccagcagctaaaccaggatccacaccttctcgaccctcatcagccaaaagggcttcttccagtggctcagcatccaaatccgataaagatttagaaacgcaggtcatacagcttaatgaacaggtacattcattaaaacttgcccttgaaggcgtggaaaaggaaagggatttctactttgggaagttgagagagatcgagctactctgccaagaacacgggcaggaaaatgatgacctcgtgcagagactaatggacatcctgtatgcttcagaagaacacgagggccacacagaagagccggaagcagaggagcaagcccacgaacagcagcccccgcagcaggaagagtactgacccaccccggctgctcttgacacttccattgtgtgtgggaacgtttcttctggagaattggaacatgtgtggccccaagctcaacagaaaccagttgttcccaatctgccgttaccatcaacgcactgttgcatatgccagccactgcgcttggttcccattttctttgccaaggtgtattagcggacggccctctggccacctacccgagagatcgtagggtcacatacatccaacttcaccacttggctgcttgagattggttctgctcttttcttcatttctttccagaacaactctttcccaccccaacaccactgccaccacccctctttttatcctggtgtgaaacaatggtaatttgatatatggtatttatattggcatttttcaacccagtgtcactagatgtcacacacatttgtggtgctttgatgtttgcaagtctaacctctgaacataaatttggtcaaataattggaacaaagggaaacagatacttgatatgaaagccataatgacggtgacttgtgtcgtgggggaaaacataaggtcattttctccctctactcacaatactaaagggaaaaaatggattcaaagctaggatttcagggcccagcagtgttcctccatcagcatgttagacaactacacagtatgttgttagttttgaaagacattcactcaaggaaaacaccatctcaactttgcccgctcaccatgtcccttgcccccatgtagcccatttcccaggttatgctcttttctttctcagggtcctctttggtgggcagccactccccgagatgttgccatcagttttctgcagtccaaagagggtatggttaggtacgggtcttcctgcctcattcctcttcctctttgtgtaggtttcagccacaaaactgtcattcactctaggggacccctactaaagggtaacttcaggtgtgcagccctgagctccaaggctctgcaccatgccacacacttgctgtaaggctagaagtgaagaccttattaataggagcataattgcgagggagaatcatggttctgcagtctggtgtagacactggaataacagcacagaaaaatctatgactcccaatatcttctagaataaagaattttccctctttaacacaagggccctccttgtcattgaccttagctaaaccatggcaattcataaatagaggaaacattaatgaattaaaagcattccttattttttaactaatatttgtacattttcttagtctctttccaagtctttgcctcttttttttctttatttttattttttcctttgacagatggtatcccttcctggatcattcatttcaccttggtttctaactttaggtttactttcacttgttatttgacttagcaggtgcaacaaaaacaagaaacaaatgtgcccaccccactttccgcttaactgaaaagcttaaaataaatttctgaattatgtatcctgaagctttgaaatttctttattaatcgatgaaatatgaattctaaattctagcattgaagcttttcaccaaaagaagtctctccaaaataaatcttttgcagcaaagtgatatttattgagttatgtggaaaagatggcttgtatttttcagattattacaacacactgtgcagaattagacagatgttccgtggtgtttggtttccctttcttctctctcctgctcactctgcattatagcagcagcttatttctctaaggctggacagcctggctctcggcagtgacgtcctcccacacctggtcacaagtagtagtggctgtgctatacccagcatcatgcttaacagcgtgttgcccttctgagcctgttgtactcactgatctctttaaaaacaaaaaatagctcttgtaaaaggtcacaataactctatgcacctgatactgcagtggttcctaggccattcttcatctgctctggacatctcagtcatacccaatgctcagtggatcatgaccaaactcctgtcatgtggatgcacgtgagtgggtagcagggagtcaggatcctgccttctccagcaaccccttactgctgtataacttgcataagcctccctggtgactcttgcaggaaccactccattgccctccagctccccagccttctcagttataaacatgctggccagatctcttagcctgcaaagagaactttccccagtcaccatagaccattctccttcctgaaggcttggggcagaccattcgtttatttagagaagagctatacattcttctttctggtcccatcttaaacgtcttctgttgtgctgcaccccagatggtgtctcagatgctttggggaatctttaacagctgaatttgagtcagtcctcttaggctgcacctccagcctctgcagatcccccctcatttcccatggatggtgggaccccattattctctcatctcggcattcagggaacactttccttagcggcccctggtcacatgtcatcgggctgggcaggaagcgtccctgggtgcgtgctccacttctccctctcaggaagcccagtttcatccttagtaccccccctcgtgcccgctgtcggctggttatagcacttccactgctactgtcagataggaagtgatcgaagcagggggcaaagagaaagcccatatttgttctaagcagaaaagcaggaggaaccaagaactcttcccttccctggtgagtatttccattattccgttaaggtttaatatgcattcagattacttttactaaataggacaccataaagcttttgttatatattaaatgtaaactgaaaggaatgtaaacatatgtattgttaattataaatatagataagtaatgacataatagatgaaaaagtcttattcagatgtatcacattcattttacattacccacctattgtcgcatggtagaatagttttttgtctctgaatatgtgaataacttgacttgcattgatctttttacatatttaataaaaaaaaaagtatatgttaaaaaaaaaa

SEQ ID NO: 456823 - DNA, 4213 bp, Homo sapiens
agcggatagtatcgaccctggggccgcgctgcgaggcggaggttcggtcccagctggggtgaagtgtgcagaccggttgcgattgtggtcagacgcagcacctacttctaatctgaggacccgcgatttacacttttgctgaataggacactgtggaatgaaacagaacagagatcaaaagtgtcctgtttcccagaggaacagttcatttcaacagccagggagaaagcctggatgctcaagttggggaatggcggtcaatgtgtattctacctcgataacccaagagactatgagcagacatgacatcattgcatgggttaatgacatagtatctttaaactacacaaaagtggaacagctttgttcaggagcggcctattgccaattcatggacatgctcttccctggctgcattagtttgaagaaagtaaaatttcaagcaaagctggaacatgaatatattcacaattttaaacttctgcaagcatcatttaagcgaatgaacgttgataaggtaattccagtggagaagctagtgaaaggacgtttccaggacaacctggattttattcaatggtttaagaaattctatgatgctaactacgatgggaaggagtatgatcctgtagaggcacgacaagggcaagatgcaattcctcctcctgaccctggtgaacagatcttcaacctgccaaaaaagtctcaccatgcaaactcccccacagcaggtgcagctaaatcaagtccagcagctaaaccaggatccacaccttctcgaccctcatcagccaaaagggcttcttccagtggctcagcatccaaatccgataaagatttagaaacgcaggtcatacagcttaatgaacaggtacattcattaaaacttgcccttgaaggcgtggaaaaggaaagggatttctactttgggaagttgagagagatcgagctactctgccaagaacacgggcaggaaaatgatgacctcgtgcagagactaatggacatcctgtatgcttcagaagaacacgagggccacacagaagagccggaagcagaggagcaagcccacgaacagcagcccccgcagcaggaagagtactgacccaccccggctgctcttgacacttccattgtgtgtgggaacgtttcttctggagaattggaacatgtgtggccccaagctcaacagaaaccagttgttcccaatctgccgttaccatcaacgcactgttgcatatgccagccactgcgcttggttcccattttctttgccaaggtgtattagcggacggccctctggccacctacccgagagatcgtagggtcacatacatccaacttcaccacttggctgcttgagattggttctgctcttttcttcatttctttccagaacaactctttcccaccccaacaccactgccaccacccctctttttatcctggtgtgaaacaatggtaatttgatatatggtatttatattggcatttttcaacccagtgtcactagatgtcacacacatttgtggtgctttgatgtttgcaagtctaacctctgaacataaatttggtcaaataattggaacaaagggaaacagatacttgatatgaaagccataatgacggtgacttgtgtcgtgggggaaaacataaggtcattttctccctctactcacaatactaaagggaaaaaatggattcaaagctaggatttcagggcccagcagtgttcctccatcagcatgttagacaactacacagtatgttgttagttttgaaagacattcactcaaggaaaacaccatctcaactttgcccgctcaccatgtcccttgcccccatgtagcccatttcccaggttatgctcttttctttctcagggtcctctttggtgggcagccactccccgagatgttgccatcagttttctgcagtccaaagagggtatggttaggtacgggtcttcctgcctcattcctcttcctctttgtgtaggtttcagccacaaaactgtcattcactctaggggacccctactaaagggtaacttcaggtgtgcagccctgagctccaaggctctgcaccatgccacacacttgctgtaaggctagaagtgaagaccttattaataggagcataattgcgagggagaatcatggttctgcagtctggtgtagacactggaataacagcacagaaaaatctatgactcccaatatcttctagaataaagaattttccctctttaacacaagggccctccttgtcattgaccttagctaaaccatggcaattcataaatagaggaaacattaatgaattaaaagcattccttattttttaactaatatttgtacattttcttagtctctttccaagtctttgcctcttttttttctttatttttattttttcctttgacagatggtatcccttcctggatcattcatttcaccttggtttctaactttaggtttactttcacttgttatttgacttagcaggtgcaacaaaaacaagaaacaaatgtgcccaccccactttccgcttaactgaaaagcttaaaataaatttctgaattatgtatcctgaagctttgaaatttctttattaatcgatgaaatatgaattctaaattctagcattgaagcttttcaccaaaagaagtctctccaaaataaatcttttgcagcaaagtgatatttattgagttatgtggaaaagatggcttgtatttttcagattattacaacacactgtgcagaattagacagatgttccgtggtgtttggtttccctttcttctctctcctgctcactctgcattatagcagcagcttatttctctaaggctggacagcctggctctcggcagtgacgtcctcccacacctggtcacaagtagtagtggctgtgctatacccagcatcatgcttaacagcgtgttgcccttctgagcctgttgtactcactgatctctttaaaaacaaaaaatagctcttgtaaaaggtcacaataactctatgcacctgatactgcagtggttcctaggccattcttcatctgctctggacatctcagtcatacccaatgctcagtggatcatgaccaaactcctgtcatgtggatgcacgtgagtgggtagcagggagtcaggatcctgccttctccagcaaccccttactgctgtataacttgcataagcctccctggtgactcttgcaggaaccactccattgccctccagctccccagccttctcagttataaacatgctggccagatctcttagcctgcaaagagaactttccccagtcaccatagaccattctccttcctgaaggcttggggcagaccattcgtttatttagagaagagctatacattcttctttctggtcccatcttaaacgtcttctgttgtgctgcaccccagatggtgtctcagatgctttggggaatctttaacagctgaatttgagtcagtcctcttaggctgcacctccagcctctgcagatcccccctcatttcccatggatggtgggaccccattattctctcatctcggcattcagggaacactttccttagcggcccctggtcacatgtcatcgggctgggcaggaagcgtccctgggtgcgtgctccacttctccctctcaggaagcccagtttcatccttagtaccccccctcgtgcccgctgtcggctggttatagcacttccactgctactgtcagataggaagtgatcgaagcagggggcaaagagaaagcccatatttgttctaagcagaaaagcaggaaaaaaaaaaaaaaaaaaagaaagaaaaacacctgttgacctgagagaagtaaattccagaagggaaccaagaactcttcccttccctggtgagtatttccattattccgttaaggtttaatatgcattcagattacttttactaaataggacaccataaagcttttgttatatattaaatgtaaactgaaaggaatgtaaacatatgtattgttaattataaatatagataagtaatgacataatagatgaaaaagtcttattcagatgtatcacattcattttacattacccacctattgtcgcatggtagaatagttttttgtctctgaatatgtgaataacttgacttgcattgatctttttacatatttaataaaaaaaaaagtatatgttaaaaaaaaaa

SEQ ID NO: 456824 - DNA, 3813 bp, Homo sapiens
  misc_feature (29)..(29): n is a, c, g, or t
ttcatagggttacccccccccccgattantgggatatagtcgacccaggccgtcgatgaatatattcacaattttaaacttctgcaagcatcatttaagcgaatgaacgttgataaggtaattccagtggagaagctagtgaaaggacgtttccaggacaacctggattttattcaatggtttaagaaattctatgatgctaactacgatgggaaggagtatgatcctgtagaggcacgacaagggcaagatgcaattcctcctcctgaccctggtgaacagatcttcaacctgccaaaaaagtctcaccatgcaaactcccccacagcaggtgcagctaaatcaagtccagcagctaaaccaggatccacaccttctcgaccctcatcagccaaaagggcttcttccagtggctcagcatccaaatccgataaagatttagaaacgcaggtcatacagcttaatgaacaggtacattcattaaaacttgcccttgaaggcgtggaaaaggaaagggatttctactttgggaagttgagagagatcgagctactctgccaagaacacgggcaggaaaatgatgacctcgtgcagagactaatggacatcctgtatgcttcagaagaacacgagggccacacagaagagccggaagcagaggagcaagcccacgaacagcagcccccgcagcaggaagagtactgacccaccccggctgctcttgacacttccattgtgtgtgggaacgtttcttctggagaattggaacatgtgtggccccaagctcaacagaaaccagttgttcccaatctgccgttaccatcaacgcactgttgcatatgccagccactgcgcttggttcccattttctttgccaaggtgtattagcggacggccctctggccacctacccgagagatcgtagggtcacatacatccaacttcaccacttggctgcttgagattggttctgctcttttcttcatttctttccagaacaactctttcccaccccaacaccactgccaccacccctctttttatcctggtgtgaaacaatggtaatttgatatatggtatttatattggcatttttcaacccagtgtcactagatgtcacacacatttgtggtgctttgatgtttgcaagtctaacctctgaacataaatttggtcaaataattggaacaaagggaaacagatacttgatatgaaagccataatgacggtgacttgtgtcgtgggggaaaacataaggtcattttctccctctactcacaatactaaagggaaaaaatggattcaaagctaggatttcagggcccagcagtgttcctccatcagcatgttagacaactacacagtatgttgttagttttgaaagacattcactcaaggaaaacaccatctcaactttgcccgctcaccatgtcccttgcccccatgtagcccatttcccaggttatgctcttttctttctcagggtcctctttggtgggcagccactccccgagatgttgccatcagttttctgcagtccaaagagggtatggttaggtacgggtcttcctgcctcattcctcttcctctttgtgtaggtttcagccacaaaactgtcattcactctaggggacccctactaaagggtaacttcaggtgtgcagccctgagctccaaggctctgcaccatgccacacacttgctgtaaggctagaagtgaagaccttattaataggagcataattgcgagggagaatcatggttctgcagtctggtgtagacactggaataacagcacagaaaaatctatgactcccaatatcttctagaataaagaattttccctctttaacacaagggccctccttgtcattgaccttagctaaaccatggcaattcataaatagaggaaacattaatgaattaaaagcattccttattttttaactaatatttgtacattttcttagtctctttccaagtctttgcctcttttttttctttatttttattttttcctttgacagatggtatcccttcctggatcattcatttcaccttggtttctaactttaggtttactttcacttgttatttgacttagcaggtgcaacaaaaacaagaaacaaatgtgcccaccccactttccgcttaactgaaaagcttaaaataaatttctgaattatgtatcctgaagctttgaaatttctttattaatcgatgaaatatgaattctaaattctagcattgaagcttttcaccaaaagaagtctctccaaaataaatcttttgcagcaaagtgatatttattgagttatgtggaaaagatggcttgtatttttcagattattacaacacactgtgcagaattagacagatgttccgtggtgtttggtttccctttcttctctctcctgctcactctgcattatagcagcagcttatttctctaaggctggacagcctggctctcggcagtgacgtcctcccacacctggtcacaagtagtagtggctgtgctatacccagcatcatgcttaacagcgtgttgcccttctgagcctgttgtactcactgatctctttaaaaacaaaaaatagctcttgtaaaaggtcacaataactctatgcacctgatactgcagtggttcctaggccattcttcatctgctctggacatctcagtcatacccaatgctcagtggatcatgaccaaactcctgtcatgtggatgcacgtgagtgggtagcagggagtcaggatcctgccttctccagcaaccccttactgctgtataacttgcataagcctccctggtgactcttgcaggaaccactccattgccctccagctccccagccttctcagttataaacatgctggccagatctcttagcctgcaaagagaactttccccagtcaccatagaccattctccttcctgaaggcttggggcagaccattcgtttatttagagaagagctatacattcttctttctggtcccatcttaaacgtcttctgttgtgctgcaccccagatggtgtctcagatgctttggggaatctttaacagctgaatttgagtcagtcctcttaggctgcacctccagcctctgcagatcccccctcatttcccatggatggtgggaccccattattctctcatctcggcattcagggaacactttccttagcggcccctggtcacatgtcatcgggctgggcaggaagcgtccctgggtgcgtgctccacttctccctctcaggaagcccagtttcatccttagtaccccccctcgtgcccgctgtcggctggttatagcacttccactgctactgtcagataggaagtgatcgaagcagggggcaaagagaaagcccatatttgttctaagcagaaaagcaggaaaaaaaaaaaaaaaaaaagaaagaaaaacacctgttgacctgagagaagtaaattccagaagggaaccaagaactcttcccttccctggtgagtatttccattattccgttaaggtttaatatgcattcagattacttttactaaataggacaccataaagcttttgttatatattaaatgtaaactgaaaggaatgtaaacatatgtattgttaattataaatatagataagtaatgacataatagatgaaaaagtcttattcagatgtatcacattcattttacattacccacctattgtcgcatggtagaatagttttttgtctctgaatatgtgaataacttgacttgcattgatctttttacatatttaataaaaaaaaaagtatatgttaaaaaaaaaa

SEQ ID NO: 456825 - DNA, 1460 bp, Homo sapiens
  misc_feature (1458)..(1459): n is a, c, g, or t
agctgccagagggcggggccgcaggagggcggggcgcgagcgagagctgggagaaggcagtgagcgagcaggcggcaggcacggtccgtgcggagcaggcgagcgagcgggaagacgcagccaccttcctcaccagccagcccacagcggtttgttccccttctcgggagtgcgccaatgcctgggccgacccaaaccctgtccccaaatggcgagaacaacaacgacatcatccaggataataacgggaccatcattcctttccggaagcacacagtgcgcggggagcgttcctacagttggggaatggcggtcaatgtgtattctacctcgataacccaagagactatgagcagacatgacatcattgcatgggttaatgacatagtatctttaaactacacaaaagtggaacagctttgttcaggagcggcctattgccaattcatggacatgctcttccctggctgcattagtttgaagaaagtaaaatttcaagcaaagctggaacatgaatatattcacaattttaaacttctgcaagcatcatttaagcgaatgaacgttgataaggtaattccagtggagaagctagtgaaaggacgtttccaggacaacctggattttattcaatggtttaagaaattctatgatgctaactacgatgggaaggagtatgatcctgtagaggcacgacaagggcaagatgcaattcctcctcctgaccctggtgaacagatcttcaacctgccaaaaaagtctcaccatgcaaactcccccacagcaggtgcagctaaatcaagtccagcagctaaaccaggatccacaccttctcgaccctcatcagccaaaagggcttcttccagtggctcagcatccaaatccgataaagatttagaaacgcaggtcatacagcttaatgaacaggtaatgcatcagctctggccacgcctctaggagcagtgacgtgtgtaagaggtagggggcctaggatcccctaggactggggtaagggagggaagggtaaggaagaatccttggtttcaagtaagtgagaataaaaagaattgttcgaagacaaaatcagtagcccatgatgaataaaaagtgttagtcacaaatctcaaagctgtacattaagatggggcagatggctcagccttgctgcagacttcaggctaccttcccctcccctgctcctcagggctgtcaagagctccaggctagaccgttgcccatcctgcccacttctggccattctagatagtgctgcattagggtgagtctgcctccctctctttttaaaggctgggtcagggttagtctgtctccctcccactctcttcttttttcccttcttcctttctttcttcagctattagtagttgagcttattctatatgaaagatattacgcttaatgctggtaatataaaggtagtaaaatagataccttccnnc

SEQ ID NO: 456826 - DNA, 716 bp, Homo sapiens
agcggaaaaacaaagcccccagctgtcagcagaggaaggaggcgacagcgccggagcagtgtcctgtttcccagaggaacagttcatttcaacagccagggagaaagcctggatgctcaagttggggaatggcggtcaatgtgtattctacctcgataacccaagagactatgagcagacatgacatcattgcatgggttaatgacatagtatctttaaactacacaaaagtggaacagctttgttcaggagcggcctattgccaattcatggacatgctcttccctggctgcattagtttgaagaaagtaaaatttcaagcaaagctggaacatgaatatattcacaattttaaacttctgcaagcatcatttaagcgaatgaacgttgataagggatttcaatggaaagcctggaaaggacctttcaagacaacctggatttattaaagggttaagaattcttgatgctaactccaaggaaagagtttagacctttaaaggcccacagggcaaaaccattcctcttcggaccttggaaaagatttaacctccagatcccacctttggacctataagcaaagggctttccagggctcagatcaacgtaaataaaccagatcagtatacagcatataactgctgagctgaagaggtttctgagaactctcacggatcgatgcttaacgcacggcacaatcctctggtagagaacac

SEQ ID NO: 456827 - DNA, 462 bp, Homo sapiens
tgatttttttttaaagaagtgatatgttggactctgttgtagaagaatgagcactagtattcagcaacaagtgcaatttctccatgttatgttgagctctgttggagcctatggtgagtatttgatgtgaaaaccttgctgtgggaattttttattcttccttttccccccacgccagttcgttttggtaagtcttttatttgaacacaagacgcatgcttttttaaacctctagtttttgaagtaactgtagaagagaatctttaaaaaaaaaaatggagggcagaatgcttgttagcaatctgaaaatcaaagctgaacaagctgcttaaagtttctgattaagaagtttaaaaagaaaaattaattgctactgctttccaggtaattgtattattagtttctgtataaaagaaacattattgctgttgtataaataaaattttcctgtggtacaattaa

SEQ ID NO: 456828 - DNA, 2568 bp, Homo sapiens
acacgccctcggggtcggtcctcgaggacgcgcagggccccccacccaccaggacgcacgtttcaagctcatcagtaaaggttccttaaattcccgaagggcaagaagttaaccaagtaaaacagcatcggaacaccaggatcccatgacagattctgttgtcacgtctccttacagagtttgagcggtgctgaactgtcagcaccatctgtccggtcccagcatgccttctgagaccccccaggcagaagtggggcccacaggctgcccccaccgctcagggccacactcggcgaaggggagcctggagaaggggtccccagaggataaggaagccaaggagcccctgtggatccggcccgatgctccgagcaggtgcacctggcagctgggccggcctgcctccgagtccccacatcaccacactgccccggcaaaatctccaaaaatcttgccagatattctgaagaaaatcggggacacccctatggtcagaatcaacaagattgggaagaagttcggcctgaagtgtgagctcttggccaagtgtgagttcttcaacgcgggcgggagcgtgaaggaccgcatcagcctgcggatgattgaggatgctgagcgcgacgggacgctgaagcccggggacacgattatcgagccgacatccgggaacaccgggatcgggctggccctggctgcggcagtgaggggctatcgctgcatcatcgtgatgccagagaagatgagctccgagaaggtggacgtgctgcgggcactgggggctgagattgtgaggacgcccaccaatgccaggttcgactccccggagtcacacgtgggggtggcctggcggctgaagaacgaaatccccaattctcacatcctagaccagtaccgcaacgccagcaaccccctggctcactacgacaccaccgctgatgagatcctgcagcagtgtgatgggaagctggacatgctggtggcttcagtgggcacgggcggcaccatcacgggcattgccaggaagctgaaggagaagtgtcctggatgcaggatcattggggtggatcccgaagggtccatcctcgcagagccggaggagctgaaccagacggagcagacaacctacgaggtggaagggatcggctacgacttcatccccacggtgctggacaggacggtggtggacaagtggttcaagagcaacgatgaggaggcgttcacctttgcccgcatgctgatcgcgcaagaggggctgctgtgcggtggcagtgctggcagcacggtggcggtggccgtgaaggccgcgcaggagctgcaggagggccagcgctgcgtggtcattctgcccgactcagtgcggaactacatgaccaagttcctgagcgacaggtggatgctgcagaagggctttctgaaggaggaggacctcacggagaagaagccctggtggtggcacctccgtgttcaggagctgggcctgtcagccccgctgaccgtgctcccgaccatcacctgtgggcacaccatcgagatcctccgggagaagggcttcgaccaggcgcccgtggtggatgaggcgggggtaatcctgggaatggtgacgcttgggaacatgctctcgtccctgcttgccgggaaggtgcagccgtcagaccaagttggcaaagtcatctacaagcagttcaaacagatccgcctcacggacacgctgggcaggctctcgcacatcctggagatggaccacttcgccctggtggtgcacgagcagatccagtaccacagcaccgggaagtccagtcagcggcagatggtgttcggggtggtcaccgccattgacttgctgaacttcgtggccgcccaggagcgggaccagaagtgaagtccggagcgctgggcggtgcggagcgggcccgccacccttgcccacttctccttcgctttcctgagccctaaacacacgcgtgattggtaactgcctggcctggcaccgttatccctgcacacggcacagagcatccgtctcccctcgttaacacatggcttcctaaatggccctgtttacggcctatgagatgaaatatgtgattttctctaatgtaacttcctcttaggatgtttcaccaaggaaatattgagagagaagtcggccaggtaggatgaacacaggcaatgactgcgcagagtggattaaaggcaaaagagagaagagtccaggaaggggcggggagaagcctgggtggctcagcatcctccacgggctgcgccgtctgctcggggctgagctggcgggagcagtttgcgtgtttgggttttttaattgagatgaaattcaaataacctaaaaatcaatcacttgaaagtgaacaatcagcggcatttagtacatccagaaagttgtgtaggcaccacctctgtcacgttctggaacattctgtcatcaccccgtgaagcaatcatttcccctcccgtcttcctcctcccctggcaactgctgatcgactttgtgtctctgttgtctaaaataggttttccctgttctggacatttcatataaatggaatcacacaa

SEQ ID NO: 456829 - DNA, 2559 bp, Homo sapiens
ccacgagacattggccggcgccggcctccgcccccgcctctccgccaatcaccgcccgcctgctcccctcgccgtgggtccccgcgaggccgccaccccggggtcgccgtctccgcctcgccgcagtcggggcagccgctcgcccctcttttccatgtatccgtccagagtttgagcggtgctgaactgtcagcaccatctgtccggtcccagcatgccttctgagaccccccaggcagaagtggggcccacaggctgcccccaccgctcagggccacactcggcgaaggggagcctggagaaggggtccccagaggataaggaagccaaggagcccctgtggatccggcccgatgctccgagcaggtgcacctggcagctgggccggcctgcctccgagtccccacatcaccacactgccccggcaaaatctccaaaaatcttgccagatattctgaagaaaatcggggacacccctatggtcagaatcaacaagattgggaagaagttcggcctgaagtgtgagctcttggccaagtgtgagttcttcaacgcgggcgggagcgtgaaggaccgcatcagcctgcggatgattgaggatgctgagcgcgacgggacgctgaagcccggggacacgattatcgagccgacatccgggaacaccgggatcgggctggccctggctgcggcagtgaggggctatcgctgcatcatcgtgatgccagagaagatgagctccgagaaggtggacgtgctgcgggcactgggggctgagattgtgaggacgcccaccaatgccaggttcgactccccggagtcacacgtgggggtggcctggcggctgaagaacgaaatccccaattctcacatcctagaccagtaccgcaacgccagcaaccccctggctcactacgacaccaccgctgatgagatcctgcagcagtgtgatgggaagctggacatgctggtggcttcagtgggcacgggcggcaccatcacgggcattgccaggaagctgaaggagaagtgtcctggatgcaggatcattggggtggatcccgaagggtccatcctcgcagagccggaggagctgaaccagacggagcagacaacctacgaggtggaagggatcggctacgacttcatccccacggtgctggacaggacggtggtggacaagtggttcaagagcaacgatgaggaggcgttcacctttgcccgcatgctgatcgcgcaagaggggctgctgtgcggtggcagtgctggcagcacggtggcggtggccgtgaaggccgcgcaggagctgcaggagggccagcgctgcgtggtcattctgcccgactcagtgcggaactacatgaccaagttcctgagcgacaggtggatgctgcagaagggctttctgaaggaggaggacctcacggagaagaagccctggtggtggcacctccgtgttcaggagctgggcctgtcagccccgctgaccgtgctcccgaccatcacctgtgggcacaccatcgagatcctccgggagaagggcttcgaccaggcgcccgtggtggatgaggcgggggtaatcctgggaatggtgacgcttgggaacatgctctcgtccctgcttgccgggaaggtgcagccgtcagaccaagttggcaaagtcatctacaagcagttcaaacagatccgcctcacggacacgctgggcaggctctcgcacatcctggagatggaccacttcgccctggtggtgcacgagcagatccagtaccacagcaccgggaagtccagtcagcggcagatggtgttcggggtggtcaccgccattgacttgctgaacttcgtggccgcccaggagcgggaccagaagtgaagtccggagcgctgggcggtgcggagcgggcccgccacccttgcccacttctccttcgctttcctgagccctaaacacacgcgtgattggtaactgcctggcctggcaccgttatccctgcacacggcacagagcatccgtctcccctcgttaacacatggcttcctaaatggccctgtttacggcctatgagatgaaatatgtgattttctctaatgtaacttcctcttaggatgtttcaccaaggaaatattgagagagaagtcggccaggtaggatgaacacaggcaatgactgcgcagagtggattaaaggcaaaagagagaagagtccaggaaggggcggggagaagcctgggtggctcagcatcctccacgggctgcgccgtctgctcggggctgagctggcgggagcagtttgcgtgtttgggttttttaattgagatgaaattcaaataacctaaaaatcaatcacttgaaagtgaacaatcagcggcatttagtacatccagaaagttgtgtaggcaccacctctgtcacgttctggaacattctgtcatcaccccgtgaagcaatcatttcccctcccgtcttcctcctcccctggcaactgctgatcgactttgtgtctctgttgtctaaaataggttttccctgttctggacatttcatataaatggaatcacacaa

SEQ ID NO: 456830 - DNA, 2354 bp, Homo sapiens
acacgccctcggggtcggtcctcgaggacgcgcagggccccccacccaccaggacgcacgtttcaagctcatcagtaaaggttccttaaattcccgaagggcaagaagttaaccaagtaaaacagcatcggaacaccaggatcccatgacagattctgttgtcacgtctccttacagagtttgagcggtgctgaactgtcagcaccatctgtccggtcccagcatgccttctgagaccccccaggcagaagtggggcccacaggctgcccccaccgctcagggccacactcggcgaaggggagcctggagaaggggtccccagaggataaggaagccaaggagcccctgtggatccggcccgatgctccgagcaggtgcacctggcagctgggccggcctgcctccgagtccccacatcaccacactgccccggcaaaatctccaaaaatcttgccagatattctgaagaaaatcggggacacccctatggtcagaatcaacaagattgggaagaagttcggcctgaagtgtgagctcttggccaagtgtgagttcttcaacgcgggcgggagcgtgaaggaccgcatcagcctgcggatgattgaggatgctgagcgcgacgggacgctgaagcccggggacacgattatcgagccgacatccgggaacaccgggatcgggctggccctggctgcggcagtgaggggctatcgctgcatcatcgtgatgccagagaagatgagctccgagaaggtggacgtgctgcgggcactgggggctgagattgtgaggacgcccaccaatgccaggttcgactccccggagtcacacgtgggggtggcctggcggctgaagaacgaaatccccaattctcacatcctagaccagtaccgcaacgccagcaaccccctggctcactacgacaccaccgctgatgagatcctgcagcagtgtgatgggaagctggacatgctggtggcttcagtgggcacgggcggcaccatcacgggcattgccaggaagctgaaggagaagtgtcctggatgcaggatcattggggtggatcccgaagggtccatcctcgcagagccggaggagctgaaccagacggagcagacaacctacgaggtggaagggatcggctacgacttcatccccacggtgctggacaggacggtggtggacaagtggttcaagagcaacgatgaggaggcgttcacctttgcccgcatgctgatcgcgcaagaggggctgctgtgcggtggcagtgctggcagcacggtggcggtggccgtgaaggccgcgcaggagctgcaggagggccagcgctgcgtggtcattctgcccgactcagtgcggaactacatgaccaagttcctgagcgacaggtggatgctgcagaagggctttctgaaggaggaggacctcacggagaagaagccctggtggtggcacctccgtgttcaggagctgggcctgtcagccccgctgaccgtgctcccgaccatcacctgtgggcacaccatcgagatcctccgggagaagggcttcgaccaggcgcccgtggtggatgaggcgggggtaatcctgggaatggtgacgcttgggaacatgctctcgtccctgcttgccgggaaggtgcagccgtcagaccaagttggcaaagtcatctacaagcagttcaaacagatccgcctcacggacacgctgggcaggctctcgcacatcctggagatggaccacttcgccctggtggtgcacgagcagatccagtaccacagcaccgggaagtccagtcagcggcagatggtgttcggggtggtcaccgccattgacttgctgaacttcgtggccgcccaggagcgggaccagaagtgaagtccggagcgctgggcggatgtttcaccaaggaaatattgagagagaagtcggccaggtaggatgaacacaggcaatgactgcgcagagtggattaaaggcaaaagagagaagagtccaggaaggggcggggagaagcctgggtggctcagcatcctccacgggctgcgccgtctgctcggggctgagctggcgggagcagtttgcgtgtttgggttttttaattgagatgaaattcaaataacctaaaaatcaatcacttgaaagtgaacaatcagcggcatttagtacatccagaaagttgtgtaggcaccacctctgtcacgttctggaacattctgtcatcaccccgtgaagcaatcatttcccctcccgtcttcctcctcccctggcaactgctgatcgactttgtgtctctgttgtctaaaataggttttccctgttctggacatttcatataaatggaatcacacaa

SEQ ID NO: 456831 - DNA, 817 bp, Homo sapiens
aaacctaggctaggtacgaggccgggtgttgggacacccctatggtcagaatcaacaagattgggaagaagttcggcctgaagtgtgagctcttggccaagtgtgagttcttcaacgcgggcgggagcgtgaaggaccgcatcagcctgcggatgattgaggatgctgagcgcgacgggacgctgaagcccggggacacgattatcgagccgacatccgggaacaccgggatcgggctggccctggctgcggcagtgaggggctatcgctgcatcatcgtgatgccagagaagatgagctccgagaaggtggacgtgctgcgggcactgggggctgagattgtgaggacgcccaccaatgccaggttcgactccccggagtcacacgtgggggtggcctggcggctgaagaacgaaatccccaattctcacatcctagaccagtaccgcaacgccagcaaccccctggctcactacgacaccaccgctgatgagatcctgcagcagtgtgatgggaagctggacatgctggtggcttcagtgggcacgggcggcaccatcacgggcattgccaggaagctgaaggagaagtgtcctggatgcaggatcattggggtggatcccgaagggtccatcctcgcagagccggaggagctgaaccagacggagcagacaacctacgaggtggaagggatcggctacgacttcatccccacggtgctggacaggacgccggccgtggtggcacgtggtccgagcacgctgtgggggcttcccttgccgttgtgtccgccaaggtgttgcgctgctctgtccgg

SEQ ID NO: 456832 - DNA, 620 bp, Homo sapiens
tttttttttttctggagacagtctcgctcagtcgcacaggctggaggacagtggcgcgatcccggcctccaatgccaccttccagagccttcatgatgtaactccatccctgtcccctccccacatcgccggctttattgttcttcgtgtcagttcctgccagtggacatttaattctaattcacgtctcactccctcccctactgtgagccccacgtggcagagaccgcggcggagctgcgcgggccggaggaggctgcggagcatcgctctgacctgagccggggacgctgcggaggcgcagcacgttcctctgcccagagctgatgggcaccgtccgtgtctttcgctgcaggtccggggggagactcgggggcctgggatcccccatttagccatagggcggggggatcaggttcagcctctgaaagtccagagcacgatgtttgggaaacggccccgcccgcggcctccgggacctggcgaaggagccccgcggggcgcccctgctaccaccctgcgcggagtcggccccgtccccgagagcgcccggcagcccctggccgtgggccgcaccggagccgcgcaaggcgactgttctgcgcctcggctcggggttc

SEQ ID NO: 456833 - DNA, 2784 bp, Homo sapiens
tttttttttttctggagacagtctcgctcagtcgcacaggctggaggacagtggcgcgatcccggcctccaatgccaccttccagagccttcatgatgtaactccatccctgtcccctccccacatcgccggctttattgttcttcgtgtcagttcctgccagtggacatttaattctaattcacgtctcactccctcccctactgtgagccccacgtggcagagaccgcggcggagctgcgcgggccggaggaggctgcggagcatcgctctgacctgagccggggacgctgcggaggcgcagcacgttcctctgcccagagctgatgggcaccgtccgtgtctttcgctgcaggatcccatgacagattctgttgtcacgtctccttacagagtttgagcggtgctgaactgtcagcaccatctgtccggtcccagcatgccttctgagaccccccaggcagaagtggggcccacaggctgcccccaccgctcagggccacactcggcgaaggggagcctggagaaggggtccccagaggataaggaagccaaggagcccctgtggatccggcccgatgctccgagcaggtgcacctggcagctgggccggcctgcctccgagtccccacatcaccacactgccccggcaaaatctccaaaaatcttgccagatattctgaagaaaatcggggacacccctatggtcagaatcaacaagattgggaagaagttcggcctgaagtgtgagctcttggccaagtgtgagttcttcaacgcgggcgggagcgtgaaggaccgcatcagcctgcggatgattgaggatgctgagcgcgacgggacgctgaagcccggggacacgattatcgagccgacatccgggaacaccgggatcgggctggccctggctgcggcagtgaggggctatcgctgcatcatcgtgatgccagagaagatgagctccgagaaggtggacgtgctgcgggcactgggggctgagattgtgaggacgcccaccaatgccaggttcgactccccggagtcacacgtgggggtggcctggcggctgaagaacgaaatccccaattctcacatcctagaccagtaccgcaacgccagcaaccccctggctcactacgacaccaccgctgatgagatcctgcagcagtgtgatgggaagctggacatgctggtggcttcagtgggcacgggcggcaccatcacgggcattgccaggaagctgaaggagaagtgtcctggatgcaggatcattggggtggatcccgaagggtccatcctcgcagagccggaggagctgaaccagacggagcagacaacctacgaggtggaagggatcggctacgacttcatccccacggtgctggacaggacggtggtggacaagtggttcaagagcaacgatgaggaggcgttcacctttgcccgcatgctgatcgcgcaagaggggctgctgtgcggtggcagtgctggcagcacggtggcggtggccgtgaaggccgcgcaggagctgcaggagggccagcgctgcgtggtcattctgcccgactcagtgcggaactacatgaccaagttcctgagcgacaggtggatgctgcagaagggctttctgaaggaggaggacctcacggagaagaagccctggtggtggcacctccgtgttcaggagctgggcctgtcagccccgctgaccgtgctcccgaccatcacctgtgggcacaccatcgagatcctccgggagaagggcttcgaccaggcgcccgtggtggatgaggcgggggtaatcctgggaatggtgacgcttgggaacatgctctcgtccctgcttgccgggaaggtgcagccgtcagaccaagttggcaaagtcatctacaagcagttcaaacagatccgcctcacggacacgctgggcaggctctcgcacatcctggagatggaccacttcgccctggtggtgcacgagcagatccagtaccacagcaccgggaagtccagtcagcggcagatggtgttcggggtggtcaccgccattgacttgctgaacttcgtggccgcccaggagcgggaccagaagtgaagtccggagcgctgggcggtgcggagcgggcccgccacccttgcccacttctccttcgctttcctgagccctaaacacacgcgtgattggtaactgcctggcctggcaccgttatccctgcacacggcacagagcatccgtctcccctcgttaacacatggcttcctaaatggccctgtttacggcctatgagatgaaatatgtgattttctctaatgtaacttcctcttaggatgtttcaccaaggaaatattgagagagaagtcggccaggtaggatgaacacaggcaatgactgcgcagagtggattaaaggcaaaagagagaagagtccaggaaggggcggggagaagcctgggtggctcagcatcctccacgggctgcgccgtctgctcggggctgagctggcgggagcagtttgcgtgtttgggttttttaattgagatgaaattcaaataacctaaaaatcaatcacttgaaagtgaacaatcagcggcatttagtacatccagaaagttgtgtaggcaccacctctgtcacgttctggaacattctgtcatcaccccgtgaagcaatcatttcccctcccgtcttcctcctcccctggcaactgctgatcgactttgtgtctctgttgtctaaaataggttttccctgttctggacatttcatataaatggaatcacacaa

SEQ ID NO: 456834 - DNA, 2462 bp, Homo sapiens
ccacgagacattggccggcgccggcctccgcccccgcctctccgccaatcaccgcccgcctgctcccctcgccgtgggtccccgcgaggccgccaccccggggtcgccgtctccgcctcgccgcagtcggggcagccgctcgcccctcttttccatgtatccgtccaggatcccatgacagattctgttgtcacgtctccttacagagtttgagcggtgctgaactgtcagcaccatctgtccggtcccagcatgccttctgagaccccccaggcagaagtggggcccacaggctgcccccaccgctcagggccacactcggcgaaggggagcctggagaaggggtccccagaggataaggaagccaaggagcccctgtggatccggcccgatgctccgagcaggtgcacctggcagctgggccggcctgcctccgagtccccacatcaccacactgccccggcaaaatctccaaaaatcttgccagatattctgaagaaaatcggggacacccctatggtcagaatcaacaagattgggaagaagttcggcctgaagtgtgagctcttggccaagtgtgagttcttcaacgcgggcgggagcgtgaaggaccgcatcagcctgcggatgattgaggatgctgagcgcgacgggacgctgaagcccggggacacgattatcgagccgacatccgggaacaccgggatcgggctggccctggctgcggcagtgaggggctatcgctgcatcatcgtgatgccagagaagatgagctccgagaaggtggacgtgctgcgggcactgggggctgagattgtgaggacgcccaccaatgccaggttcgactccccggagtcacacgtgggggtggcctggcggctgaagaacgaaatccccaattctcacatcctagaccagtaccgcaacgccagcaaccccctggctcactacgacaccaccgctgatgagatcctgcagcagtgtgatgggaagctggacatgctggtggcttcagtgggcacgggcggcaccatcacgggcattgccaggaagctgaaggagaagtgtcctggatgcaggatcattggggtggatcccgaagggtccatcctcgcagagccggaggagctgaaccagacggagcagacaacctacgaggtggaagggatcggctacgacttcatccccacggtgctggacaggacggtggtggacaagtggttcaagagcaacgatgaggaggcgttcacctttgcccgcatgctgatcgcgcaagaggggctgctgtgcggtggcagtgctggcagcacggtggcggtggccgtgaaggccgcgcaggagctgcaggagggccagcgctgcgtggtcattctgcccgactcagtgcggaactacatgaccaagttcctgagcgacaggtggatgctgcagaagggctttctgaaggaggaggacctcacggagaagaagccctgggtaatcctgggaatggtgacgcttgggaacatgctctcgtccctgcttgccgggaaggtgcagccgtcagaccaagttggcaaagtcatctacaagcagttcaaacagatccgcctcacggacacgctgggcaggctctcgcacatcctggagatggaccacttcgccctggtggtgcacgagcagatccagtaccacagcaccgggaagtccagtcagcggcagatggtgttcggggtggtcaccgccattgacttgctgaacttcgtggccgcccaggagcgggaccagaagtgaagtccggagcgctgggcggtgcggagcgggcccgccacccttgcccacttctccttcgctttcctgagccctaaacacacgcgtgattggtaactgcctggcctggcaccgttatccctgcacacggcacagagcatccgtctcccctcgttaacacatggcttcctaaatggccctgtttacggcctatgagatgaaatatgtgattttctctaatgtaacttcctcttaggatgtttcaccaaggaaatattgagagagaagtcggccaggtaggatgaacacaggcaatgactgcgcagagtggattaaaggcaaaagagagaagagtccaggaaggggcggggagaagcctgggtggctcagcatcctccacgggctgcgccgtctgctcggggctgagctggcgggagcagtttgcgtgtttgggttttttaattgagatgaaattcaaataacctaaaaatcaatcacttgaaagtgaacaatcagcggcatttagtacatccagaaagttgtgtaggcaccacctctgtcacgttctggaacattctgtcatcaccccgtgaagcaatcatttcccctcccgtcttcctcctcccctggcaactgctgatcgactttgtgtctctgttgtctaaaataggttttccctgttctggacatttcatataaatggaatcacacaa

SEQ ID NO: 456835 - DNA, 2122 bp, Homo sapiens
aaacctaggctaggtacgaggccgggtgttgggacacccctatggtcagaatcaacaagattgggaagaagttcggcctgaagtgtgagctcttggccaagtgtgagttcttcaacgcgggcgggagcgtgaaggaccgcatcagcctgcggatgattgaggatgctgagcgcgacgggacgctgaagcccggggacacgattatcgagccgacatccgggaacaccgggatcgggctggccctggctgcggcagtgaggggctatcgctgcatcatcgtgatgccagagaagatgagctccgagaaggtggacgtgctgcgggcactgggggctgagattgtgaggacgcccaccaatgccaggttcgactccccggagtcacacgtgggggtggcctggcggctgaagaacgaaatccccaattctcacatcctagaccagtaccgcaacgccagcaaccccctggctcactacgacaccaccgctgatgagatcctgcagcagtgtgatgggaagctggacatgctggtggcttcagtgggcacgggcggcaccatcacgggcattgccaggaagctgaaggagaagtgtcctggatgcaggatcattggggtggatcccgaagggtccatcctcgcagagccggaggagctgaaccagacggagcagacaacctacgaggtggaagggatcggctacgacttcatccccacggtgctggacaggacggtggtggacaagtggttcaagagcaacgatgaggaggcgttcacctttgcccgcatgctgatcgcgcaagaggggctgctgtgcggtggcagtgctggcagcacggtggcggtggccgtgaaggccgcgcaggagctgcaggagggccagcgctgcgtggtcattctgcccgactcagtgcggaactacatgaccaagttcctgagcgacaggtggatgctgcagaagggctttctgaaggaggaggacctcacggagaagaagccctggtggtggcacctccgtgttcaggagctgggcctgtcagccccgctgaccgtgctcccgaccatcacctgtgggcacaccatcgagatcctccgggagaagggcttcgaccaggcgcccgtggtggatgaggcgggggtaatcctgggaatggtgacgcttgggaacatgctctcgtccctgcttgccgggaaggtgcagccgtcagaccaagttggcaaagtcatctacaagcagttcaaacagatccgcctcacggacacgctgggcaggctctcgcacatcctggagatggaccacttcgccctggtggtgcacgagcagatccagtaccacagcaccgggaagtccagtcagcggcagatggtgttcggggtggtcaccgccattgacttgctgaacttcgtggccgcccaggagcgggaccagaagtgaagtccggagcgctgggcggtgcggagcgggcccgccacccttgcccacttctccttcgctttcctgagccctaaacacacgcgtgattggtaactgcctggcctggcaccgttatccctgcacacggcacagagcatccgtctcccctcgttaacacatggcttcctaaatggccctgtttacggcctatgagatgaaatatgtgattttctctaatgtaacttcctcttaggatgtttcaccaaggaaatattgagagagaagtcggccaggtaggatgaacacaggcaatgactgcgcagagtggattaaaggcaaaagagagaagagtccaggaaggggcggggagaagcctgggtggctcagcatcctccacgggctgcgccgtctgctcggggctgagctggcgggagcagtttgcgtgtttgggttttttaattgagatgaaattcaaataacctaaaaatcaatcacttgaaagtgaacaatcagcggcatttagtacatccagaaagttgtgtaggcaccacctctgtcacgttctggaacattctgtcatcaccccgtgaagcaatcatttcccctcccgtcttcctcctcccctggcaactgctgatcgactttgtgtctctgttgtctaaaataggttttccctgttctggacatttcatataaatggaatcacacaa

SEQ ID NO: 456836 - DNA, 2383 bp, Homo sapiens
ccacgagacattggccggcgccggcctccgcccccgcctctccgccaatcaccgcccgcctgctcccctcgccgtgggtccccgcgaggccgccaccccggggtcgccgtctccgcctcgccgcagtcggggcagccgctcgcccctcttttccatgtatccgtccaggatcccatgacagattctgttgtcacgtctccttacagagtttgagcggtgctgaactgtcagcaccatctgtccggtcccagcatgccttctgagaccccccaggcagaagtggggcccacaggctgcccccaccgctcagggccacactcggcgaaggggagcctggagaaggggtccccagaggataaggaagccaaggagcccctgtggatccggcccgatgctccgagcaggtgcacctggcagctgggccggcctgcctccgagtccccacatcaccacactgccccggcaaaatctccaaaaatcttgccagatattctgaagaaaatcggggacacccctatggtcagaatcaacaagattgggaagaagttcggcctgaagtgtgagctcttggccaagtgtgagttcttcaacgcgggcgggagcgtgaaggaccgcatcagcctgcggatgattgaggatgctgagcgcgacgggacgctgaagcccggggacacgattatcgagccgacatccgggaacaccgggatcgggctggccctggctgcggcagtgaggggctatcgctgcatcatcgtgatgccagagaagatgagctccgagaaggtggacgtgctgcgggcactgggggctgagattgtgaggacgcccaccaatgccaggttcgactccccggagtcacacgtgggggtggcctggcggctgaagaacgaaatccccaattctcacatcctagaccagtaccgcaacgccagcaaccccctggctcactacgacaccaccgctgatgagatcctgcagcagtgtgatgggaagctggacatgctggtggcttcagtgggcacgggcggcaccatcacgggcattgccaggaagctgaaggagaagtgtcctggatgcaggatcattggggtggatcccgaagggtccatcctcgcagagccggaggagctgaaccagacggagcagacaacctacgaggtggaagggatcggctacgacttcatccccacggtgctggacaggacggtggtggacaagtggttcaagagcaacgatgaggaggcgttcacctttgcccgcatgctgatcgcgcaagaggggctgctgtgcggtggcagtgctggcagcacggtggcggtggccgtgaaggccgcgcaggagctgcaggagggccagcgctgcgtggtcattctgcccgactcagtgcggaactacatgaccaagttcctgagcgacaggtggatgctgcagaagggctttctgaaggaggaggacctcacggagaagaagccctggtggtggcacctccgtgttcaggagctgggcctgtcagccccgctgaccgtgctcccgaccatcacctgtgggcacaccatcgagatcctccgggagaagggcttcgaccaggcgcccgtggtggatgaggcgggggtaatcctgggaatggtgacgcttgggaacatgctctcgtccctgcttgccgggaaggtgcagccgtcagaccaagttggcaaagtcatctacaagcagttcaaacagatccgcctcacggacacgctgggcaggctctcgcacatcctggagatggaccacttcgccctggtggtgcacgagcagatccagtaccacagcaccgggaagtccagtcagcggcagatggtgttcggggtggtcaccgccattgacttgctgaacttcgtggccgcccaggagcgggaccagaagtgaagtccggagcgctgggcggatgtttcaccaaggaaatattgagagagaagtcggccaggtaggatgaacacaggcaatgactgcgcagagtggattaaaggcaaaagagagaagagtccaggaaggggcggggagaagcctgggtggctcagcatcctccacgggctgcgccgtctgctcggggctgagctggcgggagcagtttgcgtgtttgggttttttaattgagatgaaattcaaataacctaaaaatcaatcacttgaaagtgaacaatcagcggcatttagtacatccagaaagttgtgtaggcaccacctctgtcacgttctggaacattctgtcatcaccccgtgaagcaatcatttcccctcccgtcttcctcctcccctggcaactgctgatcgactttgtgtctctgttgtctaaaataggttttccctgttctggacatttcatataaatggaatcacacaa

SEQ ID NO: 456837 - DNA, 2361 bp, Homo sapiens
ccacgagacattggccggcgccggcctccgcccccgcctctccgccaatcaccgcccgcctgctcccctcgccgtgggtccccgcgaggccgccaccccggggtcgccgtctccgcctcgccgcagtcggggcagccgctcgcccctcttttccatgtatccgtccaggatcccatgacagattctgttgtcacgtctccttacagagtttgagcggtgctgaactgtcagcaccatctgtccggtcccagcatgccttctgagaccccccaggcagaagtggggcccacaggctgcccccaccgctcagggccacactcggcgaaggggagcctggagaaggggtccccagaggataaggaagccaaggagcccctgtggatccggcccgatgctccgagcaggtgcacctggcagctgggccggcctgcctccgagtccccacatcaccacactgccccggcaaaatctccaaaaatcttgccagatattctgaagaaaatcggggacacccctatggtcagaatcaacaagattgggaagaagttcggcctgaagtgtgagctcttggccaagtgtgagttcttcaacgcgggcgggagcgtgaaggaccgcatcagcctgcggatgattgaggatgctgagcgcgacgggacgctgaagcccggggacacgattatcgagccgacatccgggaacaccgggatcgggctggccctggctgcggcagtgaggggctatcgctgcatcatcgtgatgccagagaagatgagctccgagaaggtggacgtgctgcgggcactgggggctgagattgtgaggacgcccaccaatgccaggttcgactccccggagtcacacgtgggggtggcctggcggctgaagaacgaaatccccaattctcacatcctagaccagtaccgcaacgccagcaaccccctggctcactacgacaccaccgctgatgagatcctgcagcagtgtgatgggaagctggacatgctggtggcttcagtgggcacgggcggcaccatcacgggcattgccaggaagctgaaggagaagtgtcctggatgcaggatcattggggtggatcccgaagggtccatcctcgcagagccggaggagctgaaccagacggagcagacaacctacgaggtggaagggatcggctacgacttcatccccacggtgctggacaggacggtggtggacaagtggttcaagagcaacgatgaggaggcgttcacctttgcccgcatgctgatcgcgcaagaggggctgctgtgcggtggcagtgctggcagcacggtggcggtggccgtgaaggccgcgcaggagctgcaggagggccagcgctgcgtggtcattctgcccgactcagtgcggaactacatgaccaagttcctgagcgacaggtggatgctgcagaagggctttctgaaggaggaggacctcacggagaagaagccctggtggtggcacctccgtgttcaggagctgggcctgtcagccccgctgaccgtgctcccgaccatcacctgtgggcacaccatcgagatcctccgggagaagggcttcgaccaggcgcccgtggtggatgaggcgggggtaatcctgggaatggtgacgcttgggaacatgctctcgtccctgcttgccgggaaggtgcagccgtcagaccaagttggcaaagtcatctacaagcagttcaaacagatccgcctcacggacacgctgggcaggctctcgcacatcctggagatggaccacttcgccctggtggtgcacgagcagatccagtaccacagcaccgggaagtccagtcagcggcagatggtgttcggggtggtcaccgccattgacttgctgaacttcgtggccgcccaggagcgggaccagaagatgtttcaccaaggaaatattgagagagaagtcggccaggtaggatgaacacaggcaatgactgcgcagagtggattaaaggcaaaagagagaagagtccaggaaggggcggggagaagcctgggtggctcagcatcctccacgggctgcgccgtctgctcggggctgagctggcgggagcagtttgcgtgtttgggttttttaattgagatgaaattcaaataacctaaaaatcaatcacttgaaagtgaacaatcagcggcatttagtacatccagaaagttgtgtaggcaccacctctgtcacgttctggaacattctgtcatcaccccgtgaagcaatcatttcccctcccgtcttcctcctcccctggcaactgctgatcgactttgtgtctctgttgtctaaaataggttttccctgttctggacatttcatataaatggaatcacacaa

SEQ ID NO: 456838 - DNA, 1672 bp, Homo sapiens
gacgactctagagatcccccgatctgactacgcggctcgatctgactacgcggctcgatctgaggaagctggacatgctggtggcttcagtgggcacgggcggcaccatcacgggcattgccaggaagctgaaggagaagtgtcctggatgcaggatcattggggtggatcccgaagggtccatcctcgcagagccggaggagctgaaccagacggagcagacaacctacgaggtggaagggatcggctacgacttcatccccacggtgctggacaggacggtggtggacaagtggttcaagagcaacgatgaggaggcgttcacctttgcccgcatgctgatcgcgcaagaggggctgctgtgcggtggcagtgctggcagcacggtggcggtggccgtgaaggccgcgcaggagctgcaggagggccagcgctgcgtggtcattctgcccgactcagtgcggaactacatgaccaagttcctgagcgacaggtggatgctgcagaagggctttctgaaggaggaggacctcacggagaagaagccctggtggtggcacctccgtgttcaggagctgggcctgtcagccccgctgaccgtgctcccgaccatcacctgtgggcacaccatcgagatcctccgggagaagggcttcgaccaggcgcccgtggtggatgaggcgggggtaatcctgggaatggtgacgcttgggaacatgctctcgtccctgcttgccgggaaggtgcagccgtcagaccaagttggcaaagtcatctacaagcagttcaaacagatccgcctcacggacacgctgggcaggctctcgcacatcctggagatggaccacttcgccctggtggtgcacgagcagatccagtaccacagcaccgggaagtccagtcagcggcagatggtgttcggggtggtcaccgccattgacttgctgaacttcgtggccgcccaggagcgggaccagaagtgaagtccggagcgctgggcggtgcggagcgggcccgccacccttgcccacttctccttcgctttcctgagccctaaacacacgcgtgattggtaactgcctggcctggcaccgttatccctgcacacggcacagagcatccgtctcccctcgttaacacatggcttcctaaatggccctgtttacggcctatgagatgaaatatgtgattttctctaatgtaacttcctcttaggatgtttcaccaaggaaatattgagagagaagtcggccaggtaggatgaacacaggcaatgactgcgcagagtggattaaaggcaaaagagagaagagtccaggaaggggcggggagaagcctgggtggctcagcatcctccacgggctgcgccgtctgctcggggctgagctggcgggagcagtttgcgtgtttgggttttttaattgagatgaaattcaaataacctaaaaatcaatcacttgaaagtgaacaatcagcggcatttagtacatccagaaagttgtgtaggcaccacctctgtcacgttctggaacattctgtcatcaccccgtgaagcaatcatttcccctcccgtcttcctcctcccctggcaactgctgatcgactttgtgtctctgttgtctaaaataggttttccctgttctggacatttcatataaatggaatcacacaa

SEQ ID NO: 456839 - DNA, 3260 bp, Homo sapiens
ccacgagacattggccggcgccggcctccgcccccgcctctccgccaatcaccgcccgcctgctcccctcgccgtgggtccccgcgaggccgccaccccggggtcgccgtctccgcctcgccgcagtcggggcagccgctcgcccctcttttccatgtatccgtccaggatcccatgacagattctgttgtcacgtctccttacagagtttgagcggtgctgaactgtcagcaccatctgtccggtcccagcatgccttctgagaccccccaggcagaagtggggcccacaggctgcccccaccgctcagggccacactcggcgaaggggagcctggagaaggggtccccagaggataaggaagccaaggagcccctgtggatccggcccgatgctccgagcaggtgcacctggcagctgggccggcctgcctccgagtccccacatcaccacactgccccggcaaaatctccaaaaatcttgccagatattctgaagaaaatcggggacacccctatggtcagaatcaacaagattgggaagaagttcggcctgaagtgtgagctcttggccaagtgtgagttcttcaacgcgggcgggagcgtgaaggaccgcatcagcctgcggatgattgaggatgctgagcgcgacgggacgctgaagcccggggacacgattatcgagccgacatccgggaacaccgggatcgggctggccctggctgcggcagtgaggggctatcgctgcatcatcgtgatgccagagaagatgagctccgagaaggtggacgtgctgcgggcactgggggctgagattgtgaggacgcccaccaatgccaggttcgactccccggagtcacacgtgggggtggcctggcggctgaagaacgaaatccccaattctcacatcctagaccagtaccgcaacgccagcaaccccctggctcactacgacaccaccgctgatgagatcctgcagcagtgtgatgggaagctggacatgctggtggcttcagtgggcacgggcggcaccatcacgggcattgccaggaagctgaaggagaagtgtcctggatgcaggatcattggggtggatcccgaagggtccatcctcgcagagccggaggagctgaaccagacggagcagacaacctacgaggtggaagggatcggctacgacttcatccccacggtgctggacaggacggtggtggacaagtggttcaagagcaacgatgaggaggcgttcacctttgcccgcatgctgatcgcgcaagaggggctgctgtgcggtggcagtgctggcagcacggtggcggtggccgtgaaggccgcgcaggagctgcaggagggccagcgctgcgtggtcattctgcccgactcagtgcggaactacatgaccaagttcctgagcgacaggtggatgctgcagaagggctttctgaaggaggaggacctcacggagaagaagccctggtggtggcacctccgtgttcaggagctgggcctgtcagccccgctgaccgtgctcccgaccatcacctgtgggcacaccatcgagatcctccgggagaagggcttcgaccaggcgcccgtggtggatgaggcgggggtaatcctgggaatggtgacgcttgggaacatgctctcgtccctgcttgccgggaaggtgcagccgtcagaccaagttggcaaagtcatctacaagcagttcaaacagatccgcctcacggacacgctgggcaggctctcgcacatcctggagatggaccacttcgccctggtggtgcacgagcagatccagtcgcaggaccaggcctgggcaggcgtggtgggggggcctgcaggtaggtatcacccacccctcagaatggctctcaggctcagattcacagcctccccatggcaaatggaggccttccagggtcctggacccacccccaagcttgggtaggagggatccccctcttaatctcacatttacttgtgtttgaacatctcagaaaaaaaaaaagatgcaaattccaatgtcagggtccccaaatcaagtcttcctggagcatgtccacgcttgtcaccaccgtctgtggctgctttcaagcacgtcagggctgcgtgctcataacagagacggcacggcccccaagacctaaaataccaccagctggcccttgtcggaaagtcccctggctggccctagtccattgactctgggccgagctgccagggccacagaagcctgcggcactcagggctcccagggctcccttctccaacagttgctgtgcctccgtttccccaaaatgcaaggagctgatctcatctgtgttccctatcttttcctggggctctaagtgggccaccccaagggacctctgcctacaaagagaggagtgacagccgtggcggagttgggacgggctccgagggctcttcctcacccgcaccttgctcacccctctgtgcctcatgacagctggtgtagggtcctgtggagacgcaggaccaagaggatgtgtggggagcggggagagagagggaacgagatctgtgttaaggaactggatcatgagatcacggaggctgacaaaccctgagatctgcagggtgaggcggcaggccggagactggagagccagcagttcaagccccaaggcaggaaattccacctttggttctattcaggccttcaactgcttgggtgaggccctccacagtagcacacgttatctgcctcttgactcttgtgctaatccggaatcccctcacacatgcccagaacgacgtgtgaccaatgcctgggctcccacggccccgttaatctgtattaaaattaaccatcacaacagccctgtctgggtatgtggcatgggagcctcggccagcattaacaccgggtctacgcttgccaggagaaagcaggaggggtgaagacagaatcaggccagagatggaagctgtgtgctgcccatggtggcaaggggtttttgtctgtttttagagacagggtcttgctctgttgccgactggagtgcagtagtgccatcatggctcgctgcagcctcgacctgctgtgctcaactgatccttctgcctcagtctcccaagtagctgggaccacaagcgtgtgccaccatgctcgactaatttatttttaaaaatattctgtagagacagggtctcaatatgttgcccaggctggtcccagacttccgggcttaaatgatcctcccaccttggctcccacagcgctgggatcac

SEQ ID NO: 456840 - DNA, 1881 bp, Homo sapiens
ccacgagacattggccggcgccggcctccgcccccgcctctccgccaatcaccgcccgcctgctcccctcgccgtgggtccccgcgaggccgccaccccggggtcgccgtctccgcctcgccgcagtcggggcagccgctcgcccctcttttccatgtatccgtccaggatcccatgacagattctgttgtcacgtctccttacagagtttgagcggtgctgaactgtcagcaccatctgtccggtcccagcatgccttctgagaccccccaggcagaagtggggcccacaggctgcccccaccgctcagggccacactcggcgaaggggagcctggagaaggggtccccagaggataaggaagccaaggagcccctgtggatccggcccgatgctccgagcaggtgcacctggcagctgggccggcctgcctccgagtccccacatcaccacactgccccggcaaaatctccaaaaatcttgccagatattctgaagaaaatcggggacacccctatggtcagaatcaacaagattgggaagaagttcggcctgaagtgtgagctcttggccaagtgtgagttcttcaacgcgggcgggagcgtgaaggaccgcatcagcctgcggatgattgaggatgctgagcgcgacgggacgctgaagcccggggacacgattatcgagccgacatccgggaacaccgggatcgggctggccctggctgcggcagtgaggggctatcgctgcatcatcgtgatgccagagaagatgagctccgagaaggtggacgtgctgcgggcactgggggctgagattgtgaggacgcccaccaatgccaggttcgactccccggagtcacacgtgggggtggcctggcggctgaagaacgaaatccccaattctcacatcctagaccagtaccgcaacgccagcaaccccctggctcactacgacaccaccgctgatgagatcctgcagcagtgtgatgggaagctggacatgctggtggcttcagtgggcacgggcggcaccatcacgggcattgccaggaagctgaaggagaagtgtcctggatgcaggatcattggggtggatcccgaagggtccatcctcgcagagccggaggagctgaaccagacggagcagacaacctacgaggtggaagggatcggctacgacttcatccccacggtgctggacaggacggtggtggacaagtggttcaagagcaacgatgaggaggcgttcacctttgcccgcatgctgatcgcgcaagaggggctgctgtgcggtggcagtgctggcagcacggtggcggtggccgtgaaggccgcgcaggagctgcaggagggccagcgctgcgtggtcattctgcccgactcagtgcggaactacatgaccaagttcctgagcgacaggtggatgctgcagaagggctttctgaaggaggaggacctcacggagaagaagccctggtggtggcacctccgtgttcaggagctgggcctgtcagccccgctgaccgtgctcccgaccatcacctgtgggcacaccatcgagatcctccgggagaagggcttcgaccaggcgcccgtggtggatgaggcgggggtaatcctgggaatggtgacgcttgggaacatgctctcgtccctgcttgccgggaaggtgcagccgtcagaccaagttggcaaagtcatctacaagcagttcaaacagatccgcctcacggacacgctgggcaggctctcgcacatcctggagatggaccacttcgccctggtggtgcacgagcagatccagtaccacagcaccgggaagttcagcaagtcaatggcggtgaccaccccgaacaccatctgccgctgactggacttcccg

SEQ ID NO: 456841 - DNA, 1658 bp, Homo sapiens
ccacgagacattggccggcgccggcctccgcccccgcctctccgccaatcaccgcccgcctgctcccctcgccgtgggtccccgcgaggccgccaccccggggtcgccgtctccgcctcgccgcagtcggggcagccgctcgcccctcttttccatgtatccgtccaggatcccatgacagattctgttgtcacgtctccttacagagtttgagcggtgctgaactgtcagcaccatctgtccggtcccagcatgccttctgagaccccccaggcagaagtggggcccacaggctgcccccaccgctcagggccacactcggcgaaggggagcctggagaaggggtccccagaggataaggaagccaaggagcccctgtggatccggcccgatgctccgagcaggtgcacctggcagctgggccggcctgcctccgagtccccacatcaccacactgccccggcaaaatctccaaaaatcttgccagatattctgaagaaaatcggggacacccctatggtcagaatcaacaagattgggaagaagttcggcctgaagtgtgagctcttggccaagtgtgagttcttcaacgcgggcgggagcgtgaaggaccgcatcagcctgcggatgattgaggatgctgagcgcgacgggacgctgaagcccggggacacgattatcgagccgacatccgggaacaccgggatcgggctggccctggctgcggcagtgaggggctatcgctgcatcatcgtgatgccagagaagatgagctccgagaaggtggacgtgctgcgggcactgggggctgagattgtgaggacgcccaccaatgccaggttcgactccccggagtcacacgtgggggtggcctggcggctgaagaacgaaatccccaattctcacatcctagaccagtaccgcaacgccagcaaccccctggctcactacgacaccaccgctgatgagatcctgcagcagtgtgatgggaagctggacatgctggtggcttcagtgggcacgggcggcaccatcacgggcattgccaggaagctgaaggagaagtgtcctggatgcaggatcattggggtggatcccgaagggtccatcctcgcagagccggaggagctgaaccagacggagcagacaacctacgaggtggaagggatcggctacgacttcatccccacggtgctggacaggacggtggtggacaagtggttcaagagcaacgatgaggaggcgttcacctttgcccgcatgctgatcgcgcaagaggggctgctgtgcggtgagtgggtggcgggcacgggggtatggggaaggcagagatggctagggggcactggggatggctgggggcgcaccctcagtcagccaccgacctgcatgtgtaagacagcagttctgaggagtgtcactgcggcggccacgagcctcaggtgttgtctgcctgcccagtgtggtcacctgctcaggtgagggcaggaggccatggggcggggcttcgagctgccttccagaatgtgtttctagaacaaggctgaagctctcatggcacttattgtttctaatcaagtccaccagggcccctggggcggtggctctgcattgacggggcccatggccgggactgggtgctgcgagcaccctggagc

SEQ ID NO: 456842 - DNA, 1179 bp, Homo sapiens
gcgatggctgtgtgcatgctcacacacgcttgttggccatgggggcgggaagtccagcccccaggcttccccctggggcttccagccagcacttgggggtctctgctgcaccagtgaggtccaggagaggggctgggcaggcagtgcgtgccactcagcaggggcgggggcccggtggggccctgcggggactcggtgactcccccatcccgcaggaccaagttcctgagcgacaggtggatgctgcagaagggctttctgaaggaggaggacctcacggagaagaagccctggtggtggcacctccgtgttcaggagctgggcctgtcagccccgctgaccgtgctcccgaccatcacctgtgggcacaccatcgagatcctccgggagaagggcttcgaccaggcgcccgtggtggatgaggcgggggtaatcctgggaatggtgacgcttgggaacatgctctcgtccctgcttgccgggaaggtgcagccgtcagaccaagttggcaaagtcatctacaagcagttcaaacagatccgcctcacggacacgctgggcaggctctcgcacatcctggagatggaccacttcgccctggtggtgcacgagcagatccagtaccacagcaccgggaagtccagtcagcggcagatggtgttcggggtggtcaccgccattgacttgctgaacttcgtggccgcccaggagcgggaccagaagatgtttcaccaaggaaatattgagagagaagtcggccaggtaggatgaacacaggcaatgactgcgcagagtggattaaaggcaaaagagagaagagtccaggaaggggcggggagaagcctgggtggctcagcatcctccacgggctgcgccgtctgctcggggctgagctggcgggagcagtttgcgtgtttgggttttttaattgagatgaaattcaaataacctaaaaatcaatcacttgaaagtgaacaatcagcggcatttagtacatccagaaagttgtgtaggcaccacctctgtcacgttctggaacattctgtcatcaccccgtgaagcaatcatttcccctcccgtcttcctcctcccctggcaactgctgatcgactttgtgtctctgttgtctaaaataggttttccctgttctggacatttcatataaatggaatcacacaa

SEQ ID NO: 456843 - DNA, 2597 bp, Homo sapiens
ccacgagacattggccggcgccggcctccgcccccgcctctccgccaatcaccgcccgcctgctcccctcgccgtgggtccccgcgaggccgccaccccggggtcgccgtctccgcctcgccgcagtcggggcagccgctcgcccctcttttccatgtatccgtccaggatcccatgacagattctgttgtcacgtctccttacagagtttgagcggtgctgaactgtcagcaccatctgtccggtcccagcatgccttctgagaccccccaggcagaagtggggcccacaggctgcccccaccgctcagggccacactcggcgaaggggagcctggagaaggggtccccagaggataaggaagccaaggagcccctgtggatccggcccgatgctccgagcaggtgcacctggcagctgggccggcctgcctccgagtccccacatcaccacactgccccggcaaaatctccaaaaatcttgccagatattctgaagaaaatcggggacacccctatggtcagaatcaacaagattgggaagaagttcggcctgaagtgtgagctcttggccaagtgtgagttcttcaacgcgggcgggagcgtgaaggaccgcatcagcctgcggatgattgaggatgctgagcgcgacgggacgctgaagcccggggacacgattatcgagccgacatccgggaacaccgggatcgggctggccctggctgcggcagtgaggggctatcgctgcatcatcgtgatgccagagaagatgagctccgagaaggtggacgtgctgcgggcactgggggctgagattgtgaggacgcccaccaatgccaggttcgactccccggagtcacacgtgggggtggcctggcggctgaagaacgaaatccccaattctcacatcctagaccagtaccgcaacgccagcaaccccctggctcactacgacaccaccgctgatgagatcctgcagcagtgtgatgggaagctggacatgctggtggcttcagtgggcacgggcggcaccatcacgggcattgccaggaagctgaaggagaagtgtcctggatgcaggatcattggggtggatcccgaagggtccatcctcgcagagccggaggagctgaaccagacggagcagacaacctacgaggtggaagggatcggctacgacttcatccccacggtgctggacaggacggtggtggacaagtggttcaagagcaacgatgaggaggcgttcacctttgcccgcatgctgatcgcgcaagaggggctgctgtgcggtggcagtgctggcagcacggtggcggtggccgtgaaggccgcgcaggagctgcaggagggccagcgctgcgtggtcattctgcccgactcagtgcggaactacatgaccaagttcctgagcgacaggtggatgctgcagaagggctttctgaaggaggaggacctcacggagaagaagccctggtggtggcacctccgtgttcaggagctgggcctgtcagccccgctgaccgtgctcccgaccatcacctgtgggcacaccatcgagatcctccgggagaagggcttcgaccaggcgcccgtggtggatgaggcgggggtaatcctgggaatggtgacgcttgggaacatgctctcgtccctgcttgccgggaaggtgcagccgtcagaccaagttggcaaagtcatctacaagcagttcaaacagatccgcctcacggacacgctgggcaggctctcgcacatcctggagatggaccacttcgccctggtggtgcacgagcagatccagtaccacagcaccgggaagtccagtcagcggcagatggtgttcggggtggtcaccgccattgacttgctgaacttcgtggccgcccaggagcgggaccagaagtgaagtccggagcgctgggcggtgcggagcgggcccgccacccttgcccacttctccttcgctttcctgagccctaaacacacgcgtgattggtaactgcctggcctggcaccgttatccctgcacacggcacagagcatccgtctcccctcgttaacacatggcttcctaaatggccctgtttacggcctatgagatgaaatatgtgattttctctaatgtaacttcctcttaggatgtttcaccaaggaaatattgagagagaagtcggccaggtaggatgaacacaggcaatgactgcgcagagtggattaaaggcaaaagagagaagagtccaggaaggggcggggagaagcctgggtggctcagcatcctccacgggctgcgccgtctgctcggggctgagctggcgggagcagtttgcgtgtttgggttttttaattgagatgaaattcaaataacctaaaaatcaatcacttgaaagtgaacaatcagcggcatttagtacatccagaaagttgtgtaggcaccacctctgtcacgttctggaacattctgtcatcaccccgtgaagcaatcatttcccctcccgtcttcctcctcccctggcaactgctgatcgactttgtgtctctgttgtctaaaataggttttccctgttctggacatttcatataaatggaatcacacaa

SEQ ID NO: 456844 - DNA, 2665 bp, Homo sapiens
  misc_feature (4)..(5): n is a, c, g, or t
  misc_feature (491)..(491): n is a, c, g, or t
gaannccctgggatcagaaaactcgctggttaatgagtggccaagaacatatcagcttaagtttgggaaaaacacacaacagggcattgtgtcagagggtgaccaaagtgactccccagcagatggaccagggaacgaacaggtgacctttgaactgaggccggagtggaagcagcgagggtgtgaagggccgggtgagggtcaaaggcagaagcaagcaggtggggagggttagcgtcatgcctgctaaggagcagtggacgggtcctagcacgtgctgtgagccacccgctgtccagggagcggttacctctgtcttgccagcttcgtggggacagatagttcagctcatcatttatgagacagagaatgggaatttggagggtctgtggctggcctcgtcctgggtgcgcagggggtcacctgaggtgtggtctgaggcctccggggaagggcatttctttgcaggacgcagtttccaggctcaagancgtggagggaattcctaagggtcgctcttcaccaagagcgcagagccctggtagacctcagcatcgtcacagagaaagctgtgggtgcagaggccttggggacaaggcggggacggaatttcgtatttcagatgaccaaggccaatggccaagtgtgagttcttcaacgcgggcgggagcgtgaaggaccgcatcagcctgcggatgattgaggatgctgagcgcgacgggacgctgaagcccggggacacgattatcgagccgacatccgggaacaccgggatcgggctggccctggctgcggcagtgaggggctatcgctgcatcatcgtgatgccagagaagatgagctccgagaaggtggacgtgctgcgggcactgggggctgagattgtgaggacgcccaccaatgccaggttcgactccccggagtcacacgtgggggtggcctggcggctgaagaacgaaatccccaattctcacatcctagaccagtaccgcaacgccagcaaccccctggctcactacgacaccaccgctgatgagatcctgcagcagtgtgatgggaagctggacatgctggtggcttcagtgggcacgggcggcaccatcacgggcattgccaggaagctgaaggagaagtgtcctggatgcaggatcattggggtggatcccgaagggtccatcctcgcagagccggaggagctgaaccagacggagcagacaacctacgaggtggaagggatcggctacgacttcatccccacggtgctggacaggacggtggtggacaagtggttcaagagcaacgatgaggaggcgttcacctttgcccgcatgctgatcgcgcaagaggggctgctgtgcggtggcagtgctggcagcacggtggcggtggccgtgaaggccgcgcaggagctgcaggagggccagcgctgcgtggtcattctgcccgactcagtgcggaactacatgaccaagttcctgagcgacaggtggatgctgcagaagggctttctgaaggaggaggacctcacggagaagaagccctggtggtggcacctccgtgttcaggagctgggcctgtcagccccgctgaccgtgctcccgaccatcacctgtgggcacaccatcgagatcctccgggagaagggcttcgaccaggcgcccgtggtggatgaggcgggggtaatcctgggaatggtgacgcttgggaacatgctctcgtccctgcttgccgggaaggtgcagccgtcagaccaagttggcaaagtcatctacaagcagttcaaacagatccgcctcacggacacgctgggcaggctctcgcacatcctggagatggaccacttcgccctggtggtgcacgagcagatccagtaccacagcaccgggaagtccagtcagcggcagatggtgttcggggtggtcaccgccattgacttgctgaacttcgtggccgcccaggagcgggaccagaagtgaagtccggagcgctgggcggtgcggagcgggcccgccacccttgcccacttctccttcgctttcctgagccctaaacacacgcgtgattggtaactgcctggcctggcaccgttatccctgcacacggcacagagcatccgtctcccctcgttaacacatggcttcctaaatggccctgtttacggcctatgagatgaaatatgtgattttctctaatgtaacttcctcttaggatgtttcaccaaggaaatattgagagagaagtcggccaggtaggatgaacacaggcaatgactgcgcagagtggattaaaggcaaaagagagaagagtccaggaaggggcggggagaagcctgggtggctcagcatcctccacgggctgcgccgtctgctcggggctgagctggcgggagcagtttgcgtgtttgggttttttaattgagatgaaattcaaataacctaaaaatcaatcacttgaaagtgaacaatcagcggcatttagtacatccagaaagttgtgtaggcaccacctctgtcacgttctggaacattctgtcatcaccccgtgaagcaatcatttcccctcccgtcttcctcctcccctggcaactgctgatcgactttgtgtctctgttgtctaaaataggttttccctgttctggacatttcatataaatggaatcacacaa

SEQ ID NO: 456845 - DNA, 1690 bp, Homo sapiens
agcgcatccccgggcgtccccaccacatccccacaggccaggagagtcgctcgcaggttttgggtcatagatggcagccctgggcctggggcccacaggaagagttgggaggggccctggagcctggagcctgcccacccaccaggcctgtgtgcagggggtgagcgctcggtggctgaggctggtccgtgagggccccaagtctaaccccatctcccgtccttggctctgcagcgcaggaccaggcctgggcaggcgtggtgggggggcctgcaggtaggtatcacccacccctcagaatggctctcaggctcagattcacagcctccccatggcaaatggaggccttccagggtcctggacccacccccaagcttgggtaggagggatccccctcttaatctcacatttacttgtgtttgaacatctcagaaaaaaaaaaagatgcaaattccaatgtcagggtccccaaatcaagtcttcctggagcatgtccacgcttgtcaccaccgtctgtggctgctttcaagcacgtcagggctgcgtgctcataacagagacggcacggcccccaagacctaaaataccaccagctggcccttgtcggaaagtcccctggctggccctagtccattgactctgggccgagctgccagggccacagaagcctgcggcactcagggctcccagggctcccttctccaacagttgctgtgcctccgtttccccaaaatgcaaggagctgatctcatctgtgttccctatcttttcctggggctctaagtgggccaccccaagggacctctgcctacaaagagaggagtgacagccgtggcggagttgggacgggctccgagggctcttcctcacccgcaccttgctcacccctctgtgcctcatgacagctggtgtagggtcctgtggagacgcaggaccaagaggatgtgtggggagcggggagagagagggaacgagatctgtgttaaggaactggatcatgagatcacggaggctgacaaaccctgagatctgcagggtgaggcggcaggccggagactggagagccagcagttcaagccccaaggcaggaaattccacctttggttctattcaggccttcaactgcttgggtgaggccctccacagtagcacacgttatctgcctcttgactcttgtgctaatccggaatcccctcacacatgcccagaacgacgtgtgaccaatgcctgggctcccacggccccgttaatctgtattaaaattaaccatcacaacagccctgtctgggtatgtggcatgggagcctcggccagcattaacaccgggtctacgcttgccaggagaaagcaggaggggtgaagacagaatcaggccagagatggaagctgtgtgctgcccatggtggcaaggggtttttgtctgtttttagagacagggtcttgctctgttgccgactggagtgcagtagtgccatcatggctcgctgcagcctcgacctgctgtgctcaactgatccttctgcctcagtctcccaagtagctgggaccacaagcgtgtgccaccatgctcgactaatttatttttaaaaatattctgtagagacagggtctcaatatgttgcccaggctggtcccagacttccgggcttaaatgatcctcccaccttggctcccacagcgctgggatcac

SEQ ID NO: 456846 - DNA, 344 bp, Homo sapiens
atattggttacagtgtatagactagctgaatcaagatgaattcacgattaaaatatactatgacagaaattttaggatacagatactagaacattcagctgccgctacagcgatatgcccgagtcatcgagctttgaattcatcatcgtggatcctccgtgagaactgtttgaaatagttatccgttatggatgaggcgggggtaatcctgggaatggtgacgcttgggaacatgctctcgtccctgcttgccgggaaggtgcagccgtcagaccaagttggcaaagtcatctacaagcagttcaaacaggtacccagtcacctacaggcagctcaaacagatg

SEQ ID NO: 456847 - DNA, 2579 bp, Homo sapiens
gaaaggcggcgagacagggtctcccaagacccccgccccaccggcgcccacgcctgcggtcttgaccgcccagaagatgggggctggccgtgcacgtggccccgggctcccaccccagcccccgcgccggcggagtggaccccactggcggatcccatgacagattctgttgtcacgtctccttacagagtttgagcggtgctgaactgtcagcaccatctgtccggtcccagcatgccttctgagaccccccaggcagaagtggggcccacaggctgcccccaccgctcagggccacactcggcgaaggggagcctggagaaggggtccccagaggataaggaagccaaggagcccctgtggatccggcccgatgctccgagcaggtgcacctggcagctgggccggcctgcctccgagtccccacatcaccacactgccccggcaaaatctccaaaaatcttgccagatattctgaagaaaatcggggacacccctatggtcagaatcaacaagattgggaagaagttcggcctgaagtgtgagctcttggccaagtgtgagttcttcaacgcgggcgggagcgtgaaggaccgcatcagcctgcggatgattgaggatgctgagcgcgacgggacgctgaagcccggggacacgattatcgagccgacatccgggaacaccgggatcgggctggccctggctgcggcagtgaggggctatcgctgcatcatcgtgatgccagagaagatgagctccgagaaggtggacgtgctgcgggcactgggggctgagattgtgaggacgcccaccaatgccaggttcgactccccggagtcacacgtgggggtggcctggcggctgaagaacgaaatccccaattctcacatcctagaccagtaccgcaacgccagcaaccccctggctcactacgacaccaccgctgatgagatcctgcagcagtgtgatgggaagctggacatgctggtggcttcagtgggcacgggcggcaccatcacgggcattgccaggaagctgaaggagaagtgtcctggatgcaggatcattggggtggatcccgaagggtccatcctcgcagagccggaggagctgaaccagacggagcagacaacctacgaggtggaagggatcggctacgacttcatccccacggtgctggacaggacggtggtggacaagtggttcaagagcaacgatgaggaggcgttcacctttgcccgcatgctgatcgcgcaagaggggctgctgtgcggtggcagtgctggcagcacggtggcggtggccgtgaaggccgcgcaggagctgcaggagggccagcgctgcgtggtcattctgcccgactcagtgcggaactacatgaccaagttcctgagcgacaggtggatgctgcagaagggctttctgaaggaggaggacctcacggagaagaagccctggtggtggcacctccgtgttcaggagctgggcctgtcagccccgctgaccgtgctcccgaccatcacctgtgggcacaccatcgagatcctccgggagaagggcttcgaccaggcgcccgtggtggatgaggcgggggtaatcctgggaatggtgacgcttgggaacatgctctcgtccctgcttgccgggaaggtgcagccgtcagaccaagttggcaaagtcatctacaagcagttcaaacagatccgcctcacggacacgctgggcaggctctcgcacatcctggagatggaccacttcgccctggtggtgcacgagcagatccagtaccacagcaccgggaagtccagtcagcggcagatggtgttcggggtggtcaccgccattgacttgctgaacttcgtggccgcccaggagcgggaccagaagtgaagtccggagcgctgggcggtgcggagcgggcccgccacccttgcccacttctccttcgctttcctgagccctaaacacacgcgtgattggtaactgcctggcctggcaccgttatccctgcacacggcacagagcatccgtctcccctcgttaacacatggcttcctaaatggccctgtttacggcctatgagatgaaatatgtgattttctctaatgtaacttcctcttaggatgtttcaccaaggaaatattgagagagaagtcggccaggtaggatgaacacaggcaatgactgcgcagagtggattaaaggcaaaagagagaagagtccaggaaggggcggggagaagcctgggtggctcagcatcctccacgggctgcgccgtctgctcggggctgagctggcgggagcagtttgcgtgtttgggttttttaattgagatgaaattcaaataacctaaaaatcaatcacttgaaagtgaacaatcagcggcatttagtacatccagaaagttgtgtaggcaccacctctgtcacgttctggaacattctgtcatcaccccgtgaagcaatcatttcccctcccgtcttcctcctcccctggcaactgctgatcgactttgtgtctctgttgtctaaaataggttttccctgttctggacatttcatataaatggaatcacacaa

SEQ ID NO: 456848 - DNA, 2307 bp, Homo sapiens
ccacgagacattggccggcgccggcctccgcccccgcctctccgccaatcaccgcccgcctgctcccctcgccgtgggtccccgcgaggccgccaccccggggtcgccgtctccgcctcgccgcagtcggggcagccgctcgcccctcttttccatgtatccgtccaggatcccatgacagattctgttgtcacgtctccttacagagtttgagcggtgctgaactgtcagcaccatctgtccggtcccagcatgccttctgagaccccccaggcagaagtggggcccacaggctgcccccaccgctcagggccacactcggcgaaggggagcctggagaaggggtccccagaggataaggaagccaaggagcccctgtggatccggcccgatgctccgagcaggtgcacctgggatcgggctggccctggctgcggcagtgaggggctatcgctgcatcatcgtgatgccagagaagatgagctccgagaaggtggacgtgctgcgggcactgggggctgagattgtgaggacgcccaccaatgccaggttcgactccccggagtcacacgtgggggtggcctggcggctgaagaacgaaatccccaattctcacatcctagaccagtaccgcaacgccagcaaccccctggctcactacgacaccaccgctgatgagatcctgcagcagtgtgatgggaagctggacatgctggtggcttcagtgggcacgggcggcaccatcacgggcattgccaggaagctgaaggagaagtgtcctggatgcaggatcattggggtggatcccgaagggtccatcctcgcagagccggaggagctgaaccagacggagcagacaacctacgaggtggaagggatcggctacgacttcatccccacggtgctggacaggacggtggtggacaagtggttcaagagcaacgatgaggaggcgttcacctttgcccgcatgctgatcgcgcaagaggggctgctgtgcggtggcagtgctggcagcacggtggcggtggccgtgaaggccgcgcaggagctgcaggagggccagcgctgcgtggtcattctgcccgactcagtgcggaactacatgaccaagttcctgagcgacaggtggatgctgcagaagggctttctgaaggaggaggacctcacggagaagaagccctggtggtggcacctccgtgttcaggagctgggcctgtcagccccgctgaccgtgctcccgaccatcacctgtgggcacaccatcgagatcctccgggagaagggcttcgaccaggcgcccgtggtggatgaggcgggggtaatcctgggaatggtgacgcttgggaacatgctctcgtccctgcttgccgggaaggtgcagccgtcagaccaagttggcaaagtcatctacaagcagttcaaacagatccgcctcacggacacgctgggcaggctctcgcacatcctggagatggaccacttcgccctggtggtgcacgagcagatccagtaccacagcaccgggaagtccagtcagcggcagatggtgttcggggtggtcaccgccattgacttgctgaacttcgtggccgcccaggagcgggaccagaagtgaagtccggagcgctgggcggtgcggagcgggcccgccacccttgcccacttctccttcgctttcctgagccctaaacacacgcgtgattggtaactgcctggcctggcaccgttatccctgcacacggcacagagcatccgtctcccctcgttaacacatggcttcctaaatggccctgtttacggcctatgagatgaaatatgtgattttctctaatgtaacttcctcttaggatgtttcaccaaggaaatattgagagagaagtcggccaggtaggatgaacacaggcaatgactgcgcagagtggattaaaggcaaaagagagaagagtccaggaaggggcggggagaagcctgggtggctcagcatcctccacgggctgcgccgtctgctcggggctgagctggcgggagcagtttgcgtgtttgggttttttaattgagatgaaattcaaataacctaaaaatcaatcacttgaaagtgaacaatcagcggcatttagtacatccagaaagttgtgtaggcaccacctctgtcacgttctggaacattctgtcatcaccccgtgaagcaatcatttcccctcccgtcttcctcctcccctggcaactgctgatcgactttgtgtctctgttgtctaaaataggttttccctgttctggacatttcatataaatggaatcacacaa

SEQ ID NO: 456849 - DNA, 2354 bp, Homo sapiens
ccacgagacattggccggcgccggcctccgcccccgcctctccgccaatcaccgcccgcctgctcccctcgccgtgggtccccgcgaggccgccaccccggggtcgccgtctccgcctcgccgcagtcggggcagccgctcgcccctcttttccatgtatccgtccaggatcccatgacagattctgttgtcacgtctccttacagagtttgagcggtgctgaactgtcagcaccatctgtccggtcccagcatgccttctgagaccccccaggcagaagtggggcccacaggctgcccccaccgctcagggccacactcggcgaaggggagcctggagaaggggtccccagaggataaggaagccaaggagcccctgtggatccggcccgatgctccgagcaggtgcacctggcagctgggccggcctgcctccgagtccccacatcaccacactgccccggcaaaatctccaaaaatcttgccagatattctgaagaaaatcggggacacccctatggtcagaatcaacaagattgggaagaagttcggcctgaagtgtgagctcttggccaagtgtgagttcttcaacgcgggcgggagcgtgaaggaccgcatcagcctgcggatgattgaggatgctgagcgcgacgggacgctgaagcccggggacacgattatcgagccgacatccgggaacaccgggatcgggctggccctggctgcggcagtgaggggctatcgctgcatcatcgtgatgccagagaagatgagctccgagaaggtggacgtgctgcgggcactgggggctgagattgtgaggacgcccaccaatgccaggttcgactccccggagtcacacgtgggggtggcctggcggctgaagaacgaaatccccaattctcacatcctagaccagtaccgcaacgccagcaaccccctggctcactacgacaccaccgctgatgagatcctgcagcagtgtgatgggaagctggacatgctggtggcttcagtgggcacgggcggcaccatcacgggcattgccaggaagctgaaggagaagtgtcctggatgcaggatcattggggtggatcccgaagggtccatcctcgcagagccggaggagctgaaccagacggagcagacaacctacgaggtggaagggatcggctacgacttcatccccacggtgctggacaggacggtggtggacaagtggttcaagagcaacgatgaggaggcgttcacctttgcccgcatgctgatcgcgcaagaggggctgctgtgcggtggcagtgctggcagcacggtggcggtggccgtgaaggccgcgcaggagctgcaggagggccagcgctgcgtggtcattctgcccgactcagtgcggaactacatgaccaagttcctgagcgacaggtggatgctgcagaagggctttctgaaggaggaggacctcacggagaagaagccctggtggtggcacctccgtgttcaggagctgggcctgtcagccccgctgaccgtgctcccgaccatcacctgtgggcacaccatcgagatcctccgggagaagggcttcgaccaggcgcccgtggtggatgaggcgggggtaatcctgggaatggtgacgcttgggaacatgctctcgtccctgcttgccgggaaggtgcagccgtcagaccaagttggcaaagtcatctacaagcagttcaaacagatccgcctcacggacacgctgggcaggctctcgcacatcctggagatggaccacttcgccctggtggtgcacgagcagatccagtaccacagcaccgggaagtccagtcagcggcagatggtgttcggggtggtcaccgccattgacttgctgaacttcgtggccgcccaggagcgggaccagaagtgaagtccggagcgctgggcggtgcggagcgggcccgccacccttgcccacttctccttcgctttcctgagccctaaacacacgcgtgattggtaactgcctggcctggcaccgttatccctgcacacggcacagagcatccgtctcccctcgttaacacatggcttcctaaatggccctgtttacggcctatgagatgaaatatgtgattttctctaatgtaacttcctcttaggatgtttcaccaaggaaatattgagagagaagtcggccaggtaggatgaacacaggcaatgactgcgcagagtggattaaaggcaaaagagagaagagtccaggaaggggcggggagaagcctgggtggctcagcatcctccacgggctgcgccgtctgctcggggctgagctggcgggagcagtttgcgcgtaagggccagcagggtaccgag

SEQ ID NO: 456850 - DNA, 1774 bp, Homo sapiens
cacagaccaagggcagcaacgagggctgctccaactggagaagaagtttttcttttgaactttttggttacccaccgtggtttgggctgagtgtgttttcaatgattattactatgagtgatgggctggccaggcagggacccaagaatgttatccgtccaccagggaagctggacatgctggtggcttcagtgggcacgggcggcaccatcacgggcattgccaggaagctgaaggagaagtgtcctggatgcaggatcattggggtggatcccgaagggtccatcctcgcagagccggaggagctgaaccagacggagcagacaacctacgaggtggaagggatcggctacgacttcatccccacggtgctggacaggacggtggtggacaagtggttcaagagcaacgatgaggaggcgttcacctttgcccgcatgctgatcgcgcaagaggggctgctgtgcggtggcagtgctggcagcacggtggcggtggccgtgaaggccgcgcaggagctgcaggagggccagcgctgcgtggtcattctgcccgactcagtgcggaactacatgaccaagttcctgagcgacaggtggatgctgcagaagggctttctgaaggaggaggacctcacggagaagaagccctggtggtggcacctccgtgttcaggagctgggcctgtcagccccgctgaccgtgctcccgaccatcacctgtgggcacaccatcgagatcctccgggagaagggcttcgaccaggcgcccgtggtggatgaggcgggggtaatcctgggaatggtgacgcttgggaacatgctctcgtccctgcttgccgggaaggtgcagccgtcagaccaagttggcaaagtcatctacaagcagttcaaacagatccgcctcacggacacgctgggcaggctctcgcacatcctggagatggaccacttcgccctggtggtgcacgagcagatccagtaccacagcaccgggaagtccagtcagcggcagatggtgttcggggtggtcaccgccattgacttgctgaacttcgtggccgcccaggagcgggaccagaagtgaagtccggagcgctgggcggtgcggagcgggcccgccacccttgcccacttctccttcgctttcctgagccctaaacacacgcgtgattggtaactgcctggcctggcaccgttatccctgcacacggcacagagcatccgtctcccctcgttaacacatggcttcctaaatggccctgtttacggcctatgagatgaaatatgtgattttctctaatgtaacttcctcttaggatgtttcaccaaggaaatattgagagagaagtcggccaggtaggatgaacacaggcaatgactgcgcagagtggattaaaggcaaaagagagaagagtccaggaaggggcggggagaagcctgggtggctcagcatcctccacgggctgcgccgtctgctcggggctgagctggcgggagcagtttgcgtgtttgggttttttaattgagatgaaattcaaataacctaaaaatcaatcacttgaaagtgaacaatcagcggcatttagtacatccagaaagttgtgtaggcaccacctctgtcacgttctggaacattctgtcatcaccccgtgaagcaatcatttcccctcccgtcttcctcctcccctggcaactgctgatcgactttgtgtctctgttgtctaaaataggttttccctgttctggacatttcatataaatggaatcacacaa

SEQ ID NO: 456851 - DNA, 1751 bp, Homo sapiens
ccacgagacattggccggcgccggcctccgcccccgcctctccgccaatcaccgcccgcctgctcccctcgccgtgggtccccgcgaggccgccaccccggggtcgccgtctccgcctcgccgcagtcggggcagccgctcgcccctcttttccatgtatccgtccaggatcccatgacagattctgttgtcacgtctccttacagagtttgagcggtgctgaactgtcagcaccatctgtccggtcccagcatgccttctgagaccccccaggcagaagtggggcccacaggctgcccccaccgctcagggccacactcggcgaaggggagcctggagaaggggtccccagaggataaggtggtggacaagtggttcaagagcaacgatgaggaggcgttcacctttgcccgcatgctgatcgcgcaagaggggctgctgtgcggtggcagtgctggcagcacggtggcggtggccgtgaaggccgcgcaggagctgcaggagggccagcgctgcgtggtcattctgcccgactcagtgcggaactacatgaccaagttcctgagcgacaggtggatgctgcagaagggctttctgaaggaggaggacctcacggagaagaagccctggtggtggcacctccgtgttcaggagctgggcctgtcagccccgctgaccgtgctcccgaccatcacctgtgggcacaccatcgagatcctccgggagaagggcttcgaccaggcgcccgtggtggatgaggcgggggtaatcctgggaatggtgacgcttgggaacatgctctcgtccctgcttgccgggaaggtgcagccgtcagaccaagttggcaaagtcatctacaagcagttcaaacagatccgcctcacggacacgctgggcaggctctcgcacatcctggagatggaccacttcgccctggtggtgcacgagcagatccagtaccacagcaccgggaagtccagtcagcggcagatggtgttcggggtggtcaccgccattgacttgctgaacttcgtggccgcccaggagcgggaccagaagtgaagtccggagcgctgggcggtgcggagcgggcccgccacccttgcccacttctccttcgctttcctgagccctaaacacacgcgtgattggtaactgcctggcctggcaccgttatccctgcacacggcacagagcatccgtctcccctcgttaacacatggcttcctaaatggccctgtttacggcctatgagatgaaatatgtgattttctctaatgtaacttcctcttaggatgtttcaccaaggaaatattgagagagaagtcggccaggtaggatgaacacaggcaatgactgcgcagagtggattaaaggcaaaagagagaagagtccaggaaggggcggggagaagcctgggtggctcagcatcctccacgggctgcgccgtctgctcggggctgagctggcgggagcagtttgcgtgtttgggttttttaattgagatgaaattcaaataacctaaaaatcaatcacttgaaagtgaacaatcagcggcatttagtacatccagaaagttgtgtaggcaccacctctgtcacgttctggaacattctgtcatcaccccgtgaagcaatcatttcccctcccgtcttcctcctcccctggcaactgctgatcgactttgtgtctctgttgtctaaaataggttttccctgttctggacatttcatataaatggaatcacacaa

SEQ ID NO: 456852 - DNA, 2319 bp, Homo sapiens
ccacgagacattggccggcgccggcctccgcccccgcctctccgccaatcaccgcccgcctgctcccctcgccgtgggtccccgcgaggccgccaccccggggtcgccgtctccgcctcgccgcagtcggggcagccgctcgcccctcttttccatgtatccgtccaggatcccatgacagattctgttgtcacgtctccttacagagtttgagcggtgctgaactgtcagcaccatctgtccggtcccagcatgccttctgagaccccccaggcagaagtggggcccacaggctgcccccaccgctcagggccacactcggcgaaggggagcctggagaaggggtccccagaggataaggaagccaaggagcccctgtggatccggcccgatgctccgagcaggtgcacctggcagctgggccggcctgcctccgagtccccacatcaccacactgccccggcaaaatctccaaaaatcttgccagatattctgaagaaaatcggggacacccctatggtcagaatcaacaagattgggaagaagttcggcctgaagtgtgagctcttggccaagtgtgagttcttcaacgcgggcgggagcgtgaaggaccgcatcagcctgcggatgattgaggatgctgagcgcgacgggacgctgaagcccggggacacgattatcgagccgacatccgggaacaccgggatcgggctggccctggctgcggcagtgaggggctatcgctgcatcatcgtgatgccagagaagatgagctccgagaaggtggacgtgctgcgggcactgggggctgagattgtgaggacgcccaccaatgccaggttcgactccccggagtcacacgtgggggtggcctggcggctgaagaacgaaatccccaattctcacatcctagaccagtaccgcaacgccagcaaccccctggctcactacgacaccaccgctgatgagatcctgcagcagtgtgatgggaagctggacatgctggtggcttcagtgggcacgggcggcaccatcacgggcattgccaggaagctgaaggagaagtgtcctggatgcaggatcattggggtggatcccgaagggtccatcctcgcagagccggaggagctgaaccagacggagcagacaacctacgaggtggaagggatcggctacgacttcatccccacggtgctggacaggacggtggtggacaagtggttcaagagcaacgatgaggaggcgttcacctttgcccgcatgctgatcgcgcaagaggggctgctgtgcggtggcagtgctggcagcacggtggcggtggccgtgaaggccgcgcaggagctgcaggagggccagcgctgcgtggtcattctgcccgactcagtgcggaactacatgaccaagttcctgagcgacaggtggatgctgcagaagggctttctgaaggaggaggacctcacggagaagaagccctgggtaatcctgggaatggtgacgcttgggaacatgctctcgtccctgcttgccgggaaggtgcagccgtcagaccaagttggcaaagtcatctacaagcagttcaaacagatccgcctcacggacacgctgggcaggctctcgcacatcctggagatggaccacttcgccctggtggtgcacgagcagatccagtaccacagcaccgggaagtccagtcagcggcagatggtgttcggggtggtcaccgccattgacttgctgaacttcgtggccgcccaggagcgggaccagaagtgaagtccggagcgctgggcggtgcggagcgggcccgccacccttgcccacttctccttcgctttcctgagccctaaacacacgcgtgattggtaactgcctggcctggcaccgttatccctgcacacggcacagagcatccgtctcccctcgttaacacatggcttcctaaatggccctgtttacggcctatgagatgaaatatgtgattttctctaatgtaacttcctcttaggatgtttcaccaaggaaatattgagagagaagtcggccaggtaggatgaacacaggcaatgactgcgcagagtggattaaaggcaaaagagagaagagtccaggaaggggcggggagaagcctgggtggctcagcatcctccacgggctgcgccgtctgctcggggctgagctggcgggagcagtttgcgtgtttgggttttttaattgagatgaatcaatacctaaatcatcactgaagtgacatcgggcttatctccaattgttggccccctgtcgtctgactctgttccccgaaaatttcctccttttctc

SEQ ID NO: 456853 - DNA, 1334 bp, Homo sapiens
ccacgagacattggccggcgccggcctccgcccccgcctctccgccaatcaccgcccgcctgctcccctcgccgtgggtccccgcgaggccgccaccccggggtcgccgtctccgcctcgccgcagtcggggcagccgctcgcccctcttttccatgtatccgtccaggatcccatgacagattctgttgtcacgtctccttacagagtttgagcggtgctgaactgtcagcaccatctgtccggtcccagcatgccttctgagaccccccaggcagaagtggggcccacaggctgcccccaccgctcagggccacactcggcgaaggggagcctggagaaggggtccccagaggataaggaagccaaggagcccctgtggatccggcccgatgctccgagcaggtgcacctggcagctgggccggcctgcctccgagtccccacatcaccacactgccccggcaaaatctccaaaaatcttgccagatattctgaagaaaatcggggacacccctatggtcagaatcaacaagattgggaagaagttcggcctgaagtgtgagctcttggccaagtgtgagttcttcaacgcgggcgggagcgtgaaggaccgcatcagcctgcggatgattgaggatgctgagcgcgacgggacgctgaagcccggggacacgattatcgagccgacatccgggaacaccgggatcgggctggccctggctgcggcagtgaggggctatcgctgcatcatcgtgatgccagagaagatgagctccgagaaggtggacgtgctgcgggcactgggggctgagattgtgaggacgcccaccaatgccaggttcgactccccggagtcacacgtgggggtggcctggcggctgaagaacgaaatccccaattctcacatcctagaccagtaccgcaacgccagcaaccccctggctcactacgacaccaccgctgatgagatcctgcagcagtgtgatgggaagctggacatgctggtggcttcagtgggcacgggcggcaccatcacgggcattgccaggaagctgaaggagaagtgtcctggatgcaggatcattggggtggattccccgaaagggtcccattccttcgcaggaggcccggagggaggctggaaccagacgggagccacaaactatggaggtgtgaggggtccggtacgacttccttccccccggtggctcgggaccggccggggtcggccagggttctccagaccgtgtgggggggtccctttccccttttgtcgccaaagggggctgtgcggggctgctccgggggccccgcgccggactgtcggccctca

SEQ ID NO: 456854 - DNA, 929 bp, Homo sapiens
gtaatcctccactgccaagtagcacttcagtgtttcatttggacccacctgtcaaaaaattgttggttagcccagaaggagccattttgaataccataaatactccagcatctaaggtttcttcactctctccatctctctctcagattgttgtatctgccagtcgaagtcctgcgtctgtcttccctgcttttcagtcgtcgggcttagagaagcctgacagagctgcatcttgaatttagactaaaagagccagtttttaaataatggggcattgttttgactcccataaaaattttcaatgtttattatactgttgaaagcatactatacattgtgtgtgtgtgtgtgtgtgtgtgtgtgtgtgtgtgtgtgtgtgtgtgtgttttaatgtatcttttcattagcttgcaacaaggctttgttttcttggggagggaaagatctgttccatttcacttactgttctgaggagggtttcaaggttctgtgtttaaagtcaggatttacctgtctgtagaacataaagtgaacaaagtttgaatagtttagagtaagctagccttttgcacatttacattgacatgtttcttcttgaatttggactgttgcagcatatctatgatatggtattcagtgtcattagtgaaatcttatttttgtttctgtaaaaaaaaaaatacatatatatatttatgcattgtgaaaaatgcagtccatgatgtaaaattgtacatattccagaatccctaacaacctgtactaaatatatgtacaaagaactatgctgtcttatttatgttttgtttacataatgtatagttttttaagtattttagtaattttggaccagtgaactgttagcaacaatgcagaagaatctgcatgtaataaactgagttgctgtatttctttgtttgaataccatt

SEQ ID NO: 456855 - DNA, 1281 bp, Homo sapiens
cgggtggggcggcagcgcccgccgcgagcacctccagttctgccggcttctgcgcgccggggccgcctctccttccgccggtgccgcggcgcctcatggaagccccggagggcggcggaggggggcctgcagcgcggggcccggaggggcagccggcgcccgaagccagggtgcacttccgagtggcgaggttcatcatggaggcaggtgtcaagctagggatgcggtccattcccattgccactgcttgcaccatttaccataagttcttttgcgagaccaacctggacgcctatgacccttacctgattgccatgtcttcaatttacttggccggcaaagtggaagagcagcacctgcggactcgtgacatcatcaatgtgtccaacaggtactttaacccaagcggtgagcccctggaattggactcccgcttctgggaactccgggacagcatcgtgcagtgtgagcttctcatgctgagagttctgcgcttccaggtctccttccagcatccacacaagtacctgctccactacctggtttccctccagaactggctgaaccgccacagctggcagcggacccctgttgccgtcaccgcctgggccctgctgcgggacagctaccatggggcgctgtgcctccgcttccaggcccagcacatcgccgtggcggtgctctacctggccctgcaggtctacggagttgaggtgcccgccgaggtcgaggctgagaagccgtggtggcaggtgtttaatgacgaccttaccaagccaatcattgataatattgtgtctgatctcattcagatttataccatggacacagagatcccctaaggtcctggcccaggcctgcccaaagagaagcccaggatggtcggctgcctggggacattgtcaccacgtcgccatgacggctggtccccacaggaccagctgggaggactggttgtgctgctggagaagggctggagaaggcaatggcatgctgccgctttgccagtccctagaagtcgcggtgcaggtgatggtgggagccgcgcctccagcgggcaggccgggagtgtactgtgtgcagctgacccaaggcagccacatctgcgtttgtcctttgagaggactttgactacaatacaggcatgacatcaatgaaaggaaagtcatgaaatcgatgagactgaatccctacggatttcttaaaagccagatttgtagggagaatgaatgtgcaacgtggctgaaatctattttgtgtaataaaaggtgatacaagtca

SEQ ID NO: 456856 - DNA, 550 bp, Homo sapiens
ctctctgagtcagaagatcaccaaggcctgttccatctggaatgttctcggccttgtaaagtgtttggcctcaacgggctggaattaaactggctttgcaggagagctactgtcttcctacatagccaagtccctgtgcccctcccctgcccatgaaatgtgattctctgcttagtgacaggtgccttgtttaacatagagggagtctaactggaacctgttttccttcttctttctaggtgtttaatgacgaccttaccaagccaatcattgataatattgtgtctgatctcattcagatttataccatggacacagagatcccctaaggtcgggagtgtactgtgtgcagctgacccaaggcagccacatctgcgtttgtcctttgagaggactttgactacaatacaggcatgacatcaatgaaaggaaagtcatgaaatcgatgagactgaatccctacggatttcttaaaagccagatttgtagggagaatgaatgtgcaacgtggctgaaatctattttgtgtaataaaaggtgatacaagtca

SEQ ID NO: 456857 - DNA, 1495 bp, Homo sapiens
cgggtggggcggcagcgcccgccgcgagcacctccagttctgccggcttctgcgcgccggggccgcctctccttccgccggtgccgcggcgcctcatggaagccccggagggcggcggaggggggcctgcagcgcggggcccggaggggcagccggcgcccgaagccagggtgcacttccgagtggcgaggttcatcatggaggcaggtgtcaagctagggatgcggtccattcccattgccactgcttgcaccatttaccataagttcttttgcgagaccaacctggacgcctatgacccttacctgattgccatgtcttcaatttacttggccggcaaagtggaagagcagcacctgcggactcgtgacatcatcaatgtgtccaacaggtactttaacccaagcggtgagcccctggaattggactcccgcttctgggaactccgggacagcatcgtgcagtgtgagcttctcatgctgagagttctgcgcttccaggtctccttccagcatccacacaagtacctgctccactacctggtttccctccagaactggctgaaccgccacagctggcagcggacccctgttgccgtcaccgcctgggccctgctgcgggacagctaccatggggcgctgtgcctccgcttccaggcccagcacatcgccgtggcggtgctctacctggccctgcaggtctacggagttgaggtgcccgccgaggtcgaggctgagaagccgtggtggcaggtgtttaatgacgaccttaccaagccaatcattgataatattgtgtctgatctcattcagatttataccatggacacagagatcccctaaggtcctggcccaggcctgcccaaagagaagcccaggatggtcggctgcctggggacattgtcaccacgtcgccatgacggctggtccccacaggaccagctgggaggactggttgtgctgctggagaagggctggagaaggcaatggcatgctgccgctttgccagtccctagaagtcgcggtgcaggtgatggtgggagccgcgcctccagcgggcaggcctaccatggggcgctgtgcctccgcttccaggcccagcacatcgccgtggcggtgctctacctggccctgcaggtctacggagttgaggtgcccgccgaggtcgaggctgagaagccgtggtggcaggtgtttaatgacgaccttaccaagccaatcattgataatattgtgtctgatctcattcagatttataccatggacacagagatcccctaaggtcctggcccaggcctgcccaaagagaagcccacatctgcgtttgtcctttgagaggactttgactacaatacaggcatgacatcaatgaaaggaaagtcatgaaatcgatgagactgaatccctacggatttcttaaaagccagatttgtagggagaatgaatgtgcaacgtggctgaaatctattttgtgtaataaaaggtgatacaagtca

SEQ ID NO: 456858 - DNA, 1221 bp, Homo sapiens
cgggtggggcggcagcgcccgccgcgagcacctccagttctgccggcttctgcgcgccggggccgcctctccttccgccggtgccgcggcgcctcatggaagccccggagggcggcggaggggggcctgcagcgcggggcccggaggggcagccggcgcccgaagccagggtgcacttccgagtggcgaggttcatcatggaggcaggtgtcaagctagggatgcggtccattcccattgccactgcttgcaccatttaccataagttcttttgcgagaccaacctggacgcctatgacccttacctgattgccatgtcttcaatttacttggccggcaaagtggaagagcagcacctgcggactcgtgacatcatcaatgtgtccaacaggtactttaacccaagcggtgagcccctggaattggactcccgcttctgggaactccgggacagcatcgtgcagtgtgagcttctcatgctgagagttctgcgcttccaggtctccttccagcatccacacaagtacctgctccactacctggtttccctccagaactggctgaaccgccacagctggcagcggacccctgttgccgtcaccgcctgggccctgctgcgggacagctaccatggggcgctgtgcctccgcttccaggcccagcacatcgccgtggcggtgctctacctggccctgcaggtctacggagttgaggtgcccgccgaggtcgaggctgagaagccgtggtggcagatttataccatggacacagagatcccctaaggtcctggcccaggcctgcccaaagagaagcccaggatggtcggctgcctggggacattgtcaccacgtcgccatgacggctggtccccacaggaccagctgggaggactggttgtgctgctggagaagggctggagaaggcaatggcatgctgccgctttgccagtccctagaagtcgcggtgcaggtgatggtgggagccgcgcctccagcgggcaggccgggagtgtactgtgtgcagctgacccaaggcagccacatctgcgtttgtcctttgagaggactttgactacaatacaggcatgacatcaatgaaaggaaagtcatgaaatcgatgagactgaatccctacggatttcttaaaagccagatttgtagggagaatgaatgtgcaacgtggctgaaatctattttgtgtaataaaaggtgatacaagtca

SEQ ID NO: 456859 - DNA, 1235 bp, Homo sapiens
cgggtggggcggcagcgcccgccgcgagcacctccagttctgccggcttctgcgcgccggggccgcctctccttccgccggtgccgcggcgcctcatggaagccccggagggcggcggaggggggcctgcagcgcggggcccggaggggcagccggcgcccgaagccagggtgcacttccgagtggcgaggttcatcatggaggcagcatttaccataagttcttttgcgagaccaacctggacgcctatgacccttacctgattgccatgtcttcaatttacttggccggcaaagtggaagagcagcacctgcggactcgtgacatcatcaatgtgtccaacaggtactttaacccaagcggtgagcccctggaattggactcccgcttctgggaactccgggacagcatcgtgcagtgtgagcttctcatgctgagagttctgcgcttccaggtctccttccagcatccacacaagtacctgctccactacctggtttccctccagaactggctgaaccgccacagctggcagcggacccctgttgccgtcaccgcctgggccctgctgcgggacagctaccatggggcgctgtgcctccgcttccaggcccagcacatcgccgtggcggtgctctacctggccctgcaggtctacggagttgaggtgcccgccgaggtcgaggctgagaagccgtggtggcaggtgtttaatgacgaccttaccaagccaatcattgataatattgtgtctgatctcattcagatttataccatggacacagagatcccctaaggtcctggcccaggcctgcccaaagagaagcccaggatggtcggctgcctggggacattgtcaccacgtcgccatgacggctggtccccacaggaccagctgggaggactggttgtgctgctggagaagggctggagaaggcaatggcatgctgccgctttgccagtccctagaagtcgcggtgcaggtgatggtgggagccgcgcctccagcgggcaggccgggagtgtactgtgtgcagctgacccaaggcagccacatctgcgtttgtcctttgagaggactttgactacaatacaggcatgacatcaatgaaaggaaagtcatgaaatcgatgagactgaatccctacggatttcttaaaagccagatttgtagggagaatgaatgtgcaacgtggctgaaatctattttgtgtaataaaaggtgatacaagtca

SEQ ID NO: 456860 - DNA, 1258 bp, Homo sapiens
gagacacagacagatggaggagagagagacgagacagagagaaactccaagatactagacggacttcatgacgcgccaggaggaccagactctccttccgccggtgccgcggcgcctcatggaagccccggagggcggcggaggggggcctgcagcgcggggcccggaggggcagccggcgcccgaagccagggtgcacttccgagtggcgaggttcatcatggaggcagcatttaccataagttcttttgcgagaccaacctggacgcctatgacccttacctgattgccatgtcttcaatttacttggccggcaaagtggaagagcagcacctgcggactcgtgacatcatcaatgtgtccaacaggtactttaacccaagcggtgagcccctggaattggactcccgcttctgggaactccgggacagcatcgtgcagtgtgagcttctcatgctgagagttctgcgcttccaggtctccttccagcatccacacaagtacctgctccactacctggtttccctccagaactggctgaaccgccacagctggcagcggacccctgttgccgtcaccgcctgggccctgctgcgggacagctaccatggggcgctgtgcctccgcttccaggcccagcacatcgccgtggcggtgctctacctggccctgcaggtctacggagttgaggtgcccgccgaggtcgaggctgagaagccgtggtggcaggtgtttaatgacgaccttaccaagccaatcattgataatattgtgtctgatctcattcagatttataccatggacacagagatcccctaaggtcctggcccaggcctgcccaaagagaagcccaggatggtcggctgcctggggacattgtcaccacgtcgccatgacggctggtccccacaggaccagctgggaggactggttgtgctgctggagaagggctggagaaggcaatggcatgctgccgctttgccagtccctagaagtcgcggtgcaggtgatggtgggagccgcgcctccagcgggcaggccgggagtgtactgtgtgcagctgacccaaggcagccacatctgcgtttgtcctttgagaggactttgactacaatacaggcatgacatcaatgaaaggaaagtcatgaaatcgatgagactgaatccctacggatttcttaaaagccagatttgtagggagaatgaatgtgcaacgtggctgaaatctattttgtgtaataaaaggtgatacaagtca

SEQ ID NO: 456861 - DNA, 1446 bp, Homo sapiens
gaagcattgccatttctctgcgcaggtactttaacccaagcggtgagcccctggaattggactcccgcttctgggaactccgggacagcatcgtgcagtgtgagcttctcatgctgagagttctgcgcttccaggtctccttccagcatccacacaagaactggctgaaccgccacagctggcagcggacccctgttgccgtcaccgcctgggccctgctgcgggacagctaccatggggcgctgtgcctccgcttccaggcccagcacatcgccgtggcggtgctctacctggccctgcaggtctacggagttgaggtgcccgccgaggtcgaggctgagaagccgtggtggcagatttataccatggacacagagatcccctaaggtcctggcccaggcctgcccaaagagaagcccaggatggtcggctgcctggggacattgtcaccacgtcgccatgacggctggtccccacaggaccagctgggaggactggttgtgctgctggagaagggctggagaaggcaatggcatgctgccgctttgccagtccctagaagtcgcggtgcaggtgatggtgggagccgcgcctccagcgggcaggccgggagtgtactgtgtgcagctgacccaaggcagccacatctgcgtttgtcctttgagaggactttgactacaatacaggcatgacatcaatgaaaggaaagtcatgaaatcgatgagactgaatccctacggatttcttaaaagccagatttgtagggagaatgaatgtgcaacgtggctgaaatctattttgtgtaataaaaggtgatacaagtcaatagggacccttggctttgctctgcagcgcatgctgcacatgggggtgtgaggggccctcagagactggttccctcagagtgctctcaggtagagtgtgtcccagccatcaggcggcaggcctggggttagggaggatcacttgcattcagaaaagtgagtcctgatcgaacgtaactaaaagtaatgcgtttttaaatgtcaaggtagccagtctggatggggaggctggagaaactcagagctgtggcccccagcacccctctgactccttgctcaaaagccagtgggtaagaaatagaccagtccaggaggcgctctctaggtcccctttcaggctagacgtacgttcagcacgtggcgtagggccgggggactggtaggtttacacaggagggtgggctccggctcctgcaggtgtgggggcaggggtgatgcaggtcagggcagagtcttgcttgactttacagagcgactatgttcagtgtcttcagaatgaagtatctgagcagatgtcacaggcttccctggtgggcaggcttgccctggctgacctgcccttcatttcgtagaactcccctgtgggttttgatgattaacttctcctaaatgtgggctcctg

SEQ ID NO: 456862 - DNA, 1171 bp, Homo sapiens
ctctctgagtcagaagatcaccaaggcctgttccatctggaatgttctcggccttgtaaagtgtttggcctcaacgggctggaattaaactggctttgcaggagagctactgtcttcctacatagccaagtccctgtgcccctcccctgcccatgaaatgtgattctctgcttagtgacaggtgccttgtttaacatagagggagtctaactggaacctgttttccttcttctttctaggtgtttaatgacgaccttaccaagccaatcattgataatattgtgtctgatctcattcagatttataccatggacacagagatcccctaaggtcgggagtgtactgtgtgcagctgacccaaggcagccacatctgcgtttgtcctttgagaggactttgactacaatacaggcatgacatcaatgaaaggaaagtcatgaaatcgatgagactgaatccctacggatttcttaaaagccagatttgtagggagaatgaatgtgcaacgtggctgaaatctattttgtgtaataaaaggtgatacaagtcaatagggacccttggctttgctctgcagcgcatgctgcacatgggggtgtgaggggccctcagagactggttccctcagagtgctctcaggtagagtgtgtcccagccatcaggcggcaggcctggggttagggaggatcacttgcattcagaaaagtgagtcctgatcgaacgtaactaaaagtaatgcgtttttaaatgtcaaggtagccagtctggatggggaggctggagaaactcagagctgtggcccccagcacccctctgactccttgctcaaaagccagtgggtaagaaatagaccagtccaggaggcgctctctaggtcccctttcaggctagacgtacgttcagcacgtggcgtagggccgggggactggtaggtttacacaggagggtgggctccggctcctgcaggtgtgggggcaggggtgatgcaggtcagggcagagtcttgcttgactttacagagcgactatgttcagtgtcttcagaatgaagtatctgagcagatgtcacaggcttccctggtgggcaggcttgccctggctgacctgcccttcatttcgtagaactcccctgtgggttttgatgattaacttctcctaaatgtgggctcctg

SEQ ID NO: 456863 - DNA, 1902 bp, Homo sapiens
cgggtggggcggcagcgcccgccgcgagcacctccagttctgccggcttctgcgcgccggggccgcctctccttccgccggtgccgcggcgcctcatggaagccccggagggcggcggaggggggcctgcagcgcggggcccggaggggcagccggcgcccgaagccagggtgcacttccgagtggcgaggttcatcatggaggcaggtgtcaagctagggatgcggtccattcccattgccactgcttgcaccatttaccataagttcttttgcgagaccaacctggacgcctatgacccttacctgattgccatgtcttcaatttacttggccggcaaagtggaagagcagcacctgcggactcgtgacatcatcaatgtgtccaacaggtactttaacccaagcggtgagcccctggaattggactcccgcttctgggaactccgggacagcatcgtgcagtgtgagcttctcatgctgagagttctgcgcttccaggtctccttccagcatccacacaagtacctgctccactacctggtttccctccagaactggctgaaccgccacagctggcagcggacccctgttgccgtcaccgcctgggccctgctgcgggacagctaccatggggcgctgtgcctccgcttccaggcccagcacatcgccgtggcggtgctctacctggccctgcaggtctacggagttgaggtgcccgccgaggtcgaggctgagaagccgtggtggcaggtgtttaatgacgaccttaccaagccaatcattgataatattgtgtctgatctcattcagatttataccatggacacagagatcccctaaggtcctggcccaggcctgcccaaagagaagcccaggatggtcggctgcctggggacattgtcaccacgtcgccatgacggctggtccccacaggaccagctgggaggactggttgtgctgctggagaagggctggagaaggcaatggcatgctgccgctttgccagtccctagaagtcgcggtgcaggtgatggtgggagccgcgcctccagcgggcaggccgggagtgtactgtgtgcagctgacccaaggcagccacatctgcgtttgtcctttgagaggactttgactacaatacaggcatgacatcaatgaaaggaaagtcatgaaatcgatgagactgaatccctacggatttcttaaaagccagatttgtagggagaatgaatgtgcaacgtggctgaaatctattttgtgtaataaaaggtgatacaagtcaatagggacccttggctttgctctgcagcgcatgctgcacatgggggtgtgaggggccctcagagactggttccctcagagtgctctcaggtagagtgtgtcccagccatcaggcggcaggcctggggttagggaggatcacttgcattcagaaaagtgagtcctgatcgaacgtaactaaaagtaatgcgtttttaaatgtcaaggtagccagtctggatggggaggctggagaaactcagagctgtggcccccagcacccctctgactccttgctcaaaagccagtgggtaagaaatagaccagtccaggaggcgctctctaggtcccctttcaggctagacgtacgttcagcacgtggcgtagggccgggggactggtaggtttacacaggagggtgggctccggctcctgcaggtgtgggggcaggggtgatgcaggtcagggcagagtcttgcttgactttacagagcgactatgttcagtgtcttcagaatgaagtatctgagcagatgtcacaggcttccctggtgggcaggcttgccctggctgacctgcccttcatttcgtagaactcccctgtgggttttgatgattaacttctcctaaatgtgggctcctg

SEQ ID NO: 456864 - DNA, 1842 bp, Homo sapiens
cgggtggggcggcagcgcccgccgcgagcacctccagttctgccggcttctgcgcgccggggccgcctctccttccgccggtgccgcggcgcctcatggaagccccggagggcggcggaggggggcctgcagcgcggggcccggaggggcagccggcgcccgaagccagggtgcacttccgagtggcgaggttcatcatggaggcaggtgtcaagctagggatgcggtccattcccattgccactgcttgcaccatttaccataagttcttttgcgagaccaacctggacgcctatgacccttacctgattgccatgtcttcaatttacttggccggcaaagtggaagagcagcacctgcggactcgtgacatcatcaatgtgtccaacaggtactttaacccaagcggtgagcccctggaattggactcccgcttctgggaactccgggacagcatcgtgcagtgtgagcttctcatgctgagagttctgcgcttccaggtctccttccagcatccacacaagtacctgctccactacctggtttccctccagaactggctgaaccgccacagctggcagcggacccctgttgccgtcaccgcctgggccctgctgcgggacagctaccatggggcgctgtgcctccgcttccaggcccagcacatcgccgtggcggtgctctacctggccctgcaggtctacggagttgaggtgcccgccgaggtcgaggctgagaagccgtggtggcagatttataccatggacacagagatcccctaaggtcctggcccaggcctgcccaaagagaagcccaggatggtcggctgcctggggacattgtcaccacgtcgccatgacggctggtccccacaggaccagctgggaggactggttgtgctgctggagaagggctggagaaggcaatggcatgctgccgctttgccagtccctagaagtcgcggtgcaggtgatggtgggagccgcgcctccagcgggcaggccgggagtgtactgtgtgcagctgacccaaggcagccacatctgcgtttgtcctttgagaggactttgactacaatacaggcatgacatcaatgaaaggaaagtcatgaaatcgatgagactgaatccctacggatttcttaaaagccagatttgtagggagaatgaatgtgcaacgtggctgaaatctattttgtgtaataaaaggtgatacaagtcaatagggacccttggctttgctctgcagcgcatgctgcacatgggggtgtgaggggccctcagagactggttccctcagagtgctctcaggtagagtgtgtcccagccatcaggcggcaggcctggggttagggaggatcacttgcattcagaaaagtgagtcctgatcgaacgtaactaaaagtaatgcgtttttaaatgtcaaggtagccagtctggatggggaggctggagaaactcagagctgtggcccccagcacccctctgactccttgctcaaaagccagtgggtaagaaatagaccagtccaggaggcgctctctaggtcccctttcaggctagacgtacgttcagcacgtggcgtagggccgggggactggtaggtttacacaggagggtgggctccggctcctgcaggtgtgggggcaggggtgatgcaggtcagggcagagtcttgcttgactttacagagcgactatgttcagtgtcttcagaatgaagtatctgagcagatgtcacaggcttccctggtgggcaggcttgccctggctgacctgcccttcatttcgtagaactcccctgtgggttttgatgattaacttctcctaaatgtgggctcctg

SEQ ID NO: 456865 - DNA, 1441 bp, Homo sapiens
cgggtggggcggcagcgcccgccgcgagcacctccagttctgccggcttctgcgcgccggggccgcctctccttccgccggtgccgcggcgcctcatggaagccccggagggcggcggaggggggcctgcagcgcggggcccggaggggcagccggcgcccgaagccagggtgcacttccgagtggcgaggttcatcatggaggcaggtgtcaagctagggatgcggtccattcccattgccactgcttgcaccatttaccataagttcttttgcgagaccaacctggacgcctatgacccttacctgattgccatgtcttcaatttacttggccggcaaagtggaagagcagcacctgcggactcgtgacatcatcaatgtgtccaacaggtactttaacccaagcggtgagcccctggaattggactcccgcttctgggaactccgggacagcatcgtgcagtgtgagcttctcatgctgagagttctgcgcttccaggtctccttccagcatccacacaagtacctgctccactacctggtttccctccagaactggctgaaccgccacagctggcagcggacccctgttgccgtcaccgcctgggccctgctgcgggacagctaccatggggcgctgtgcctccgcttccaggcccagcacatcgccgtggcggtgctctacctggccctgcaggtctacggagttgaggtgcccgccgaggtcgaggctgagaagccgtggtggcaggtgtttaatgacgaccttaccaagccaatcattgataatattgtgtctgatctcattcagatttataccatggacacagagatcccctaaggtcctggcccaggcctgcccaaagagaagcccaggatggtcggctgcctggggacattgtcaccacgtcgccatgacggctggtccccacaggaccagctgggaggactggttgtgctgctggagaagggctggagaaggcaatggcatgctgccgctttgccagtccctagaagtcgcggtgcaggtgatggtgggagccgcgcctccagcgggcaggcctaccatggggcgctgtgcctccgcttccaggcccagcacatcgccgtggcggtgctctacctggccctgcaggtctacggagttgaggtgcccgccgaggtcgaggctgagaagccgtggtggcagatttataccatggacacagagatcccctaaggtcgggagtgtactgtgtgcagctgacccaaggcagccacatctgcgtttgtcctttgagaggactttgactacaatacaggcatgacatcaatgaaaggaaagtcatgaaatcgatgagactgaatccctacggatttcttaaaagccagatttgtagggagaatgaatgtgcaacgtggctgaaatctattttgtgtaataaaaggtgatacaagtca

SEQ ID NO: 456866 - DNA, 996 bp, Homo sapiens
cgggtggggcggcagcgcccgccgcgagcacctccagttctgccggcttctgcgcgccggggccgcctctccttccgccggtgccgcggcgcctcatggaagccccggagggcggcggaggggggcctgcagcgcggggcccggaggggcagccggcgcccgaagccagggtgcacttccgagtggcgaggttcatcatggaggcaggtgtcaagctagggatgcggtccattcccattgccactgcttgcaccatttaccataagttcttttgcgagaccaacctggacgcctatgacccttacctgattgccatgtcttcaatttacttggccggcaaagtggaagagcagcacctgcggactcgtgacatcatcaatgtgtccaacaggtactttaacccaagcggtgagcccctggaattggactcccgcttctgggaactccgggacagcatcgtgcagtgtgagcttctcatgctgagagttctgcgcttccaggtctccttccagcatccacacaagtacctgctccactacctggtttccctccagaactggctgaaccgccacagctggcagcggacccctgttgccgtcaccgcctgggccctgctgcgggacagctaccatggggcgctgtgcctccgcttccaggcccagcacatcgccgtggcggtgctctacctggccctgcaggtctacggagttgaggtgcccgccgaggtcgaggctgagaagccgtggtggcagatttataccatggacacagagatcccctaaggtcctggcccaggcctgcccaaagagaagccacatctgcgtttgtcctttgagaggactttgactacaatacaggcatgacatcaatgaaaggaaagtcatgaaatcgatgagactgaatccctacggatttcttaaaagccagatttgtagggagaatgaatgtgcaacgtggctgaaatctattttgtgtaataaaaggtgatacaagtca

SEQ ID NO: 456867 - DNA, 1267 bp, Homo sapiens
cgggtggggcggcagcgcccgccgcgagcacctccagttctgccggcttctgcgcgccggggccgcctctccttccgccggtgccgcggcgcctcatggaagccccggagggcggcggaggggggcctgcagcgcggggcccggaggggcagccggcgcccgaagccagggtgcacttccgagtggcgaggttcatcatggaggcaggtgtcaagctagggatgcggtccattcccattgccactgcttgcaccatttaccataagttcttttgcgagaccaacctggacgcctatgacccttacctgattgccatgtcttcaatttacttggccggcaaagtggaagagcagcacctgcggactcgtgacatcatcaatgtgtccaacaggtactttaacccaagcggtgagcccctggaattggactcccgcttctgggaactccgggacagcatcgtgcagtgtgagcttctcatgctgagagttctgcgcttccaggtctccttccagcatccacacaaggtgtttaatgacgaccttaccaagccaatcattgataatattgtgtctgatctcattcagatttataccatggacacagagatcccctaaggtcctggcccaggcctgcccaaagagaagcccaggatggtcggctgcctggggacattgtcaccacgtcgccatgacggctggtccccacaggaccagctgggaggactggttgtgctgctggagaagggctggagaaggcaatggcatgctgccgctttgccagtccctagaagtcgcggtgcaggtgatggtgggagccgcgcctccagcgggcaggcctaccatggggcgctgtgcctccgcttccaggcccagcacatcgccgtggcggtgctctacctggccctgcaggtctacggagttgaggtgcccgccgaggtcgaggctgagaagccgtggtggcaggtgtttaatgacgaccttaccaagccaatcattgataatattgtgtctgatctcattcagatttataccatggacacagagatcccctaaggtcctggcccaggcctgcccaaagagaagcccacatctgcgtttgtcctttgagaggactttgactacaatacaggcatgacatcaatgaaaggaaagtcatgaaatcgatgagactgaatccctacggatttcttaaaagccagatttgtagggagaatgaatgtgcaacgtggctgaaatctattttgtgtaataaaaggtgatacaagtca

SEQ ID NO: 456868 - DNA, 3372 bp, Homo sapiens
ttaatacttctatttcttacaaaacaaccgtataggggttaaagtatcagtgcaaagtcccgttcaaatattgactcagtaatgagctctacaagccagcctttgtggcatgttaaattcaaaacaagcttagcatttttttttttttttggatagaaactggtgggggtggggaaagaaagagggaactgggaagagaaggaggggaacttaaaccttgcttcctgctctgtctttctcagaaaaccaaatatggcatcttccatgaggagcttgttttctgaccacgggaaatatgttgaatctttccggaggtttctcaaccattccacggaacaccagtgcatgcaggaattcatggacaagaagctgccaggcataataggaaggattggagacacaaaatcagaaattaagattctaagcataggcggaggtgcaggtgaaattgatcttcaaattctctccaaagttcaggctcaatacccaggagtttgtatcaacaatgaagttgttgagccaagtgctgaacaaattgccaaatacaaagagcttgtagccaagacatcgaacctcgagaacgtaaagtttgcttggcataaggagacatcatctgaataccaaagtagaatgttggagaaaaaggagcttcaaaagtgggactttattcatatgattcaaatgctgtattatgtaaaagacatcccagctaccctgaaattcttccatagtctcttaggtaccaatgctaagatgctcattattgttgtgtcaggaagcagtggctgggacaagctgtggaaaaagtacggatcacgctttccccaggatgacctctgccagtatatcacatcagatgacctcactcagatgctggacaacctagggcttaagtatgagtgctatgaccttttgtccaccatggatatatctgactgctttattgatggtaatgaaaatggagacctgctttgggattttttgactgaaacctgcaactttaatgccacagcaccacctgatctcagagcagagcttgggaaagatctacaagagcctgaatttagtgctaagaaagaggggaaggttctttttaataatactctgagtttcatagtgattgaggcataactatcaatcacaaaagtatattcaaaaattatattttgaacaactcgaatcactcatttatttccatattaaaatcacaaactcatccattaatgtagataaagcactgtttggatatgagatgtagcaaattccaatacattattggacttccatttggaatcatatgggatactgctggtcttatcctgtccctcctccaggtagagagaccacaagcaggctcaacataacataagctagaaaaattagatgactgaatttctatggcatattgataataaaattcattccatttgctgattgtctgaaattttctagaatactaataaaatacatactatagattctttattagtgaagtatgcactaatcaatactttgaacacaaagcctgtgttactgatttggccgttttgtgaagaaacatttatctttgtacgttcttctattgtgctttctatctaatttttattaatttgtaagagtaagcacctttagaatattaaaaattaattctttatcacatgttgtcatttcttcccattgtgttttctcttgtaattttatctgtgaattaatagctttttgtttgtctttttgatatactgaagttttctattatattcagccagatttttttttaagtctcggcttctgatacattttaaaagaccttctaaaaccaaggttttagaatactaacattttatcaaaataatattatagttttgctttttttaaaaaatgaaatctttactatgtttgaaatttagataagtataaacagtgagaacaaactgtttcccctcaaaataatagccagatgtataaacaaaatttattgaagaacaaagaaacacaaaactaaacctgttctagcttaaaatgcagcttttaccagatttctaggaattgggtaaatgcaaggttctagaaaaccttcaatgcattttgatactttatagtttcttatgtcactctcaagaactcctataagaccaagagtcatctttggactgtaggatttcaggggggttttgaaaacaaatttgatgtttcttatttttaataataacgctctgttatttttgacataaacagtacatttaataattaataaataaatattttaagtatgtaaataattagtactccctgtcacaaacaaaacaaaagtaaggttttactaaacagctcatgagccctcattctgccagtgaggaagccttcaaccccgtgtgatactcactctttcatgcaatagggcttccatgtaatgttgccgtataatcactttaaaaagttaaacgacccatctcaatcacctagtttatccccagggaatacactggcatagagagcctatttacactaataaactaccaagctttgttgttcataataagtaaaatggacttgcattgctctcttttttggacaacttcatcaatgctttttgaattatatgtttcaacaaatgaaacgacagttatccaatcagattcctgaaaatgaacactgaaccgttaatcatactgatatgtactactgacaaaggaaatctgtgaggcacacatgattgatgggtatggggccatgaagaccttgaagagcttcaccagaagtatggaaatcaagactttacagagtcttttgtataaagcacacgtgcaaaaacaaacaaaattagaactaacaatgctattgaaagatacaaaagaattgcagtccatagattggtgtttgtaaatatggcctttttctcgtccttattaaacccttagtatacaaggataaataaattctcacctgcttaattttagtgcaattgaaacacataagcctttttaaagagagaaattcccatgaaaacctactagtcagcaatgggaagttgtataaattcaagggataaacctatccctgttttcttcctgcactgtatgataataccaaaatttgggacagtcacatactaacttttcagatttgttcttgtgtttcagaaaaaagtgctcagcatgaatttggaatgttgttttatgtattgttgtggatctctcagtgtttaacatggtgccttgcatatggtaaatgctaagtaaagcgggatcaatgaattatttccttctcaaacatttatcttataccttgtgtgttcatattattattataaacagagctcaagaaacccaataaagttatgtgttgccagtgtaaaccttaacttatttagga

SEQ ID NO: 456869 - DNA, 1654 bp, Homo sapiens
ttaatacttctatttcttacaaaacaaccgtataggggttaaagtatcagtgcaaagtcccgttcaaatattgactcagtaatgagctctacaagccagcctttgtggcatgttaaattcaaaacaagcttagcatttttttttttttttggatagaaactggtgggggtggggaaagaaagagggaactgggaagagaaggaggggaacttaaaccttgcttcctgctctgtctttctcagaaaaccaaatatggcatcttccatgaggagcttgttttctgaccacgggaaatatgttgaatctttccggaggtttctcaaccattccacggaacaccagtgcatgcaggaattcatggacaagaagctgccaggcataataggaaggattggagacacaaaatcagaaattaagattctaagcataggcggaggtgcaggtgaaattgatcttcaaattctctccaaagttcaggctcaatacccaggagtttgtatcaacaatgaagttgttgagccaagtgctgaacaaattgccaaatacaaagagcttgtagccaagacatcgaacctcgagaacgtaaagtttgcttggcataaggagacatcatctgaataccaaagtagaatgttggagaaaaaggagcttcaaaagtgggactttattcatatgattcaaatgctgtattatgtaaaagacatcccagctaccctgaaattcttccatagtctcttaggtaccaatgctaagatgctcattattgttgtgtcaggaagcagtggctgggacaagctgtggaaaaagtacggatcacgctttccccaggatgacctctgccagtatatcacatcagatgacctcactcagatgctggacaacctagggcttaagtatgagtgctatgaccttttgtccaccatggatatatctgactgctttattgatggtaatgaaaatggagacctgctttgggattttttgactgaaacctgcaactttaatgccacagcaccacctgatctcagagcagagcttgggaaagatctacaagagcctgaatttagtgctaagaaagaggggaaggttctttttaataatactctgagtttcatagtgattgaggcataactatcaatcacaaaagtatattcaaaaattatattttgaacaactcgaatcactcatttatttccatattaaaatcacaaactcatccattaatgtagataaagcactgtttggatatgagatgtagcaaattccaatacattattggacttccatttggaatcatatgggatactgctggtcttatcctgtccctcctccaggtagagagaccacaagcaggctcaacataacataagctagaaaaattagatgactgaatttctatggcatattgataataaaattcattccatttgctgattgtctgaaattttctagaatactaataaaatacatactatagattctttattagtgaagtatgcactaatcaatactttgaacacaaagcctgtgttactgatttggccgttttgtgaagaaacatttatctttgtacgttcttctattgtgctttctatctaatttttattaatttgtaagagtaagcacctttagaatattaaaaattaattcttta

SEQ ID NO: 456870 - DNA, 1448 bp, Homo sapiens
  misc_feature (23)..(23): n is a, c, g, or t
  misc_feature (26)..(26): n is a, c, g, or t
ttggtgtacccgtggatcggccnttntggccgggagaaaaccaaatatggcatcttccatgaggagcttgttttctgaccacgggaaatatgttgaatctttccggaggtttctcaaccattccacggaacaccagtgcatgcaggaattcatggacaagaagctgccaggcataataggaaggattggagacacaaaatcagaaattaagattctaagcataggcggaggtgcaggtgaaattgatcttcaaattctctccaaagttcaggctcaatacccaggagtttgtatcaacaatgaagttgttgagccaagtgctgaacaaattgccaaatacaaagagcttgtagccaagacatcgaacctcgagaacgtaaagtttgcttggcataaggagacatcatctgaataccaaagtagaatgttggagaaaaaggagcttcaaaagtgggactttattcatatgattcaaatgctgtattatgtaaaagacatcccagctaccctgaaattcttccatagtctcttaggtaccaatgctaagatgctcattattgttgtgtcaggaagcagtggctgggacaagctgtggaaaaagtacggatcacgctttccccaggatgacctctgccagtatatcacatcagatgacctcactcagatgctggacaacctagggcttaagtatgagtgctatgaccttttgtccaccatggatatatctgactgctttattgatggtaatgaaaatggagacctgctttgggattttttgactgaaacctgcaactttaatgccacagcaccacctgatctcagagcagagcttgggaaagatctacaagagcctgaatttagtgctaagaaagaggggaaggttctttttaataatactctgagtttcatagtgattgaggcataactatcaatcacaaaagtatattcaaaaattatattttgaacaactcgaatcactcatttatttccatattaaaatcacaaactcatccattaatgtagataaagcactgtttggatatgagatgtagcaaattccaatacattattggacttccatttggaatcatatgggatactgctggtcttatcctgtccctcctccaggtagagagaccacaagcaggctcaacataacataagctagaaaaattagatgactgaatttctatggcatattgataataaaattcattccatttgctgattgtctgaaattttctagaatactaataaaatacatactatagattctttattagtgaagtatgcactaatcaatactttgaacacaaagcctgtgttactgatttggccgttttgtgaagaaacatttatctttgtacgttcttctattgtgctttctatctaatttttattaatttgtaagagtaagcacctttagaatattaaaaattaattcttta

SEQ ID NO: 456871 - DNA, 3110 bp, Homo sapiens
  misc_feature (23)..(23): n is a, c, g, or t
  misc_feature (26)..(26): n is a, c, g, or t
ttggtgtacccgtggatcggccnttntggccgggagaaaaccaaatatggcatcttccatgaggagcttgttttctgaccacgggaaatatgttgaatctttccggaggtttctcaaccattccacggaacaccagtgcatgcaggaattcatggacaagaagctgccaggcataataggaaggattggagacacaaaatcagaaattaagattctaagcataggcggaggtgcaggtgaaattgatcttcaaattctctccaaagttcaggctcaatacccaggagtttgtatcaacaatgaagttgttgagccaagtgctgaacaaattgccaaatacaaagagcttgtagccaagacatcgaacctcgagaacgtaaagtttgcttggcataaggagacatcatctgaataccaaagtagaatgttggagaaaaaggagcttcaaaagtgggactttattcatatgattcaaatgctgtattatgtaaaagacatcccagctaccctgaaattcttccatagtctcttaggtaccaatgctaagatgctcattattgttgtgtcaggaagcagtggctgggacaagctgtggtgacctcactcagatgctggacaacctagggcttaagtatgagtgctatgaccttttgtccaccatggatatatctgactgctttattgatggtaatgaaaatggagacctgctttgggattttttgactgaaacctgcaactttaatgccacagcaccacctgatctcagagcagagcttgggaaagatctacaagagcctgaatttagtgctaagaaagaggggaaggttctttttaataatactctgagtttcatagtgattgaggcataactatcaatcacaaaagtatattcaaaaattatattttgaacaactcgaatcactcatttatttccatattaaaatcacaaactcatccattaatgtagataaagcactgtttggatatgagatgtagcaaattccaatacattattggacttccatttggaatcatatgggatactgctggtcttatcctgtccctcctccaggtagagagaccacaagcaggctcaacataacataagctagaaaaattagatgactgaatttctatggcatattgataataaaattcattccatttgctgattgtctgaaattttctagaatactaataaaatacatactatagattctttattagtgaagtatgcactaatcaatactttgaacacaaagcctgtgttactgatttggccgttttgtgaagaaacatttatctttgtacgttcttctattgtgctttctatctaatttttattaatttgtaagagtaagcacctttagaatattaaaaattaattctttatcacatgttgtcatttcttcccattgtgttttctcttgtaattttatctgtgaattaatagctttttgtttgtctttttgatatactgaagttttctattatattcagccagatttttttttaagtctcggcttctgatacattttaaaagaccttctaaaaccaaggttttagaatactaacattttatcaaaataatattatagttttgctttttttaaaaaatgaaatctttactatgtttgaaatttagataagtataaacagtgagaacaaactgtttcccctcaaaataatagccagatgtataaacaaaatttattgaagaacaaagaaacacaaaactaaacctgttctagcttaaaatgcagcttttaccagatttctaggaattgggtaaatgcaaggttctagaaaaccttcaatgcattttgatactttatagtttcttatgtcactctcaagaactcctataagaccaagagtcatctttggactgtaggatttcaggggggttttgaaaacaaatttgatgtttcttatttttaataataacgctctgttatttttgacataaacagtacatttaataattaataaataaatattttaagtatgtaaataattagtactccctgtcacaaacaaaacaaaagtaaggttttactaaacagctcatgagccctcattctgccagtgaggaagccttcaaccccgtgtgatactcactctttcatgcaatagggcttccatgtaatgttgccgtataatcactttaaaaagttaaacgacccatctcaatcacctagtttatccccagggaatacactggcatagagagcctatttacactaataaactaccaagctttgttgttcataataagtaaaatggacttgcattgctctcttttttggacaacttcatcaatgctttttgaattatatgtttcaacaaatgaaacgacagttatccaatcagattcctgaaaatgaacactgaaccgttaatcatactgatatgtactactgacaaaggaaatctgtgaggcacacatgattgatgggtatggggccatgaagaccttgaagagcttcaccagaagtatggaaatcaagactttacagagtcttttgtataaagcacacgtgcaaaaacaaacaaaattagaactaacaatgctattgaaagatacaaaagaattgcagtccatagattggtgtttgtaaatatggcctttttctcgtccttattaaacccttagtatacaaggataaataaattctcacctgcttaattttagtgcaattgaaacacataagcctttttaaagagagaaattcccatgaaaacctactagtcagcaatgggaagttgtataaattcaagggataaacctatccctgttttcttcctgcactgtatgataataccaaaatttgggacagtcacatactaacttttcagatttgttcttgtgtttcagaaaaaagtgctcagcatgaatttggaatgttgttttatgtattgttgtggatctctcagtgtttaacatggtgccttgcatatggtaaatgctaagtaaagcgggatcaatgaattatttccttctcaaacatttatcttataccttgtgtgttcatattattattataaacagagctcaagaaacccaataaagttatgtgttgccagtgtaaaccttaacttatttagga

SEQ ID NO: 456872 - DNA, 531 bp, Homo sapiens
  misc_feature (23)..(23): n is a, c, g, or t
  misc_feature (26)..(26): n is a, c, g, or t
ttggtgtacccgtggatcggccnttntggccgggagaaaaccaaatatggcatcttccatgaggagcttgttttctgaccacgggaaatatgttgaatctttccggaggtttctcaaccattccacggaacaccagtgcatgcaggaattcatggacaagaagctgccaggcataataggaagataccagaattgctgttaacaaataaaatactggccagatgtgttggttcacgcctgtaatcctagcacttcgggaggctgaggcgggaggattacttgagcctaggagtttgagaccagcctgggcaacatagcaagatcccatctctacaaaaaagtgaaaaagttagctgaacaaggcggcatgcacatgctactccagacgctgaagtgggaagatcacttaagtccgagagatcgaggcttcagtgagatatggctgagacactgctctcagcctggatgacagagtgagaacctgtctcaaacaagagaaaaaaataaatcaaatgctattcaaaattctca

SEQ ID NO: 456873 - DNA, 907 bp, Homo sapiens
  misc_feature (23)..(23): n is a, c, g, or t
  misc_feature (26)..(26): n is a, c, g, or t
ttggtgtacccgtggatcggccnttntggccgggagaaaaccaaatatggcatcttccatgaggagcttgttttctgaccacgggaaatatgttgaatctttccggaggtttctcaaccattccacggaacaccagtgcatgcaggaattcatggacaagaagctgccaggcataataggaagataccagaattgctgttaacaaataaaatactggccagatgtgttggttcacgcctgtaatcctagcacttcgggaggctgaggcgggaggattacttgagcctaggagtttgagaccagcctgggcaacatagcaagatcccatctctacaaaaaagtgaaaaagttagctgaacaaggcggcatgcacatgctactccagacgctgaagtgggaagatcacttaagtccgagagatcgaggcttcagtgagatatggctgagacactgctctcagcctggatgacagagtgagaacctgtctcaaacaagagaaaaaaataaatcaaatgctattcaaaattctcaaaaaaaaatataaaaaaaacaacttttgccgggagcggccgcgagccacaaaaaagcttaccaaacaccactcgggtgtgggcgcggggccccatatagtaaccgcacacttgcgccaacgctgtcccaaaggaaccggggccacgcacagcgcgtcggttctccccaaaaaaaccgcggcgccacgagcgtgttgacaacccaaggcgtctggggcactggcccaccacggcccaggacctattatcacgcagcgagtgagaaaagaaatcaagacgctcactatagacacagacagctgaaatagaagagacacatagcagcaccaacaaaagcagacaacatacgcaacacacacaagacacacacaacgacc

SEQ ID NO: 456874 - DNA, 298 bp, Homo sapiens
agattctaagcataggcggaggtgcaggtatgagtaatatatttttaaagttcatatttcactttaaccattatgctgtgtgatgacaatattgttcattttttaggaagactttttttttttgcttttggaagagatcggcttattaaaactagcaatattacttcaactaacattaatgcccccatagatttacagggtttaggacattagccttcattactatctctattgtgaataagtgatgtgacttgttcttttgatagatgaaaaatcaaataggataactttaaggata

SEQ ID NO: 456875 - DNA, 3318 bp, Homo sapiens
ttaatacttctatttcttacaaaacaaccgtataggggttaaagtatcagtgcaaagtcccgttcaaatattgactcagtaatgagctctacaagccagcctttgtggcatgttaaattcaaaacaagcttagcatttttttttttttttggatagaaactggtgggggtggggaaagaaagagggaactgggaagagaaggaggggaacttaaaccttgcttcctgctctgtctttctcagaaaaccaaatatggcatcttccatgaggagcttgttttctgaccacgggaaatatgttgaatctttccggaggtttctcaaccattccacggaacaccagtgcatgcaggaattcatggacaagaagctgccaggcataataggaaggattggagacacaaaatcagaaattaagattctaagcataggcggaggtgcaggtgaaattgatcttcaaattctctccaaagttcaggctcaatacccaggagtttgtatcaacaatgaagttgttgagccaagtgctgaacaaattgccaaatacaaagagcttgtagccaagacatcgaacctcgagaacgtaaagtttgcttggcataaggagacatcatctgaataccaaagtagaatgttggagaaaaaggagcttcaaaagtgggactttattcatatgattcaaatgctgtattatgtaaaagacatcccagctaccctgaaattcttccatagtctcttaggtaccaatgctaagatgctcattattgttgtgtcaggaagcagtggctgggacaagctgtggaaaaagtacggatcacgctttccccaggatgacctctgccagtatatcacatcagatgacctcactcagatgctggacaacctagggcttaagtatgagtgctatgaccttttgtccaccatggatatatctgactgctttattgatggtaatgaaaatggagacctgctttgggattttttgactgaaacctgcaactttaatgccacagcaccacctgatctcagagcagagcttgggaaagatctacaagagcctgaatttagtgctaagaaagaggggaaggttctttttaataatactctgagtttcatagtgattgaggcataactatcaatcacaaaagtatattcaaaaattatattttgaacaactcgaatcactcatttatttccatattaaaatcacaaactcatccattaatgtagataaagcactgtttggatatgagatgtagcaaattccaatacattattggacttccatttggaatcatatgggatactgctggtcttatcctgtccctcctccaggtagagagaccacaagcaggctcaacataacataagctagaaaaattagatgactgaatttctatggcatattgataataaaattcattccatttgctgattgtctgaaattttctagaatactaataaaacaaagcctgtgttactgatttggccgttttgtgaagaaacatttatctttgtacgttcttctattgtgctttctatctaatttttattaatttgtaagagtaagcacctttagaatattaaaaattaattctttatcacatgttgtcatttcttcccattgtgttttctcttgtaattttatctgtgaattaatagctttttgtttgtctttttgatatactgaagttttctattatattcagccagatttttttttaagtctcggcttctgatacattttaaaagaccttctaaaaccaaggttttagaatactaacattttatcaaaataatattatagttttgctttttttaaaaaatgaaatctttactatgtttgaaatttagataagtataaacagtgagaacaaactgtttcccctcaaaataatagccagatgtataaacaaaatttattgaagaacaaagaaacacaaaactaaacctgttctagcttaaaatgcagcttttaccagatttctaggaattgggtaaatgcaaggttctagaaaaccttcaatgcattttgatactttatagtttcttatgtcactctcaagaactcctataagaccaagagtcatctttggactgtaggatttcaggggggttttgaaaacaaatttgatgtttcttatttttaataataacgctctgttatttttgacataaacagtacatttaataattaataaataaatattttaagtatgtaaataattagtactccctgtcacaaacaaaacaaaagtaaggttttactaaacagctcatgagccctcattctgccagtgaggaagccttcaaccccgtgtgatactcactctttcatgcaatagggcttccatgtaatgttgccgtataatcactttaaaaagttaaacgacccatctcaatcacctagtttatccccagggaatacactggcatagagagcctatttacactaataaactaccaagctttgttgttcataataagtaaaatggacttgcattgctctcttttttggacaacttcatcaatgctttttgaattatatgtttcaacaaatgaaacgacagttatccaatcagattcctgaaaatgaacactgaaccgttaatcatactgatatgtactactgacaaaggaaatctgtgaggcacacatgattgatgggtatggggccatgaagaccttgaagagcttcaccagaagtatggaaatcaagactttacagagtcttttgtataaagcacacgtgcaaaaacaaacaaaattagaactaacaatgctattgaaagatacaaaagaattgcagtccatagattggtgtttgtaaatatggcctttttctcgtccttattaaacccttagtatacaaggataaataaattctcacctgcttaattttagtgcaattgaaacacataagcctttttaaagagagaaattcccatgaaaacctactagtcagcaatgggaagttgtataaattcaagggataaacctatccctgttttcttcctgcactgtatgataataccaaaatttgggacagtcacatactaacttttcagatttgttcttgtgtttcagaaaaaagtgctcagcatgaatttggaatgttgttttatgtattgttgtggatctctcagtgtttaacatggtgccttgcatatggtaaatgctaagtaaagcgggatcaatgaattatttccttctcaaacatttatcttataccttgtgtgttcatattattattataaacagagctcaagaaacccaataaagttatgtgttgccagtgtaaaccttaacttatttagga

SEQ ID NO: 456876 - DNA, 3319 bp, Homo sapiens
ttaatacttctatttcttacaaaacaaccgtataggggttaaagtatcagtgcaaagtcccgttcaaatattgactcagtaatgagctctacaagccagcctttgtggcatgttaaattcaaaacaagcttagcatttttttttttttttggatagaaactggtgggggtggggaaagaaagagggaactgggaagagaaggaggggaacttaaaccttgcttcctgctctgtctttctcagaaaaccaaatatggcatcttccatgaggagcttgttttctgaccacgggaaatatgttgaatctttccggaggtttctcaaccattccacggaacaccagtgcatgcaggaattcatggacaagaagctgccaggcataataggaaggattggagacacaaaatcagaaattaagattctaagcataggcggaggtgcaggtgaaattgatcttcaaattctctccaaagttcaggctcaatacccaggagtttgtatcaacaatgaagttgttgagccaagtgctgaacaaattgccaaatacaaagagcttgtagccaagacatcgaacctcgagaacgtaaagtttgcttggcataaggagacatcatctgaataccaaagtagaatgttggagaaaaaggagcttcaaaagtgggactttattcatatgattcaaatgctgtattatgtaaaagacatcccagctaccctgaaattcttccatagtctcttaggtaccaatgctaagatgctcattattgttgtgtcaggaagcagtggctgggacaagctgtggaaaaagtacggatcacgctttccccaggatgacctctgccagtatatcacatcagatgacctcactcagatgctggacaacctagggcttaagtatgagtgctatgaccttttgtccaccatggatatatctgactgctttattgatggtaatgaaagcaccacctgatctcagagcagagcttgggaaagatctacaagagcctgaatttagtgctaagaaagaggggaaggttctttttaataatactctgagtttcatagtgattgaggcataactatcaatcacaaaagtatattcaaaaattatattttgaacaactcgaatcactcatttatttccatattaaaatcacaaactcatccattaatgtagataaagcactgtttggatatgagatgtagcaaattccaatacattattggacttccatttggaatcatatgggatactgctggtcttatcctgtccctcctccaggtagagagaccacaagcaggctcaacataacataagctagaaaaattagatgactgaatttctatggcatattgataataaaattcattccatttgctgattgtctgaaattttctagaatactaataaaatacatactatagattctttattagtgaagtatgcactaatcaatactttgaacacaaagcctgtgttactgatttggccgttttgtgaagaaacatttatctttgtacgttcttctattgtgctttctatctaatttttattaatttgtaagagtaagcacctttagaatattaaaaattaattctttatcacatgttgtcatttcttcccattgtgttttctcttgtaattttatctgtgaattaatagctttttgtttgtctttttgatatactgaagttttctattatattcagccagatttttttttaagtctcggcttctgatacattttaaaagaccttctaaaaccaaggttttagaatactaacattttatcaaaataatattatagttttgctttttttaaaaaatgaaatctttactatgtttgaaatttagataagtataaacagtgagaacaaactgtttcccctcaaaataatagccagatgtataaacaaaatttattgaagaacaaagaaacacaaaactaaacctgttctagcttaaaatgcagcttttaccagatttctaggaattgggtaaatgcaaggttctagaaaaccttcaatgcattttgatactttatagtttcttatgtcactctcaagaactcctataagaccaagagtcatctttggactgtaggatttcaggggggttttgaaaacaaatttgatgtttcttatttttaataataacgctctgttatttttgacataaacagtacatttaataattaataaataaatattttaagtatgtaaataattagtactccctgtcacaaacaaaacaaaagtaaggttttactaaacagctcatgagccctcattctgccagtgaggaagccttcaaccccgtgtgatactcactctttcatgcaatagggcttccatgtaatgttgccgtataatcactttaaaaagttaaacgacccatctcaatcacctagtttatccccagggaatacactggcatagagagcctatttacactaataaactaccaagctttgttgttcataataagtaaaatggacttgcattgctctcttttttggacaacttcatcaatgctttttgaattatatgtttcaacaaatgaaacgacagttatccaatcagattcctgaaaatgaacactgaaccgttaatcatactgatatgtactactgacaaaggaaatctgtgaggcacacatgattgatgggtatggggccatgaagaccttgaagagcttcaccagaagtatggaaatcaagactttacagagtcttttgtataaagcacacgtgcaaaaacaaacaaaattagaactaacaatgctattgaaagatacaaaagaattgcagtccatagattggtgtttgtaaatatggcctttttctcgtccttattaaacccttagtatacaaggataaataaattctcacctgcttaattttagtgcaattgaaacacataagcctttttaaagagagaaattcccatgaaaacctactagtcagcaatgggaagttgtataaattcaagggataaacctatccctgttttcttcctgcactgtatgataataccaaaatttgggacagtcacatactaacttttcagatttgttcttgtgtttcagaaaaaagtgctcagcatgaatttggaatgttgttttatgtattgttgtggatctctcagtgtttaacatggtgccttgcatatggtaaatgctaagtaaagcgggatcaatgaattatttccttctcaaacatttatcttataccttgtgtgttcatattattattataaacagagctcaagaaacccaataaagttatgtgttgccagtgtaaaccttaacttatttagga

SEQ ID NO: 456877 - DNA, 1074 bp, Homo sapiens
  misc_feature (958)..(958): n is a, c, g, or t
  misc_feature (963)..(963): n is a, c, g, or t
  misc_feature (973)..(973): n is a, c, g, or t
  misc_feature (981)..(982): n is a, c, g, or t
ttaatacttctatttcttacaaaacaaccgtataggggttaaagtatcagtgcaaagtcccgttcaaatattgactcagtaatgagctctacaagccagcctttgtggcatgttaaattcaaaacaagcttagcatttttttttttttttggatagaaactggtgggggtggggaaagaaagagggaactgggaagagaaggaggggaacttaaaccttgcttcctgctctgtctttctcagaaaaccaaatatggcatcttccatgaggagcttgttttctgaccacgggaaatatgttgaatctttccggaggtttctcaaccattccacggaacaccagtgcatgcaggaattcatggacaagaagctgccaggcataataggaaggattggagacacaaaatcagaaattaagattctaagcataggcggaggtgcaggtgaaattgatcttcaaattctctccaaagttcaggctcaatacccaggagtttgtatcaacaatgaagttgttgagccaagtgctgaacaaattgccaaatacaaagagcttgtagccaagacatcgaacctcgagaacgtaaagtttgcttggcataaggagacatcatctgaataccaaagtagaatgttggagaaaaaggagcttcaaaagtgggactttattcatatgattcaaatgctgtattatgtaaaagacatcccagctaccctgaaattcttccatagtctcttaggtaccaatgctaagatgctcattattgttgtgtcaggaagcagtggctgggacaagctgtggaaaaagtacggatcacgctttccccaggatgacctctgccagtatatcacatcagatgacctcactcagatgctggacaacctagggcttaagtatgagtgctatgaccttttgtccaccatggatatatctgactgctttattgatggtaatgaantgggnactggttggntttttggnngaactggatttatgtgcgccggtttaagcaagttgggaaatttaaagggtttgtgaaagggggggttaaacgggtggggggggtcaagtttt

SEQ ID NO: 456878 - DNA, 454 bp, Homo sapiens
  misc_feature (23)..(23): n is a, c, g, or t
  misc_feature (26)..(26): n is a, c, g, or t
ttggtgtacccgtggatcggccnttntggccgggagaaaaccaaatatggcatcttccatgaggagcttgttttctgaccacgggaaatatgttgaatctttccggaggtttctcaaccattccacggaacaccagtgcatgcaggaattcatggacaagaagctgccaggcataataggaaggattggagacacaaaatcagaaattaagattctaagcataggcggaggtgcaggcaagaggattatatacatctttttgttggccggacgtggttactcacgcctgtaatcccagcactttgggaggccaaggtaggcagatcacttgaggtcaagagttcgagaccagcctggccaatatggtgaaaccccgtctctactaaaaatatgaaaattagcctggcatggtggtacgtgtctgtaatcccagctacttgggagggtgaggcag

SEQ ID NO: 456879 - DNA, 763 bp, Homo sapiens
gcaaccctcctgctcaagccatcttcccaccttagcctcccagagtgttgagattacaggcatgagccaccacacgctgcctattttttttatttttacgaatttttttgttgttgcccaggctcaagcgatccacccacctttgcctcccaaagtgctgggattatgtgtgtgagccacagctcctggcctctttttttgtttttcctatcccaagttgtattactagttttggggagtttgcagacaattgaatattctataggctgtgttgcagctttagatggatcgacctgtcatgtttttgaggttatccaggctgtatatctctggagagaagggaatggcaaagagtgggagtctgagtcaagtttggttttttttttttaagagacaaggtctctgtaatccaggctgcagtacactggcatgaccatggctcactatagacttgggctcagccaatcttcctgcctcagcctcctgagtagctgggtttggttttccccagggccatatgtcagcttatttaccctcctcacttggtgtctcccagcctgccagcccatgctgttcatccagtatctgctgaatggtgattacctattaagtggaactaacacaaaattgcttatctaaaagcaattattggtgattatttccttgcagtggcccactagagggcgccattgttaagtgtaattccagtaggtgttttgtgttttttttttttaatggaataaactgaaatctttacatggta

SEQ ID NO: 456880 - DNA, 2460 bp, Homo sapiens
aagacagttttggtaaaaagtcacacgccacacaacgtgagattttattattccacgggtgcttccttgccaatagtagacatggcagctcggctcccttcccttcgggttcgccttattgttgccaattgtaaacatggcctctaggccgtgagttctcattggcagctgctctgagtccccgcccttccccgcccctccgaacgcggcctggagttgtggagtcggatatcgcagctcccgactgagctgcgcctgcgcaactcattggcgccaagatggcgatggagatgaggcttccagtggctcgcaagcctcttagcgagagactgggccgcgacactaagaaacatctagtggtgccgggggatacaatcactacggacacaggattcatgcggggccatggaacgtatatgggagaagagaagctcattgcatctgttgctggctctgtggagagagtaaacaagttgatctgtgtgaaagctttgaaaaccagatacattggtgaagtaggagacatcgtagtgggacgaatcacagaggttcaacagaagaggtggaaggtggagaccaactccaggctggattcggtcttgctgctctcgtccatgaaccttcctggaggagagctgaggagaagatctgcagaagatgagcttgcaatgagaggtttcttacaggaaggggaccttatcagtgctgaggtccaggcagtgttctctgacggagctgtctctttgcacacgaggagcctgaaatatggaaaactaggtcagggggttttggtccaggtttccccctccctggtgaaacggcagaagacccactttcatgatttgccatgtggtgcctcagtgattctcggtaacaacggcttcatctggatttacccaacacctgagcacaaagaagaggaagcagggggcttcattgcaaacctggagcctgtctctcttgctgatcgagaggtgatatcccggcttcggaactgcatcatctcgctggtaactcagaggatgatgctgtatgataccagcatcctgtactgctatgaagcatcccttccacatcagatcaaagacatcttaaagccagaaataatggaggagattgtgatggaaacacgccagaggcttttggaacaggagggataaggaggtgctccagaagcacgggactgtggaccttgcaggagtgaagactgtgatgtgtggtccccatatgtggctcagcaaagactcgagagatcatccctttgtctgcattgacggccctgtgacggcctccagcccacaggcctgctttctcctgtcctaacaccaagcctgggtggcagatgaacagtgcttccttgggttgccagctgagtcccggtattagggaatagtttcagctctttcaaagtgcacagtgttacagtcgaatgggctcccatcctggaataatatggagaatcctttgtcttccactcactgtcattcacaaggcacagtgccccatgaaattgccccaatagaaaacatggcatccctgacctccaaatggtctgttttggcctccattcctatatcctttaaatgactgagaatgcagctggtaaagttggaagaataaagttaaccaagcaggccaggcacggtggctcacgcctataatcccagcacttagggaggccaaggcgggcagatcacctgaggtcaatagttcgagaccagcctggccaacaaggtgaaaccccatctctactaaaaatacaaaaaattagccaggtgtggtggtgtgcacctgtagtcccagctatttgggaggctgaggtgggagaatcacttgaacctgggaggcggaggttgcagtgagctgaaatcgcgtaccacactccagcctgggtgacagagcgagactgtgtttcaaagaaaaaaaaaaacaagcagccttttgcttggttggaatctgattttctgttgcgtgttccttgtagccatagatgtgattatgtccacaccgggctgccttaatctgtcctgcttggagagtgacttgtaagatgctgaattattcatgataatacagtgaatgttctgggtccatgtactcagataaacatgaagaaaataagcaaagaaaaatggagactgggaaagcaaagctgttttcatcctataattgaagtagtgtggagcattaacttgtggatgattcagagttaaaagataaaaagacgccagagttctcgctgaagaatgtgagaattcctgtgcattgttttttctgatgactatctaaaaatggtgccctgatgtaggtttgggggaacattcttaaaaacaagggtgctatgtgcctgtaatccagcacttgggaagctgagtgggcagatcacctgaggtcaggagttcaagaccagcccggccaatacagtgaaacctcgtctttaccaaaaatacaaaaattagc

SEQ ID NO: 456881 - DNA, 2186 bp, Homo sapiens
ctggcgatttcattcatgggacagtcattccacttgtagttacatgaaaaaggcattcattgcatttggccgttgtgtggcttctgatgtaaatatgtggcttgttcgatttcagattactggttcatgtttttttttttttgagatggagtctcgctctgtcgcccaggctggagtgcagtggcatgatcttggctcactgcaacctccacctcccaggttcaagcgattctcctgcctcagcctcccaagtagctgggattacaggcacccgccaccacgcccagctaatttttgtatttttagtagagatggggtttcattatattggtcaggctggtctcaaactcctgacctcaagtgatccaccagcttcggcctcccaaagtgctgggattacaggcgtgagccaccacatctggccttactggttatttatgatatgacacatgaacatggagcatgtgtccaggtgtggaacttggcttataggttcaacagaagaggtggaaggtggagaccaactccaggctggattcggtcttgctgctctcgtccatgaaccttcctggaggagagctggtaagggctacagctggggccatggactagggcccagtgggctggggggagccgtgggaccctttgttccaccagaggactttgatttacactgaggttgcccctttgactcctgtttgtctgctgtgaagtttgctgcctagatgtgtatgtagacttttcaccctgtccaggtctcccgaaagagggagcagttggcatatggtaggatcagaaacatccatggggtgggatcccaacagagagttggggagagaagcccttagatgctggttgttaacagttttcctttttggatataacagccttgcatagtgaagatgttccttgaaaagttgtctttacattaggtttttgtgaattgaaaggcatttcattcaaccatgtgtggaatgtggttgctggcattccagacaaccacagtaactaagccacagccttttgtaaaatgccatggttcaccttgatcttcagtccagcgtgtatttacagagaggcttactgtgccaagctctgtgccgagtgccaagcacgattgagttccccagcaggggatataagataactgacctagtccctggcagtagaagaataaataagctgtggttatacaaaaggaaatttcagtgagagaagcttgtaggaaagacaggcattggagttgatcctggaaggatggagagactttgaatgactagttcagggaatctgagataaagggaaatgtatgagcagagatatatccaagcaggagttagtctggtcctgctggaccacagagggctgtcatggaagatgactatggaaatgttggctaggtgagattgggaggggtctgaatgttcctcagagaagggagggaaagaggaagaggagctgtggaaaagtcttttgagatggaaagtcgtgattatcactgattcccctcaagtggcttgggttacctactcttgctatagttctcagtgcttgaatattgtggttggcctcaaacatctcaaaaggaagtgaaagagaagtgatggagacctttctgaggatctggcttaagtaatgtcatttctttgtgtatttcagaggagaagatctgcagaagatgagcttgcaatgagaggtttcttacaggaaggggaccttatcagtgtatcctgcgctttgcactccagcctcttgatgcttttctgtgggactgggaaatgggccttccattgtatgtctctgacggaagaaccatgtcatccttgcagggatccgagtcttagaccaagtgtcgggctctgctgcatcctttctcagtctccttaattcaggctgactccccagctcttgttgggacctgctgctaagtcatttctttgggtcttgtaacttacggtggcctgtgctttagactaggcttttgttaatggtgttaacttttagcgcagggagtggagaaggtgttgttcacgtcaagatattaatgacaggccgagtgtggtgactcatgcctgtaatcccagcgctttggaaggccaaggagggaggactgcttgagcctaagagttcaagaccagcctgggcaacatagcaagacccccctctctacaaaaaaattaaaaaag

SEQ ID NO: 456882 - DNA, 1235 bp, Homo sapiens
caccaatttgaatatacttaggatgtatattctgtagtctccttttcattcatcccgccaatcttgcagtgacctagcttcgtgatatatttctttagctaggtcctaggtcagggggttttggtccaggtttccccctccctggtgaaacggcagaagacccactttcatgatttgccatgtggtgcctcagtgattctcggtaacaacggcttcatctggatttacccaacacctgagcacaaagaagaggaagcagggggcttcattgcaaacctggagcctgtctctcttgctgatcgagaggtgatatcccggcttcggaactgcatcatctcgctggtaactcagaggatgatgctgtatgataccagcatcctgtactgctatgaagcatcccttccacatcagatcaaagacatcttaaagccagaaataatggaggagattgtgatggaaacacgccagaggcttttggaacaggagggataaggaggtgctccagaagcacgggactgtggaccttgcaggagtgaagactgtgatgtgtggtccccatatgtggctcagcaaagactcgagagatcatccctttgtctgcattgacggccctgtgacggcctccagcccacaggcctgctttctcctgtcctaacaccaagcctgggtgacagagcgagactgtgtttcaaagaaaaaaaaaaacaagcagccttttgcttggttggaatctgattttctgttgcgtgttccttgtagccatagatgtgattatgtccacaccgggctgccttaatctgtcctgcttggagagtgacttgtaagatgctgaattattcatgataatacagtgaatgttctgggtccatgtactcagataaacatgaagaaaataagcaaagaaaaatggagactgggaaagcaaagctgttttcatcctataattgaagtagtgtggagcattaacttgtggatgattcagagttaaaagataaaaagacgccagagttctcgctgaagaatgtgagaattcctgtgcattgttttttctgatgactatctaaaaatggtgccctgatgtaggtttgggggaacattcttaaaaacaagggtgctatgtgcctgtaatccagcacttgggaagctgagtgggcagatcacctgaggtcaggagttcaagaccagcccggccaatacagtgaaacctcgtctttaccaaaaatacaaaaattagc

SEQ ID NO: 456883 - DNA, 714 bp, Homo sapiens
gttgatttggagttccagggtgatactgtctgagtcataaatgatttatttgtgaatttctgtggctggtcacgtattttggtcctgtttgtatttcccttcccctctctgtgtctccttatagcctgtctctcttgctgatcgagaggtgatatcccggcttcggaactgcatcatctcgctggtaactcagaggatgatgctgtatgataccagcatcctgtactgctatgaagcatcccttccacatcagatcaaagacatcttaaagccagaaataatggaggagattgtgatggaaacacgccagaggcttttggaacaggagggataaggaggtgctccagaagcacgggactgtggaccttgcaggagtgaagactgtgatgtgtggtccccatatgtggctcagcaaagactcgagagatcatccctttgtctgcattgacggccctgtgacggcctccagcccacaggcctgctttctcctgtcctaacaccaagcctgggtggcagatgaacagtgcttccttgggttgccagctgagtcccggtattagggaatagtttcagctctttcaaagtgcacagtgttacagtcgaatgggctcccatcctggaataatatggagaatcctttgtcttccactcactgtcattcacaaggcacagtgccccatgaaattgccccaatagaaaacatggcatccctga

SEQ ID NO: 456884 - DNA, 894 bp, Homo sapiens
ggagtgcagtggcgcgatctcggctcactgcaacctccgcctcctgggtttaagcgattctcctgcctaagcctcccgagtagctgggattacaggcacgtgccaccacgcccaactaatttttgtatttttagtagaggtggcattctaccatgttggccaggatggttttgatttcctgaccttgtgatccccccgcctcagcctgccaaagtgctgggattacaggcgtgagccactgagcccagctatagatgtcttaacatcattgttttctgttcttttgttccgggtaataataaggagctgaggacagctgaggaagggcttggctgacaaaatgccttccgacagagccctaactactccacgtaaacctaggacagtctcaatggtagtaactttgaacactgcatttgataactttcaaatacaacttggctctttttcattaaatggtatgcttctctataacaacacaataaacaacttcttacctcactttctttttttgagacagggtctcactctgtcacccaggctggagtggggtggcatggatcacagatcactggagcctctacctcccaggctcaagtgaacctatcttagcctcccgagtagctgggtccacaggcatgtgacgtaccaccatgcctggctttttttttttttttttttttttgagacagggtcttgctctgtcacctaggctggactgcagtggcacaatcacgtctcaacctcctggtctcaaccagtttccaacttcagccttctgagtagctgggactacaggtgctgagccaccacatccagctaattgtttttgttttttgtttttcggcagagatgaagtctcactatgttgcccaggctggtcttgaactcctg

SEQ ID NO: 456885 - DNA, 740 bp, Homo sapiens
  misc_feature (61)..(61): n is a, c, g, or t
  misc_feature (117)..(117): n is a, c, g, or t
tttaagacttttgcatcttcccaaccccttaagccctggccccctgaggttccctttccgnctctctccttttaatttttttaattttaattttaattttgagacagagcctcgctntgttacccagggtgggttgcagtgagctgaaatcgcgtaccacactccagcctgggtgacagagcgagactgtgtttcaaagaaaaaaaaaaacaagcagccttttgcttggttggaatctgattttctgttgcgtgttccttgtagccatagatgtgattatgtccacaccgggctgccttaatctgtcctgcttggagagtgacttgtaagatgctgaattattcatgataatacagtgaatgttctgggtccatgtactcagataaacatgaagaaaataagcaaagaaaaatggagactgggaaagcaaagctgttttcatcctataattgaagtagtgtggagcattaacttgtggatgattcagagttaaaagataaaaagacgccagagttctcgctgaagaatgtgagaattcctgtgcattgttttttctgatgactatctaaaaatggtgccctgatgtaggtttgggggaacattcttaaaaacaagggtgctatgtgcctgtaatccagcacttgggaagctgagtgggcagatcacctgaggtcaggagttcaagaccagcccggccaatacagtgaaacctcgtctttaccaaaaatacaaaaattagc

SEQ ID NO: 456886 - DNA, 788 bp, Homo sapiens
ctccaactgtgggctgggaggtgcagctgtctctcttcctccaggggcgctgcagctcagcactggggctgaggctgtcctgggaacaaaggcaggctgggtctggttaaacagcccttagacaaacgtccaatcagtccagtggatgttattgctggcaaagcttgctctgtcatctgagcctctaaatggaatttcactgcttttcttgtacgaggttgcattattgaagctatttactattttaaggagagcatacttcctaaaacaaattaggatttactagtctcttagctttatctgggtgaacgtttttattttctgagtggaacaaaaacctcttcccttaatggagtggctgcagacagccacgttgatgtacatggagtaggcagaggactgctgcagtatgctgactttcacaaccctgggtcctgcggactcttccttggcaggacgtggacttgagctgtcctgccaggaccagacatggatttgcacccagctccacccatctccttacctacccagaggcacacatctcacaggcaagatgagtgtttggggttcaggtatgagctagggtcatggaacaacgcagtgctcctgggccagcaggaggctccagctcacttcctcattggcttcagcttctctaatgtctggcacatgagttctggcttagagtgcaaggaagactgcaaagggaaatgacagagaagagtattgaaggtcaccttctgctgggatgtatgaatagcctctgagtcccaaagcgttctctgcaa

SEQ ID NO: 456887 - DNA, 571 bp, Homo sapiens
ctccaactgtgggctgggaggtgcagctgtctctcttcctccaggggcgctgcagctcagcactggggctgaggctgtcctgggaacaaaggcaggctgggtctggttaaacagcccttagacaaacgtccaatcagtccagtggatgttattgctggcaaagcttgctctgtcatctgagcctctaaatggaatttcactgcttttcttgtacgaggttgcattattgaagctatttactattttaaggagagcatacttcctaaaacaaattaggatttactagtctcttagctttattgggtttggttttccccagggccatatgtcagcttatttaccctcctcacttggtgtctcccagcctgccagcccatgctgttcatccagtatctgctgaatggtgattacctattaagtggaactaacacaaaattgcttatctaaaagcaattattggtgattatttccttgcagtggcccactagagggcgccattgttaagtgtaattccagtaggtgttttgtgttttttttttttaatggaataaactgaaatctttacatggta

SEQ ID NO: 456888 - DNA, 2710 bp, Homo sapiens
aagacagttttggtaaaaagtcacacgccacacaacgtgagattttattattccacgggtgcttccttgccaatagtagacatggcagctcggctcccttcccttcgggttcgccttattgttgccaattgtaaacatggcctctaggccgtgagttctcattggcagctgctctgagtccccgcccttccccgcccctccgaacgcggcctggagttgtggagtcggatatcgcagctcccgactgagctgcgcctgcgcaactcattggcgccaagatggcgatggagatgaggcttccagtggctcgcaagcctcttagcgagagactgggccgcgacactaagaaacatctagtggtgccgggggatacaatcactacggacacaggattcatgcggggccatggaacgtatatgggagaagagaagctcattgcatctgttgctggctctgtggagagagtaaacaagttgatctgtgtgaaagctttgaaaaccagatacattggtgaagtaggagacatcgtagtgggacgaatcacagaggttcaacagaagaggtggaaggtggagaccaactccaggctggattcggtcttgctgctctcgtccatgaaccttcctggaggagagctgaggagaagatctgcagaagatgagcttgcaatgagaggtttcttacaggaaggggaccttatcagtgctgaggtccaggcagtgttctctgacggagctgtctctttgcacacgaggagcctgaaatatggaaaactaggtcagggggttttggtccaggtttccccctccctggtgaaacggcagaagacccactttcatgatttgccatgtggtgcctcagtgattctcggtaacaacggcttcatctggatttacccaacacctgagcacaaagaagaggaagcagggggcttcattgcaaacctggagcctgtctctcttgctgatcgagaggtgatatcccggcttcggaactgcatcatctcgctggtaactcagaggatgatgctgtatgataccagcatcctgtactgctatgaagcatcccttccacatcagatcaaagacatcttaaagccagaaataatggaggagattgtgatggaaacacgccagaggcttttggaacaggagggataaggaggtgctccagaagcacgggactgtggaccttgcaggagtgaagactgtgatgtgtggtccccatatgtggctcagcaaagactcgagagatcatccctttgtctgcattgacggccctgtgacggcctccagcccacaggcctgctttctcctgtcctaacaccaagcctgggtggcagatgaacagtgcttccttgggttgccagctgagtcccggtattagggaatagtttcagctctttcaaagtgcacagtgttacagtcgaatgggctcccatcctggaataatatggagaatcctttgtcttccactcactgtcattcacaaggcacagtgccccatgaaattgccccaatagaaaacatggcatccctgacctccaaatggtctgttttggcctccattcctatatcctttaaatgactgagaatgcagctggtaaagttggaagaataaagttaaccaagcaggccaggcacggtggctcacgcctataatcccagcacttagggaggccaaggcgggcagatcacctgaggtcaatagttcgagaccagcctggccaacaaggtgaaaccccatctctactaaaaatacaaaaaattagccaggtgtggtggtgtgcacctgtagtcccagctatttgggaggctgaggtgggagaatcacttgaacctgggaggcggatccgcctcctgggtttaagcgattctcctgcctaagcctcccgagtagctgggattacaggcacgtgccaccacgcccaactaatttttgtatttttagtagaggtggcattctaccatgttggccaggatggttttgatttcctgaccttgtgatccccccgcctcagcctgccaaagtgctgggattacaggcgtgagccactgagcccagctatagatgtcttaacatcattgttttctgttcttttgttccgggtaataataaggagctgaggacagctgaggaagggcttggctgacaaaatgccttccgacagagccctaactactccacgtaaacctaggacagtctcaatggtagtaactttgaacactgcatttgataactttcaaatacaacttggctctttttcattaaatggtatgcttctctataacaacacaataaacaacttcttacctcactttctttttttgagacagggtctcactctgtcacccaggctggagtggggtggcatggatcacagatcactggagcctctacctcccaggctcaagtgaacctatcttagcctcccgagtagctgggtccacaggcatgtgacgtaccaccatgcctggctttttttttttttttttttttttgagacagggtcttgctctgtcacctaggctggactgcagtggcacaatcacgtctcaacctcctggtctcaaccagtttccaacttcagccttctgagtagctgggactacaggtgctgagccaccacatccagctaattgtttttgttttttgtttttcggcagagatgaagtctcactatgttgcccaggctggtcttgaactcctg

SEQ ID NO: 456889 - DNA, 2225 bp, Homo sapiens
aacttaggctaggtacgaggctgggttcgaatcggccgaggagatggcgatggagatgaggcttccagtggctcgcaagcctcttagcgagagactgggccgcgacactaagaaacatctagtggtgccgggggatacaatcactacggacacaggattcatgcggggccatggaacgtatatgggagaagagaagctcattgcatctgttgctggctctgtggagagagtaaacaagttgatctgtgtgaaagctttgaaaaccagatacattggtgaagtaggagacatcgtagtgggacgaatcacagaggttcaacagaagaggtggaaggtggagaccaactccaggctggattcggtcttgctgctctcgtccatgaaccttcctggaggagagctgaggagaagatctgcagaagatgagcttgcaatgagaggtttcttacaggaaggggaccttatcagtgctgaggtccaggcagtgttctctgacggagctgtctctttgcacacgaggagcctgaaatatggaaaactaggtcagggggttttggtccaggtttccccctccctggtgaaacggcagaagacccactttcatgatttgccatgtggtgcctcagtgattctcggtaacaacggcttcatctggatttacccaacacctgagcacaaagaagaggaagcagggggcttcattgcaaacctggagcctgtctctcttgctgatcgagaggtgatatcccggcttcggaactgcatcatctcgctggtaactcagaggatgatgctgtatgataccagcatcctgtactgctatgaagcatcccttccacatcagatcaaagacatcttaaagccagaaataatggaggagattgtgatggaaacacgccagaggcttttggaacaggagggataaggaggtgctccagaagcacgggactgtggaccttgcaggagtgaagactgtgatgtgtggtccccatatgtggctcagcaaagactcgagagatcatccctttgtctgcattgacggccctgtgacggcctccagcccacaggcctgctttctcctgtcctaacaccaagcctgggtggcagatgaacagtgcttccttgggttgccagctgagtcccggtattagggaatagtttcagctctttcaaagtgcacagtgttacagtcgaatgggctcccatcctggaataatatggagaatcctttgtcttccactcactgtcattcacaaggcacagtgccccatgaaattgccccaatagaaaacatggcatccctgacctccaaatggtctgttttggcctccattcctatatcctttaaatgactgagaatgcagctggtaaagttggaagaataaagttaaccaagcaggccaggcacggtggctcacgcctataatcccagcacttagggaggccaaggcgggcagatcacctgaggtcaatagttcgagaccagcctggccaacaaggtgaaaccccatctctactaaaaatacaaaaaattagccaggtgtggtggtgtgcacctgtagtcccagctatttgggaggctgaggtgggagaatcacttgaacctgggaggcggaggttgcagtgagctgaaatcgcgtaccacactccagcctgggtgacagagcgagactgtgtttcaaagaaaaaaaaaaacaagcagccttttgcttggttggaatctgattttctgttgcgtgttccttgtagccatagatgtgattatgtccacaccgggctgccttaatctgtcctgcttggagagtgacttgtaagatgctgaattattcatgataatacagtgaatgttctgggtccatgtactcagataaacatgaagaaaataagcaaagaaaaatggagactgggaaagcaaagctgttttcatcctataattgaagtagtgtggagcattaacttgtggatgattcagagttaaaagataaaaagacgccagagttctcgctgaagaatgtgagaattcctgtgcattgttttttctgatgactatctaaaaatggtgccctgatgtaggtttgggggaacattcttaaaaacaagggtgctatgtgcctgtaatccagcacttgggaagctgagtgggcagatcacctgaggtcaggagttcaagaccagcccggccaatacagtgaaacctcgtctttaccaaaaatacaaaaattagc

SEQ ID NO: 456890 - DNA, 1540 bp, Homo sapiens
aagacagttttggtaaaaagtcacacgccacacaacgtgagattttattattccacgggtgcttccttgccaatagtagacatggcagctcggctcccttcccttcgggttcgccttattgttgccaattgtaaacatggcctctaggccgtgagttctcattggcagctgctctgagtccccgcccttccccgcccctccgaacgcggcctggagttgtggagtcggatatcgcagctcccgactgagctgcgcctgcgcaactcattggcgccaagatggcgatggagatgaggcttccagtggctcgcaagcctcttagcgagagactgggccgcgacactaagaaacatctagtggtgccgggggatacaatcactacggacacaggattcatgcggggccatggaacgtatatgggagaagagaagctcattgcatctgttgctggctctgtggagagagtaaacaagttgatctgtgtgaaagctttgaaaaccagatacattggtgaagtaggagacatcgtagtgggacgaatcacagaggttcaacagaagaggtggaaggtggagaccaactccaggctggattcggtcttgctgctctcgtccatgaaccttcctggaggagagctgaggagaagatctgcagaagatgagcttgcaatgagaggtttcttacaggaaggggaccttatcagtgctgaggtccaggcagtgttctctgacggagctgtctctttgcacacgaggagcctgaaatatggaaaactaggtcagggggttttggtccaggtttccccctccctggtgaaacggcagaagacccactttcatgatttgccatgtggtgcctcagtgattctcggtaacaacggcttcatctggatttacccaacacctgagcacaaagaagaggaagcagggggcttcattgcaaacctggagcctgtctctcttgctgatcgagaggtgatatcccggcttcggaactgcatcatctcgctggtaactcagaggatgatgctgtatgataccagcatcctgtactgctatgaagcatcccttccacatcagatcaaagacatcttaaagccagaaataatggaggagattgtgatggaaacacgccagaggcttttggaacaggagggataaggaggtgctccagaagcacgggactgtggaccttgcaggagtgaagactgtgatgtgtggtccccatatgtggctcagcaaagactcgagagatcatccctttgtctgcattgacggccctgtgacggcctccagcccacaggcctgctttctcctgtcctaacaccaagcctgggtggcagatgaacagtgcttccttgggttgccagctgagtcccggtattagggaatagtttcagctctttcaaagtgcacagtgttacagtcgaatgggctcccatcctggaataatatggagaatcctttgtcttccactcactgtcattcacaaggcacagtgccccatgaaattgccccaatagaaaacatggcatccctga

SEQ ID NO: 456891 - DNA, 1329 bp, Homo sapiens
aagacagttttggtaaaaagtcacacgccacacaacgtgagattttattattccacgggtgcttccttgccaatagtagacatggcagctcggctcccttcccttcgggttcgccttattgttgccaattgtaaacatggcctctaggccgtgagttctcattggcagctgctctgagtccccgcccttccccgcccctccgaacgcggcctggagttgtggagtcggatatcgcagctcccgactgagctgcgcctgcgcaactcattggcgccaagatggcgatggagatgaggcttccagtggctcgcaagcctcttagcgagagactgggccgcgacactaagaaacatctagtggtgccgggggatacaatcactacggacacaggattcatgcggggccatggaacgtatatgggagaagagaagctcattgcatctgttgctggctctgtggagagagtaaacaagttgatctgtgtgaaagctttgaaaaccagatacattggtgaagtaggagacatcgtagtgggacgaatcacagaggttcaacagaagaggtggaaggtggagaccaactccaggctggattcggtcttgctgctctcgtccatgaaccttcctggaggagagctgaggagaagatctgcagaagatgagcttgcaatgagaggtttcttacaggaaggggaccttatcagtgctgaggtccaggcagtgttctctgacggagctgtctctttgcacacgaggagcctgaaatatggaaaactaggtcagggggttttggtccaggtttccccctccctggtgaaacggcagaagacccactttcatgatttgccatgtggtgcctcagtgattctcggtaacaacggcttcatctggatttacccaacacctgagcacaaagaagaggaagcagggggcttcattgcaaacctggagcctgtctctcttgctgatcgagaggtgatatcccggcttcggaactgcatcatctcgctggtaactcagaggatgatgctgtatgataccagcatcctgtactgctatgaagcatcccttccacatcagatcaaagacatcttaaagccagaaataatggaggagattgtgatggaaacacgccagaggcttttggaacaggagggataaggaggtgctccagaagcacgggactgtggaccttgcaggagtgaagactgtgatgtgtggtccccaggcttggtgttaggacaggagaaagcaggcctgtgggctggaggccgtcacagggccgtcaatgcagacaaagggatgatctctcgagtcttgcaagccggga

SEQ ID NO: 456892 - DNA, 3537 bp, Homo sapiens
aagacagttttggtaaaaagtcacacgccacacaacgtgagattttattattccacgggtgcttccttgccaatagtagacatggcagctcggctcccttcccttcgggttcgccttattgttgccaattgtaaacatggcctctaggccgtgagttctcattggcagctgctctgagtccccgcccttccccgcccctccgaacgcggcctggagttgtggagtcggatatcgcagctcccgactgagctgcgcctgcgcaactcattggcgccaagatggcgatggagatgaggcttccagtggctcgcaagcctcttagcgagagactgggccgcgacactaagaaacatctagtggtgccgggggatacaatcactacggacacaggattcatgcggggccatggaacgtatatgggagaagagaagctcattgcatctgttgctggctctgtggagagagtaaacaagttgatctgtgtgaaagctttgaaaaccagatacattggtgaagtaggagacatcgtagtgggacgaatcacagaggttcaacagaagaggtggaaggtggagaccaactccaggctggattcggtcttgctgctctcgtccatgaaccttcctggaggagagctggtaagggctacagctggggccatggactagggcccagtgggctggggggagccgtgggaccctttgttccaccagaggactttgatttacactgaggttgcccctttgactcctgtttgtctgctgtgaagtttgctgcctagatgtgtatgtagacttttcaccctgtccaggtctcccgaaagagggagcagttggcatatggtaggatcagaaacatccatggggtgggatcccaacagagagttggggagagaagcccttagatgctggttgttaacagttttcctttttggatataacagccttgcatagtgaagatgttccttgaaaagttgtctttacattaggtttttgtgaattgaaaggcatttcattcaaccatgtgtggaatgtggttgctggcattccagacaaccacagtaactaagccacagccttttgtaaaatgccatggttcaccttgatcttcagtccagcgtgtatttacagagaggcttactgtgccaagctctgtgccgagtgccaagcacgattgagttccccagcaggggatataagataactgacctagtccctggcagtagaagaataaataagctgtggttatacaaaaggaaatttcagtgagagaagcttgtaggaaagacaggcattggagttgatcctggaaggatggagagactttgaatgactagttcagggaatctgagataaagggaaatgtatgagcagagatatatccaagcaggagttagtctggtcctgctggaccacagagggctgtcatggaagatgactatggaaatgttggctaggtgagattgggaggggtctgaatgttcctcagagaagggagggaaagaggaagaggagctgtggaaaagtcttttgagatggaaagtcgtgattatcactgattcccctcaagtggcttgggttacctactcttgctatagttctcagtgcttgaatattgtggttggcctcaaacatctcaaaaggaagtgaaagagaagtgatggagacctttctgaggatctggcttaagtaatgtcatttctttgtgtatttcagaggagaagatctgcagaagatgagcttgcaatgagaggtttcttacaggaaggggaccttatcagtgctgaggtccaggcagtgttctctgacggagctgtctctttgcacacgaggagcctgaaatatggaaaactaggtcagggggttttggtccaggtttccccctccctggtgaaacggcagaagacccactttcatgatttgccatgtggtgcctcagtgattctcggtaacaacggcttcatctggatttacccaacacctgagcacaaagaagaggaagcagggggcttcattgcaaacctggagcctgtctctcttgctgatcgagaggtgatatcccggcttcggaactgcatcatctcgctggtaactcagaggatgatgctgtatgataccagcatcctgtactgctatgaagcatcccttccacatcagatcaaagacatcttaaagccagaaataatggaggagattgtgatggaaacacgccagaggcttttggaacaggagggataaggaggtgctccagaagcacgggactgtggaccttgcaggagtgaagactgtgatgtgtggtccccatatgtggctcagcaaagactcgagagatcatccctttgtctgcattgacggccctgtgacggcctccagcccacaggcctgctttctcctgtcctaacaccaagcctgggtggcagatgaacagtgcttccttgggttgccagctgagtcccggtattagggaatagtttcagctctttcaaagtgcacagtgttacagtcgaatgggctcccatcctggaataatatggagaatcctttgtcttccactcactgtcattcacaaggcacagtgccccatgaaattgccccaatagaaaacatggcatccctgacctccaaatggtctgttttggcctccattcctatatcctttaaatgactgagaatgcagctggtaaagttggaagaataaagttaaccaagcaggccaggcacggtggctcacgcctataatcccagcacttagggaggccaaggcgggcagatcacctgaggtcaatagttcgagaccagcctggccaacaaggtgaaaccccatctctactaaaaatacaaaaaattagccaggtgtggtggtgtgcacctgtagtcccagctatttgggaggctgaggtgggagaatcacttgaacctgggaggcggaggttgcagtgagctgaaatcgcgtaccacactccagcctgggtgacagagcgagactgtgtttcaaagaaaaaaaaaaacaagcagccttttgcttggttggaatctgattttctgttgcgtgttccttgtagccatagatgtgattatgtccacaccgggctgccttaatctgtcctgcttggagagtgacttgtaagatgctgaattattcatgataatacagtgaatgttctgggtccatgtactcagataaacatgaagaaaataagcaaagaaaaatggagactgggaaagcaaagctgttttcatcctataattgaagtagtgtggagcattaacttgtggatgattcagagttaaaagataaaaagacgccagagttctcgctgaagaatgtgagaattcctgtgcattgttttttctgatgactatctaaaaatggtgccctgatgtaggtttgggggaacattcttaaaaacaagggtgctatgtgcctgtaatccagcacttgggaagctgagtgggcagatcacctgaggtcaggagttcaagaccagcccggccaatacagtgaaacctcgtctttaccaaaaatacaaaaattagc

SEQ ID NO: 456893 - DNA, 2404 bp, Homo sapiens
ctggcgatttcattcatgggacagtcattccacttgtagttacatgaaaaaggcattcattgcatttggccgttgtgtggcttctgatgtaaatatgtggcttgttcgatttcagattactggttcatgtttttttttttttgagatggagtctcgctctgtcgcccaggctggagtgcagtggcatgatcttggctcactgcaacctccacctcccaggttcaagcgattctcctgcctcagcctcccaagtagctgggattacaggcacccgccaccacgcccagctaatttttgtatttttagtagagatggggtttcattatattggtcaggctggtctcaaactcctgacctcaagtgatccaccagcttcggcctcccaaagtgctgggattacaggcgtgagccaccacatctggccttactggttatttatgatatgacacatgaacatggagcatgtgtccaggtgtggaacttggcttataggttcaacagaagaggtggaaggtggagaccaactccaggctggattcggtcttgctgctctcgtccatgaaccttcctggaggagagctgaggagaagatctgcagaagatgagcttgcaatgagaggtttcttacaggaaggggaccttatcagtgctgaggtccaggcagtgttctctgacggagctgtctctttgcacacgaggagcctgaaatatggaaaactaggtcagggggttttggtccaggtttccccctccctggtgaaacggcagaagacccactttcatgatttgccatgtggtgcctcagtgattctcggtaacaacggcttcatctggatttacccaacacctgagcacaaagaagaggaagcagggggcttcattgcaaacctggagcctgtctctcttgctgatcgagaggtgatatcccggcttcggaactgcatcatctcgctggtaactcagaggatgatgctgtatgataccagcatcctgtactgctatgaagcatcccttccacatcagatcaaagacatcttaaagccagaaataatggaggagattgtgatggaaacacgccagaggcttttggaacaggagggataaggaggtgctccagaagcacgggactgtggaccttgcaggagtgaagactgtgatgtgtggtccccatatgtggctcagcaaagactcgagagatcatccctttgtctgcattgacggccctgtgacggcctccagcccacaggcctgctttctcctgtcctaacaccaagcctgggtggcagatgaacagtgcttccttgggttgccagctgagtcccggtattagggaatagtttcagctctttcaaagtgcacagtgttacagtcgaatgggctcccatcctggaataatatggagaatcctttgtcttccactcactgtcattcacaaggcacagtgccccatgaaattgccccaatagaaaacatggcatccctgacctccaaatggtctgttttggcctccattcctatatcctttaaatgactgagaatgcagctggtaaagttggaagaataaagttaaccaagcaggccaggcacggtggctcacgcctataatcccagcacttagggaggccaaggcgggcagatcacctgaggtcaatagttcgagaccagcctggccaacaaggtgaaaccccatctctactaaaaatacaaaaaattagccaggtgtggtggtgtgcacctgtagtcccagctatttgggaggctgaggtgggagaatcacttgaacctgggaggcggaggttgcagtgagctgaaatcgcgtaccacactccagcctgggtgacagagcgagactgtgtttcaaagaaaaaaaaaaacaagcagccttttgcttggttggaatctgattttctgttgcgtgttccttgtagccatagatgtgattatgtccacaccgggctgccttaatctgtcctgcttggagagtgacttgtaagatgctgaattattcatgataatacagtgaatgttctgggtccatgtactcagataaacatgaagaaaataagcaaagaaaaatggagactgggaaagcaaagctgttttcatcctataattgaagtagtgtggagcattaacttgtggatgattcagagttaaaagataaaaagacgccagagttctcgctgaagaatgtgagaattcctgtgcattgttttttctgatgactatctaaaaatggtgccctgatgtaggtttgggggaacattcttaaaaacaagggtgctatgtgcctgtaatccagcacttgggaagctgagtgggcagatcacctgaggtcaggagttcaagaccagcccggccaatacagtgaaacctcgtctttaccaaaaatacaaaaattagc

SEQ ID NO: 456894 - DNA, 2406 bp, Homo sapiens
aagacagttttggtaaaaagtcacacgccacacaacgtgagattttattattccacgggtgcttccttgccaatagtagacatggcagctcggctcccttcccttcgggttcgccttattgttgccaattgtaaacatggcctctaggccgtgagttctcattggcagctgctctgagtccccgcccttccccgcccctccgaacgcggcctggagttgtggagtcggatatcgcagctcccgactgagctgcgcctgcgcaactcattggcgccaagatggcgatggagatgaggcttccagtggctcgcaagcctcttagcgagagactgggccgcgacactaagaaacatctagtggtgccgggggatacaatcactacggacacaggattcatgcggggccatggaacgtatatgggagaagagaagctcattgcatctgttgctggctctgtggagagagtaaacaagttgatctgtgtgaaagctttgaaaaccagatacattggtgaagtaggagacatcgtagtgggacgaatcacagaggttcaacagaagaggtggaaggtggagaccaactccaggctggattcggtcttgctgctctcgtccatgaaccttcctggaggagagctgaggagaagatctgcagaagatgagcttgcaatgagaggtttcttacaggaaggggaccttatcagtgctgaggtccaggcagtgttctctgacggagctgtctctttgcacacgaggagcctgaaatatggaaaaacccactttcatgatttgccatgtggtgcctcagtgattctcggtaacaacggcttcatctggatttacccaacacctgagcacaaagaagaggaagcagggggcttcattgcaaacctggagcctgtctctcttgctgatcgagaggtgatatcccggcttcggaactgcatcatctcgctggtaactcagaggatgatgctgtatgataccagcatcctgtactgctatgaagcatcccttccacatcagatcaaagacatcttaaagccagaaataatggaggagattgtgatggaaacacgccagaggcttttggaacaggagggataaggaggtgctccagaagcacgggactgtggaccttgcaggagtgaagactgtgatgtgtggtccccatatgtggctcagcaaagactcgagagatcatccctttgtctgcattgacggccctgtgacggcctccagcccacaggcctgctttctcctgtcctaacaccaagcctgggtggcagatgaacagtgcttccttgggttgccagctgagtcccggtattagggaatagtttcagctctttcaaagtgcacagtgttacagtcgaatgggctcccatcctggaataatatggagaatcctttgtcttccactcactgtcattcacaaggcacagtgccccatgaaattgccccaatagaaaacatggcatccctgacctccaaatggtctgttttggcctccattcctatatcctttaaatgactgagaatgcagctggtaaagttggaagaataaagttaaccaagcaggccaggcacggtggctcacgcctataatcccagcacttagggaggccaaggcgggcagatcacctgaggtcaatagttcgagaccagcctggccaacaaggtgaaaccccatctctactaaaaatacaaaaaattagccaggtgtggtggtgtgcacctgtagtcccagctatttgggaggctgaggtgggagaatcacttgaacctgggaggcggaggttgcagtgagctgaaatcgcgtaccacactccagcctgggtgacagagcgagactgtgtttcaaagaaaaaaaaaaacaagcagccttttgcttggttggaatctgattttctgttgcgtgttccttgtagccatagatgtgattatgtccacaccgggctgccttaatctgtcctgcttggagagtgacttgtaagatgctgaattattcatgataatacagtgaatgttctgggtccatgtactcagataaacatgaagaaaataagcaaagaaaaatggagactgggaaagcaaagctgttttcatcctataattgaagtagtgtggagcattaacttgtggatgattcagagttaaaagataaaaagacgccagagttctcgctgaagaatgtgagaattcctgtgcattgttttttctgatgactatctaaaaatggtgccctgatgtaggtttgggggaacattcttaaaaacaagggtgctatgtgcctgtaatccagcacttgggaagctgagtgggcagatcacctgaggtcaggagttcaagaccagcccggccaatacagtgaaacctcgtctttaccaaaaatacaaaaattagc

SEQ ID NO: 456895 - DNA, 1792 bp, Homo sapiens
caccaatttgaatatacttaggatgtatattctgtagtctccttttcattcatcccgccaatcttgcagtgacctagcttcgtgatatatttctttagctaggtcctaggtcagggggttttggtccaggtttccccctccctggtgaaacggcagaagacccactttcatgatttgccatgtggtgcctcagtgattctcggtaacaacggcttcatctggatttacccaacacctgagcacaaagaagaggaagcagggggcttcattgcaaacctggagcctgtctctcttgctgatcgagaggtgatatcccggcttcggaactgcatcatctcgctggtaactcagaggatgatgctgtatgataccagcatcctgtactgctatgaagcatcccttccacatcagatcaaagacatcttaaagccagaaataatggaggagattgtgatggaaacacgccagaggcttttggaacaggagggataaggaggtgctccagaagcacgggactgtggaccttgcaggagtgaagactgtgatgtgtggtccccatatgtggctcagcaaagactcgagagatcatccctttgtctgcattgacggccctgtgacggcctccagcccacaggcctgctttctcctgtcctaacaccaagcctgggtggcagatgaacagtgcttccttgggttgccagctgagtcccggtattagggaatagtttcagctctttcaaagtgcacagtgttacagtcgaatgggctcccatcctggaataatatggagaatcctttgtcttccactcactgtcattcacaaggcacagtgccccatgaaattgccccaatagaaaacatggcatccctgacctccaaatggtctgttttggcctccattcctatatcctttaaatgactgagaatgcagctggtaaagttggaagaataaagttaaccaagcaggccaggcacggtggctcacgcctataatcccagcacttagggaggccaaggcgggcagatcacctgaggtcaatagttcgagaccagcctggccaacaaggtgaaaccccatctctactaaaaatacaaaaaattagccaggtgtggtggtgtgcacctgtagtcccagctatttgggaggctgaggtgggagaatcacttgaacctgggaggcggaggttgcagtgagctgaaatcgcgtaccacactccagcctgggtgacagagcgagactgtgtttcaaagaaaaaaaaaaacaagcagccttttgcttggttggaatctgattttctgttgcgtgttccttgtagccatagatgtgattatgtccacaccgggctgccttaatctgtcctgcttggagagtgacttgtaagatgctgaattattcatgataatacagtgaatgttctgggtccatgtactcagataaacatgaagaaaataagcaaagaaaaatggagactgggaaagcaaagctgttttcatcctataattgaagtagtgtggagcattaacttgtggatgattcagagttaaaagataaaaagacgccagagttctcgctgaagaatgtgagaattcctgtgcattgttttttctgatgactatctaaaaatggtgccctgatgtaggtttgggggaacattcttaaaaacaagggtgctatgtgcctgtaatccagcacttgggaagctgagtgggcagatcacctgaggtcaggagttcaagaccagcccggccaatacagtgaaacctcgtctttaccaaaaatacaaaaattagc

SEQ ID NO: 456896 - DNA, 1634 bp, Homo sapiens
gttgatttggagttccagggtgatactgtctgagtcataaatgatttatttgtgaatttctgtggctggtcacgtattttggtcctgtttgtatttcccttcccctctctgtgtctccttatagcctgtctctcttgctgatcgagaggtgatatcccggcttcggaactgcatcatctcgctggtaactcagaggatgatgctgtatgataccagcatcctgtactgctatgaagcatcccttccacatcagatcaaagacatcttaaagccagaaataatggaggagattgtgatggaaacacgccagaggcttttggaacaggagggataaggaggtgctccagaagcacgggactgtggaccttgcaggagtgaagactgtgatgtgtggtccccatatgtggctcagcaaagactcgagagatcatccctttgtctgcattgacggccctgtgacggcctccagcccacaggcctgctttctcctgtcctaacaccaagcctgggtggcagatgaacagtgcttccttgggttgccagctgagtcccggtattagggaatagtttcagctctttcaaagtgcacagtgttacagtcgaatgggctcccatcctggaataatatggagaatcctttgtcttccactcactgtcattcacaaggcacagtgccccatgaaattgccccaatagaaaacatggcatccctgacctccaaatggtctgttttggcctccattcctatatcctttaaatgactgagaatgcagctggtaaagttggaagaataaagttaaccaagcaggccaggcacggtggctcacgcctataatcccagcacttagggaggccaaggcgggcagatcacctgaggtcaatagttcgagaccagcctggccaacaaggtgaaaccccatctctactaaaaatacaaaaaattagccaggtgtggtggtgtgcacctgtagtcccagctatttgggaggctgaggtgggagaatcacttgaacctgggaggcggaggttgcagtgagctgaaatcgcgtaccacactccagcctgggtgacagagcgagactgtgtttcaaagaaaaaaaaaaacaagcagccttttgcttggttggaatctgattttctgttgcgtgttccttgtagccatagatgtgattatgtccacaccgggctgccttaatctgtcctgcttggagagtgacttgtaagatgctgaattattcatgataatacagtgaatgttctgggtccatgtactcagataaacatgaagaaaataagcaaagaaaaatggagactgggaaagcaaagctgttttcatcctataattgaagtagtgtggagcattaacttgtggatgattcagagttaaaagataaaaagacgccagagttctcgctgaagaatgtgagaattcctgtgcattgttttttctgatgactatctaaaaatggtgccctgatgtaggtttgggggaacattcttaaaaacaagggtgctatgtgcctgtaatccagcacttgggaagctgagtgggcagatcacctgaggtcaggagttcaagaccagcccggccaatacagtgaaacctcgtctttaccaaaaatacaaaaattagc

SEQ ID NO: 456897 - DNA, 665 bp, Homo sapiens
accacaaagacctgtgtgtttatctggcttagccattatgttaccttgggccagatactaattaagagattaaaataaccacagctcctggcctctttttttgtttttcctatcccaagttgtattactagttttggggagtttgcagacaattgaatattctataggctgtgttgcagctttagatggatcgacctgtcatgtttttgaggttatccaggctgtatatctctggagagaagggaatggcaaagagtgggagtctgagtcaagtttggttttttttttttaagagacaaggtctctgtaatccaggctgcagtacactggcatgaccatggctcactatagacttgggctcagccaatcttcctgcctcagcctcctgagtagctgggtttggttttccccagggccatatgtcagcttatttaccctcctcacttggtgtctcccagcctgccagcccatgctgttcatccagtatctgctgaatggtgattacctattaagtggaactaacacaaaattgcttatctaaaagcaattattggtgattatttccttgcagtggcccactagagggcgccattgttaagtgtaattccagtaggtgttttgtgttttttttttttaatggaataaactgaaatctttacatggta

SEQ ID NO: 456898 - DNA, 500 bp, Homo sapiens
tattttctgagtggaacaaaaacctcttcccttaatggagtggctgcagacagccacgttgatgtacatggagtaggcagaggactgctgcagtatgctgactttcacaaccctgggtcctgcggactcttccttggcaggacgtggacttgagctgtcctgccaggaccagacatggatttgcacccagctccacccatctccttacctacccagaggcacacatctcacaggcaagatgagtgtttggggttcaggtatgagctagggtcatggaacaacgcagtgctcctgggccagcaggaggctccagctcacttcctcattggcttcagcttctctaatgtctggcacatgagttctggcttagagtgcaaggaagactgcaaagggaaatgacagagaagagtattgaaggtcaccttctgctgggatgtatgaatagcctctgagtcccaaagcgttctctgcaaaaatgtgtactatgtgtatgcatgtag

SEQ ID NO: 456899 - DNA, 524 bp, Homo sapiens
gtggtctgtttatggttggtttcttttctgaacaaatgccttttccctttttcagatcaaagacatcttaaagccagaaataatggaggagattgtgatggaaacacgccagaggcttttggaacaggagggataaggaggtgctccagaagcacgggactgtggaccttgcaggagtgaagactgtgatgtgtggtccccatatgtggctcagcaaagactcgagagatcatccctttgtctgcattgacggccctgtgacggcctccagcccacaggcctgctttctcctgtcctaacaccaagcctgggtggcagatgaacagtgcttccttgggttgccagctgagtcccggtattagggaatagtttcagctctttcaaagtgcacagtgttacagtcgaatgggctcccatcctggaataatatggagaatcctttgtcttccactcactgtcattcacaaggcacagtgccccatgaaattgccccaatagaaaacatggcatccctgacctccaaa

SEQ ID NO: 456900 - DNA, 1006 bp, Homo sapiens
  misc_feature (881)..(882): n is a, c, g, or t
  misc_feature (886)..(886): n is a, c, g, or t
  misc_feature (891)..(891): n is a, c, g, or t
  misc_feature (894)..(894): n is a, c, g, or t
  misc_feature (900)..(900): n is a, c, g, or t
  misc_feature (914)..(915): n is a, c, g, or t
  misc_feature (923)..(923): n is a, c, g, or t
  misc_feature (933)..(935): n is a, c, g, or t
  misc_feature (937)..(937): n is a, c, g, or t
  misc_feature (941)..(941): n is a, c, g, or t
  misc_feature (965)..(966): n is a, c, g, or t
aagacagttttggtaaaaagtcacacgccacacaacgtgagattttattattccacgggtgcttccttgccaatagtagacatggcagctcggctcccttcccttcgggttcgccttattgttgccaattgtaaacatggcctctaggccgtgagttctcattggcagctgctctgagtccccgcccttccccgcccctccgaacgcggcctggagttgtggagtcggatatcgcagctcccgactgagctgcgcctgcgcaactcattggcgccaagatggcgatggagatgaggcttccagtggctcgcaagcctcttagcgagagactgggccgcgacactaagaaacatctagtggtgccgggggatacaatcactacggacacaggattcatgcggggccatggaacgtatatgggagaagagaagctcattgcatctgttgctggctctgtggagagagtaaacaagttgatctgtgtgaaagctttgaaaaccagaggagaagatctgcagaagatgagcttgcaatgagaggtttcttacaggaaggggaccttatcagtctaggtcagggggttttggtccaggtttccccctccctggtgaaacggcagaagacccactttcatgatttgccatgtggtgcctcagtgattctcggtaacaacggcttcatctggatttacccaacacctgagcacaaagaagaggaagcagggggcttcattgcaaacctggagcctgtctctcttgctgatcgagaggtgatatcccggcttcggaactgcatcatctcgctggtaactcagaggatgatgctgtatgataccagcatcctgtactgctatgaagcatcccttccacatcagatcaagnnctcnttaangcngaaatnggggggattgtggnnggaaccgncgagtttgcnnngnggtnaggggggcccaaaccggactgggnntgcggagtgcaatggtttgtgtccatgggaaaaactaaaa

SEQ ID NO: 456901 - DNA, 2242 bp, Homo sapiens
aagacagttttggtaaaaagtcacacgccacacaacgtgagattttattattccacgggtgcttccttgccaatagtagacatggcagctcggctcccttcccttcgggttcgccttattgttgccaattgtaaacatggcctctaggccgtgagttctcattggcagctgctctgagtccccgcccttccccgcccctccgaacgcggcctggagttgtggagtcggatatcgcagctcccgactgagctgcgcctgcgcaactcattggcgccaagatggcgatggagatgaggcttccagtggctcgcaagcctcttagcgagagactgggccgcgacactaagaaacatctagtggtgccgggggatacaatcactacggacacaggattcatgcggggccatggaacgtatatgggagaagagaagctcattgcatctgttgctggctctgtggagagagtaaacaagttgatctgtgtgaaagctttgaaaaccagatacattggtgaagtaggagacatcgtagtgggacgaatcacagaggttcaacagaagaggtggaaggtggagaccaactccaggctggattcggtcttgctgctctcgtccatgaaccttcctggaggagagctgaggagaagatctgcagaagatgagcttgcaatgagaggtttcttacaggaaggggaccttatcagtgctgaggtccaggcagtgttctctgacggagctgtctctttgcacacgaggagcctgaaatatggaaaactaggtcagggggttttggtccaggtttccccctccctggtgaaacggcagaagacccactttcatgatttgccatgtggtgcctcagtgattctcggtaacaacggcttcatctggatttacccaacacctgagcacaaagaagaggaagcagggggcttcattgcaaacctggagcctgtctctcttgctgatcgagaggtgatatcccggcttcggaactgcatcatctcgctggtaactcagaggatgatgctgtatgataccagcatcctgtactgctatgaagcatcccttccacatcagatcaaagacatcttaaagccagaaataatggaggagattgtgatggaaacacgccagaggcttttggaacaggagggataaggaggtgctccagaagcacgggactgtggaccttgcaggagtgaagactgtgatgtgtggtccccatatgtggctcagcaaagactcgagagatcatccctttgtctgcattgacggccctgtgacggcctccagcccacaggcctgctttctcctgtcctaacaccaagcctgggtggcagatgaacagtgcttccttgggttgccagctgagtcccggtattagggaatagtttcagctctttcaaagtgcacagtgttacagtcgaatgggctcccatcctggaataatatggagaatcctttgtcttccactcactgtcattcacaaggcacagtgccccatgaaattgccccaatagaaaacatggcatccctgacctccaaatggtctgttttggcctccattcctatatcctttaaatgatgagcccagctatagatgtcttaacatcattgttttctgttcttttgttccgggtaataataaggagctgaggacagctgaggaagggcttggctgacaaaatgccttccgacagagccctaactactccacgtaaacctaggacagtctcaatggtagtaactttgaacactgcatttgataactttcaaatacaacttggctctttttcattaaatggtatgcttctctataacaacacaataaacaacttcttacctcactttctttttttgagacagggtctcactctgtcacccaggctggagtggggtggcatggatcacagatcactggagcctctacctcccaggctcaagtgaacctatcttagcctcccgagtagctgggtccacaggcatgtgacgtaccaccatgcctggctttttttttttttttttttttttgagacagggtcttgctctgtcacctaggctggactgcagtggcacaatcacgtctcaacctcctggtctcaaccagtttccaacttcagccttctgagtagctgggactacaggtgctgagccaccacatccagctaattgtttttgttttttgtttttcggcagagatgaagtctcactatgttgcccaggctggtcttgaactcctg

SEQ ID NO: 456902 - DNA, 1903 bp, Homo sapiens
aagacagttttggtaaaaagtcacacgccacacaacgtgagattttattattccacgggtgcttccttgccaatagtagacatggcagctcggctcccttcccttcgggttcgccttattgttgccaattgtaaacatggcctctaggccgtgagttctcattggcagctgctctgagtccccgcccttccccgcccctccgaacgcggcctggagttgtggagtcggatatcgcagctcccgactgagctgcgcctgcgcaactcattggcgccaagatggcgatggagatgaggcttccagtggctcgcaagcctcttagcgagagactgggccgcgacactaagaaacatctagtggtgccgggggatacaatcactacggacacaggattcatgcggggccatggaacgtatatgggagaagagaagctcattgcatctgttgctggctctgtggagagagtaaacaagttgatctgtgtgaaagctttgaaaaccagatacattggtgaagtaggagacatcgtagtgggacgaatcacagaggttcaacagaagaggtggaaggtggagaccaactccaggctggattcggtcttgctgctctcgtccatgaaccttcctggaggagagctgaggagaagatctgcagaagatgagcttgcaatgagaggtttcttacaggaaggggaccttatcagtgctgaggtccaggcagtgttctctgacggagctgtctctttgcacacgaggagcctgaaatatggaaaactaggtcagggggttttggtccaggtttccccctccctggtgaaacggcagaagacccactttcatgatttgccatgtggtgcctcagtgattctcggtaacaacggcttcatctggatttacccaacacctgagcacaaagaagaggaagcagggggcttcattgcaaacctggagcctgtctctcttgctgatcgagaggtgatatcccggcttcggaactgcatcatctcgctggtaactcagaggatgatgctgtatgataccagcatcctgtactgctatgaagcatcccttccacatcagatcaaagacatcttaaagccagaaataatggaggagattgtgatggaaacacgccagaggcttttggaacaggagggataaggaggtgctccagaagcacgggactgtggaccttgcaggagtgaagactgtgatgtgtggtccccatatgtggctcagcaaagactcgagagatcatccctttgtctgcattgacggccctgtgacggcctccagcccacaggcctgctttctcctgtcctaacaccaagcctgggtgacagagcgagactgtgtttcaaagaaaaaaaaaaacaagcagccttttgcttggttggaatctgattttctgttgcgtgttccttgtagccatagatgtgattatgtccacaccgggctgccttaatctgtcctgcttggagagtgacttgtaagatgctgaattattcatgataatacagtgaatgttctgggtccatgtactcagataaacatgaagaaaataagcaaagaaaaatggagactgggaaagcaaagctgttttcatcctataattgaagtagtgtggagcattaacttgtggatgattcagagttaaaagataaaaagacgccagagttctcgctgaagaatgtgagaattcctgtgcattgttttttctgatgactatctaaaaatggtgccctgatgtaggtttgggggaacattcttaaaaacaagggtgctatgtgcctgtaatccagcacttgggaagctgagtgggcagatcacctgaggtcaggagttcaagaccagcccggccaatacagtgaaacctcgtctttaccaaaaatacaaaaattagc

SEQ ID NO: 456903 - DNA, 2370 bp, Homo sapiens
aagacagttttggtaaaaagtcacacgccacacaacgtgagattttattattccacgggtgcttccttgccaatagtagacatggcagctcggctcccttcccttcgggttcgccttattgttgccaattgtaaacatggcctctaggccgtgagttctcattggcagctgctctgagtccccgcccttccccgcccctccgaacgcggcctggagttgtggagtcggatatcgcagctcccgactgagctgcgcctgcgcaactcattggcgccaagatggcgatggagatgaggcttccagtggctcgcaagcctcttagcgagagactgggccgcgacactaagaaacatctagtggtgccgggggatacaatcactacggacacaggattcatgcggggccatggaacgtatatgggagaagagaagctcattgcatctgttgctggctctgtggagagagtaaacaagttgatctgtgtgaaagctttgaaaaccagatacattggtgaagtaggagacatcgtagtgggacgaatcacagagaggagaagatctgcagaagatgagcttgcaatgagaggtttcttacaggaaggggaccttatcagtgctgaggtccaggcagtgttctctgacggagctgtctctttgcacacgaggagcctgaaatatggaaaactaggtcagggggttttggtccaggtttccccctccctggtgaaacggcagaagacccactttcatgatttgccatgtggtgcctcagtgattctcggtaacaacggcttcatctggatttacccaacacctgagcacaaagaagaggaagcagggggcttcattgcaaacctggagcctgtctctcttgctgatcgagaggtgatatcccggcttcggaactgcatcatctcgctggtaactcagaggatgatgctgtatgataccagcatcctgtactgctatgaagcatcccttccacatcagatcaaagacatcttaaagccagaaataatggaggagattgtgatggaaacacgccagaggcttttggaacaggagggataaggaggtgctccagaagcacgggactgtggaccttgcaggagtgaagactgtgatgtgtggtccccatatgtggctcagcaaagactcgagagatcatccctttgtctgcattgacggccctgtgacggcctccagcccacaggcctgctttctcctgtcctaacaccaagcctgggtggcagatgaacagtgcttccttgggttgccagctgagtcccggtattagggaatagtttcagctctttcaaagtgcacagtgttacagtcgaatgggctcccatcctggaataatatggagaatcctttgtcttccactcactgtcattcacaaggcacagtgccccatgaaattgccccaatagaaaacatggcatccctgacctccaaatggtctgttttggcctccattcctatatcctttaaatgactgagaatgcagctggtaaagttggaagaataaagttaaccaagcaggccaggcacggtggctcacgcctataatcccagcacttagggaggccaaggcgggcagatcacctgaggtcaatagttcgagaccagcctggccaacaaggtgaaaccccatctctactaaaaatacaaaaaattagccaggtgtggtggtgtgcacctgtagtcccagctatttgggaggctgaggtgggagaatcacttgaacctgggaggcggaggttgcagtgagctgaaatcgcgtaccacactccagcctgggtgacagagcgagactgtgtttcaaagaaaaaaaaaaacaagcagccttttgcttggttggaatctgattttctgttgcgtgttccttgtagccatagatgtgattatgtccacaccgggctgccttaatctgtcctgcttggagagtgacttgtaagatgctgaattattcatgataatacagtgaatgttctgggtccatgtactcagataaacatgaagaaaataagcaaagaaaaatggagactgggaaagcaaagctgttttcatcctataattgaagtagtgtggagcattaacttgtggatgattcagagttaaaagataaaaagacgccagagttctcgctgaagaatgtgagaattcctgtgcattgttttttctgatgactatctaaaaatggtgccctgatgtaggtttgggggaacattcttaaaaacaagggtgctatgtgcctgtaatccagcacttgggaagctgagtgggcagatcacctgaggtcaggagttcaagaccagcccggccaatacagtgaaacctcgtctttaccaaaaatacaaaaattagc

SEQ ID NO: 456904 - DNA, 2391 bp, Homo sapiens
aagacagttttggtaaaaagtcacacgccacacaacgtgagattttattattccacgggtgcttccttgccaatagtagacatggcagctcggctcccttcccttcgggttcgccttattgttgccaattgtaaacatggcctctaggccgtgagttctcattggcagctgctctgagtccccgcccttccccgcccctccgaacgcggcctggagttgtggagtcggatatcgcagctcccgactgagctgcgcctgcgcaactcattggcgccaagatggcgatggagatgaggcttccagtggctcgcaagcctcttagcgagagactgggccgcgacactaagaaacatctagtggtgccgggggatacaatcactacggacacaggattcatgcggggccatggaacgtatatgggagaagagaagctcattgcatctgttgctggctctgtggagagagtaaacaagttgatctgtgtgaaagctttgaaaaccagatacattggtgaagtaggagacatcgtagtgggacgaatcacagaggttcaacagaagaggtggaaggtggagaccaactccaggctggattcggtcttgctgctctcgtccatgaaccttcctggaggagagctgaggagaagatctgcagaagatgagcttgcaatgagaggtttcttacaggaaggggaccttatcagtctaggtcagggggttttggtccaggtttccccctccctggtgaaacggcagaagacccactttcatgatttgccatgtggtgcctcagtgattctcggtaacaacggcttcatctggatttacccaacacctgagcacaaagaagaggaagcagggggcttcattgcaaacctggagcctgtctctcttgctgatcgagaggtgatatcccggcttcggaactgcatcatctcgctggtaactcagaggatgatgctgtatgataccagcatcctgtactgctatgaagcatcccttccacatcagatcaaagacatcttaaagccagaaataatggaggagattgtgatggaaacacgccagaggcttttggaacaggagggataaggaggtgctccagaagcacgggactgtggaccttgcaggagtgaagactgtgatgtgtggtccccatatgtggctcagcaaagactcgagagatcatccctttgtctgcattgacggccctgtgacggcctccagcccacaggcctgctttctcctgtcctaacaccaagcctgggtggcagatgaacagtgcttccttgggttgccagctgagtcccggtattagggaatagtttcagctctttcaaagtgcacagtgttacagtcgaatgggctcccatcctggaataatatggagaatcctttgtcttccactcactgtcattcacaaggcacagtgccccatgaaattgccccaatagaaaacatggcatccctgacctccaaatggtctgttttggcctccattcctatatcctttaaatgactgagaatgcagctggtaaagttggaagaataaagttaaccaagcaggccaggcacggtggctcacgcctataatcccagcacttagggaggccaaggcgggcagatcacctgaggtcaatagttcgagaccagcctggccaacaaggtgaaaccccatctctactaaaaatacaaaaaattagccaggtgtggtggtgtgcacctgtagtcccagctatttgggaggctgaggtgggagaatcacttgaacctgggaggcggaggttgcagtgagctgaaatcgcgtaccacactccagcctgggtgacagagcgagactgtgtttcaaagaaaaaaaaaaacaagcagccttttgcttggttggaatctgattttctgttgcgtgttccttgtagccatagatgtgattatgtccacaccgggctgccttaatctgtcctgcttggagagtgacttgtaagatgctgaattattcatgataatacagtgaatgttctgggtccatgtactcagataaacatgaagaaaataagcaaagaaaaatggagactgggaaagcaaagctgttttcatcctataattgaagtagtgtggagcattaacttgtggatgattcagagttaaaagataaaaagacgccagagttctcgctgaagaatgtgagaattcctgtgcattgttttttctgatgactatctaaaaatggtgccctgatgtaggtttgggggaacattcttaaaaacaagggtgctatgtgcctgtaatccagcacttgggaagctgagtgggcagatcacctgaggtcaggagttcaagaccagcccggccaatacagtgaaacctcgtctttaccaaaaatacaaaaattagc

SEQ ID NO: 456905 - DNA, 1165 bp, Homo sapiens
aagacagttttggtaaaaagtcacacgccacacaacgtgagattttattattccacgggtgcttccttgccaatagtagacatggcagctcggctcccttcccttcgggttcgccttattgttgccaattgtaaacatggcctctaggccgtgagttctcattggcagctgctctgagtccccgcccttccccgcccctccgaacgcggcctggagttgtggagtcggatatcgcagctcccgactgagctgcgcctgcgcaactcattggcgccaagatggcgatggagatgaggcttccagtggctcgcaagcctcttagcgagagactgggccgcgacactaagaaacatctagtggtgccgggggatacaatcactacggacacaggattcatgcggggccatggaacgtatatgggagaagagaagctcattgcatctgttgctggctctgtggagagagtaaacaagttgatctgtgtgaaagctttgaaaaccagatacattggtgaagtaggagacatcgtagtgggacgaatcacagaggttcaacagaagaggtggaaggtggagaccaactccaggctggattcggtcttgctgctctcgtccatgaaccttcctggaggagagctgaggagaagatctgcagaagatgagcttgcaatgagaggtttcttacaggaaggggaccttatcagtgtatcctgcgctttgcactccagcctcttgatgcttttctgtgggactgggaaatgggccttccattgtatgtctctgacggaagaaccatgtcatccttgcagggatccgagtcttagaccaagtgtcgggctctgctgcatcctttctcagtctccttaattcaggctgactccccagctcttgttgggacctgctgctaagtcatttctttgggtcttgtaacttacggtggcctgtgctttagactaggcttttgttaatggtgttaacttttagcgcagggagtggagaaggtgttgttcacgtcaagatattaatgacaggccgagtgtggtgactcatgcctgtaatcccagcgctttggaaggccaaggagggaggactgcttgagcctaagagttcaagaccagcctgggcaacatagcaagacccccctctctacaaaaaaattaaaaaag

SEQ ID NO: 456906 - DNA, 7508 bp, Homo sapiens
  misc_feature (8)..(8): n is a, c, g, or t
  misc_feature (872)..(872): n is a, c, g, or t
  misc_feature (1688)..(1688): n is a, c, g, or t
  misc_feature (1765)..(1765): n is a, c, g, or t
  misc_feature (6182)..(6182): n is a, c, g, or t
tgctcacntctgacagccagacaagggctgtgctcaggggcagctcggctgggcacacagtaggtgctttagcggacagcactgaggcccccagcaagaagcccatgagctcctccccctcccgcagtgccgccgacatctacatccgggagtatttccacagccacgtcagcggcggccaccccgaggccactcctctccgtgtgatgtacacggaccggccgctgagccagacggacccagtcacgctgcagtactgttgcctgaccgacgaccgccaggctttccgcccgcccacacgggcagagctggcgcggcaccgcgtggtggtcaccaccacctcccaggcccgtgagctcagggtgccggtcggcttcttctcccacattctcatcgatgaggcggcccagatgctggagtgcgaggccctcaccccgctggcctacgcctcgcacggcacccgcctcgtgctggcgggcgaccacatgcaggtcacaccccggctgttcagtgtggccagggcccgggcggccgagcacacgctgctgcaccgcctcttcctgtgctaccagcaggagactcacgaggtggcgcggcagagccgcctggtcttccacgagaactaccgctgcacggacgccattgtcagcttcatctcgcggcacttctacgtggccaagggcaaccccatccacgccaggggcaaggttccgccccacccccggcactacccgctcatgttctgccacgtggcgggcaacccagaccgggacatgtccatggcgtcctggctgaatctggctgagattgcgcaggtcgtcgagaaggtgcaggaggcctacaacacctggcccagctgctggggcggccgngagcagaggtgcatctgtgtcgtttcccacggtgcccaggtcagtgcactgaggcaggagctgaggaggcgggacctaggccaggtgtctgtcggcagttttgagatcctgccagggcggcagttccgggtcgtggtgctcagcactgtgcacacctgccagagcctgctcagccctggggcactggcccctgagttcttcaccgacgcccgcgtgctcaacaccgtcctgacccgcgcccagtcccagctggtggtagtgggggacgccgtggccctctgctccttcggggcctgcggcaagctctgggagagcttcatccgtgagtgcgtggagcggcacagtgtctgccccgagggcctgtccatggagcaggtcgagcagggtgtggcgcagagacggcgctggcctccccgaggcacacaggctggggcagcggggaactgggaggctgccccagagccagtaggggacctggccgaggagcaggcggctgtggtgacggccatggtgaaggcagagccgggagatgaggctctgagcccagcatcccgtgacatcacggcaaccacagcgcagacggaggctgcggcagcaccagcaggagacgcagtgaaggaagacgtggtgcccggggcctgtgcggcaggagcggctgctgcagcgggcgtggagtccacggaggctgaggatgcagaggctgacttctggccgtgggacggggagctcaacgctgacgacgccatcctacgggagcttctggacgagagccagaaggtgatggtgaccgtcggggaggacgggctgctggacacngtcgccaggcccgagtccctgcagcaggcccggctgtacgagaacctgcccccggctgcgctacggaagctgctgcncgcggagcccgagcggtaccgccactgctctttcgtgccagagaccttcgagcgggcgtcagccatcccgctggacgatgcctcctcgggccccatccaggtcaggggccgcctggactgtgggatggccttcgccggggatgaggtgctggtgcagctcctttcgggagacaaggcgcccgaggggcggcttcggggccgcgtgctgggcgtgctgaagaggaagaggcacgagctggcgtttgtgtgccgcatggacacgtgggacccgcgcatcatggtccccatcaatggctccgtgaccaagatcttcgtggccgagctgaaggacccatcgcaggtccccatctacagcctccggaagggccggctgcagcgtgtggggcttgagaggctcaccgccgaggcccggcacagccggctcttctgggtccaaattgtcctgtggcggcaaggcttctactacccgctgggcatcgtccgggaggtgctgcctgaggccagcacctgggagcagggcctccgcatcctcggcctggagtacagcttgagggtgcccccgtcggaccaggccaccatcaccaaggtgctgcagaaataccacacggagcttggccgggttgccggccgccgagaggactgccgcgccttcttgaccttcactgtggacccccagggcgcctgcaacctcgatgatgccctcagtgtccgagacctgggtcccaggtgcgaggtggctgtgcacatcactgatgtggccagcttcgtgcccagggacggggtgctggacgtggaggcgcgaaggcagggcgctgcgttctatgcccccggcagggagccagtgcccatgctgccggccagcctctgccaggacgtcctcagcctcctgcctggccgggaccgcctggccatctccctgttcctcaccatggagaaggccagtggccagctgaagagcctgcgctttgcaccctccgtggtccagtctgaccgccagctgtcctacgaggaggcggaggaggtgatcaggcagcacccgggtgccggccgtgagctgccggcccgcctggactccgtggacgcctgcgtcgtggccgcgtgctacttctctcggctgctgcgccggcaccgcctgcggtccgactgcttctatgagcagccggacgaggacggcaccctgggcttccgcgcggcccacatcatggtgaaggagtacatgattcagtttaataggctcgtggctgagttcctggtgggcagcgagtgcacgcggacggtcacgcctctgcggtggcagccagcaccccgcagccagcagctcaaggccctgtgtgagaagcatggggaccgggtgcccctgtcactgcacctcggccaccacctgcacggcggcgggggcagtccccccgacacgcggctgcacctcctggcctccctctggaagcaggtccagtttgctgcccgcacccaggactacgaacagatggtggacttggtcaccacggacgacatgcacccattcctggctcctgcaggccgcgacctccgcaaggccctggagcgctcggcgttcggccgctgcgcccggggccaccagcagcagggcggccactactcgctgcaggtggactggtacacgtgggccacctcgcccatccgcaggtacctggacgtggtgttgcagcggcagatcctgctggcgctgggccatgggggctctgcctactctgccagggacatcgatgggctctgccaggccttcagcctccagcacgcacttgcccagagctatcagcggcgggcgcgcagcctgcacctggccgtgcagctcaaggcccagcctctggacaagctgggcttcgtggtggacgtggaggcgggctcccgctgcttccggctgctcttccccagcaaccgggagacgctgcctgacccctgccccgtcccctacggctccctgcagctggccgagcacccccacgccctggcaggccggccgggcctgcggctcctgtggcggcgccgtgtctactcagcgcagggatccagcccgcccctgccactgcctggcactgtgccggacccacacaccctggccgtggagacggccctgtggaagcagctgctggagctggtggagctgcagcgctggccggaggcggctgctctcatccaggagaagggcgaggcgtcccagcggcgggagctggtgcaggtgcagcggagccactgtggccatttcctggaggtggcccgggagctgggcagtggggacaccctgcaggtgcagctcggcaccagcctgcagcacggcttcctggtaccgagccctcagctctggacggtggcaccgggcttcagcctctgcctggagcacgtggagcggcccggagactgcttctcaggccgtgtgtaccgggccccgagggaccggtaccgcgacgtggatgagtacgcctgcgtgtgggaaccattctgcgccctggagtcggccaccggcgcggttgccgagaatgactccgtcacacttcagcacctgagtgtctcctgggaggcgtcacggacgccgcaggggcagctgcagggcgccttccgcctggaggccgccttcctcgaggagaactgtgccgacatcaacttcagctgctgctacctctgcatccggctcgaggggctgctggctcccacggccagcccacgccccgggcccagcagcctcggccctggcctgaatgttgaccccggcacgtatacctgggtggcccacgggcagacggaggactgggaccaggagcgccgggcagaccggcaggaggctcccagacgggtgcacctcttcgtccaccacatgggcatggagaaggttccggaagaggtgctgaggccgggcaccctgttcaccgttgagctgctgcccaagcagcttcctgatctccgcaaggaggaagccgtgcgtggactagaggaggcgtccccgctggtcaccagcatcgcactgggccggcctgtcccgcagcccctctgcagagtgatccccagcaggttcctggagcggcagacctacaacatccccggaggccgccacaagctgaaccccagccagaacgtggcggtcagggaggctctggagaagcctttcacggtcattcagggcccaccaggtacagggaagacgatcgtgggcctccacatcgtattctggtttcataaatcaaaccaggagcaggtgcagcccggaggccccccccgtggggagaagcggctggggggtccctgcatcttgtactgcggcccctccaacaagtcggtggatgtcctggcaggactgctcctgagaaggatggagctgaagcccctccgtgtgtacagtgagcaggctgaggccagcgagttcccagtgccgcgtgtgggcagcaggaagctgctcaggaagagcccccgggaggggaggccgaaccagagcctcaggagcatcaccctgcaccaccggatccggcaggcccccaacccttactcgtcggaaatcaaggcctttgacacccggctgcagagaggggagctcttctccagggaggacctggtctggtacaagaaggtcttgtgggaggctcggaagttcgagctggaccggcatgaggtcatcctctgcacctgctcctgtgcagcctctgccagcctcaaaatcctggacgtgaggcagatccttgttgacgaggcaggcatggccacggaacctgaaaccctcatccccctggtgcagttcccacaggccgagaaggtggttcttctcggagaccacaagcagctgcggcctgtggtcaagaatgagcggctgcaaaacctgggtctggaccggtctctgttcgagcggtaccacgaggacgcacatatgctggacactcagtaccgcatgcatgagggcatctgtgccttcccctctgtggcgttctacaagagcaagctgaagacgtggcagggcctgaggaggccgcccagtgtcctgggccacgctggcaaggagagctgccctgtcatctttggccacgtgcagggccacgagcggagcctgctggtgtccacggacgaagggaatgagaactccaaggccaacctggaggaggtggctgaggtggtccgtatcaccaagcagctgaccctggggaggaccgtagagccccaggacatcgccgtcctcacgccctacaacgcgcaggcctctgagatcagcaaggcccttcggcgagagggcatcgccggggtggccgtgtcctccatcaccaagagccaggggagcgagtggcgctatgtgctggtgagcaccgtccgcacctgtgccaagagcgacctggaccagcggcccaccaagagctggctcaagaagtttctgggcttcgttgtggaccccaaccaagtgaangtggctgtcacgcgggcccaggaggggctctgcctgatcggagaccacctccttctgcgctgctgccccctctggcgtagcctcctggacttctgcgaggctcagcagaccctcgtgcctgccggccaggtgcgcgtctgcaggaggccaactatgccttcctgaagagccctctccacctgcaaggtgccaggactgggagggaaagtccagggcccccccaccctccccaccaccctccgccatcagcctgcctgggccagcctgcctcctggcctcaggatctccctggggcaggaagtgggtggacttggaggaggaacggcaagggccggtccccacactcttgctcctcctgggcatctggggacaggaacacctctcagggtggccaagaggggcttccttgggaccagtgtaaggaagttctgctgtccctgggaagtctcagaaccaggaaggaaaccctgtggaggctgccctttgacctttggacgccacctgtaatcactctggatggtgtctgtggagttcaggtttattttctatttaaatgaactaaaagccagcatcctgccgggcgcggtggctcacgcccataatccagcactttgggaagccgaggcgggcagatcacctgaggtcaggagttcgagaccatcctggccaacatggtgaaaccccgtctccactaaaaatacaaaattagctgggcgtggtggcgggcgcctgtaatcccagctacttgggaggctgaggcaggagaatcgcttgactccaggaggcgcaggctgcagtgagctctgatggtaccactgcactccagcctgggtgacagagcgagaccctgtcttaaaaaaaaaaacaaaacaaaaccagcatctgttactggaacagagacctcagcccaagctcaggacaaggaggcctccctgggagagggggcctttctcccaccatcaccgcctgtgtccttcaggggctgctggagggcagcccaaagccaggggcccaccccgccccaccccaccccaccccaccctctgaaatgtgaaaagcctgcactcttcctgtgggctgcgcagtgggctcgggggttggggggtgccggggcgatgcttccaccctggactgagtgttcggggcagcctgctcggctgtatgtttctcgcacgctcacccgcttcagtgcggctctgtccctgctgccgcctccagtcctgagggaggggcttgccccaccttctacattccaatttttatatctttgaattatgtgattagatattaatttaatgataaaaccactctgaaagctcatctcac

SEQ ID NO: 456907 - DNA, 2234 bp, Homo sapiens
  misc_feature (908)..(908): n is a, c, g, or t
gctccctggagaagagctcttctccaggtcctccctggagaagagctcccctctctgcaggggaggacctggtctggtacaagaaggtcttgtgggaggctcggaagttcgagctggaccggcatgaggtcatcctctgcacctgctcctgtgcagcctctgccagcctcaaaatcctggacgtgaggcagatccttgttgacgaggcaggcatggccacggaacctgaaaccctcatccccctggtgcagttcccacaggccgagaaggtggttcttctcggagaccacaagcagctgcggcctgtggtcaagaatgagcggctgcaaaacctgggtctggaccggtctctgttcgagcggtaccacgaggacgcacatatgctggacactcagtaccgcatgcatgagggcatctgtgccttcccctctgtggcgttctacaagagcaagctgaagacgtggcagggcctgaggaggccgcccagtgtcctgggccacgctggcaaggagagctgccctgtcatctttggccacgtgcagggccacgagcggagcctgctggtgtccacggacgaagggaatgagaactccaaggccaacctggaggaggtggctgaggtggtccgtatcaccaagcagctgaccctggggaggaccgtagagccccaggacatcgccgtcctcacgccctacaacgcgcaggcctctgagatcagcaaggcccttcggcgagagggcatcgccggggtggccgtgtcctccatcaccaagagccaggggagcgagtggcgctatgtgctggtgagcaccgtccgcacctgtgccaagagcgacctggaccagcggcccaccaagagctggctcaagaagtttctgggcttcgttgtggaccccaaccaagtgaangtggctgtcacgcgggcccaggaggggctctgcctgatcggagaccacctccttctgcgctgctgccccctctggcgtagcctcctggacttctgcgaggctcagcagaccctcgtgcctgccggccaggtgcgcgtctgcaggaggccaactatgccttcctgaagagccctctccacctgcaaggtgccaggactgggagggaaagtccagggcccccccaccctccccaccaccctccgccatcagcctgcctgggccagcctgcctcctggcctcaggatctccctggggcaggaagtgggtggacttggaggaggaacggcaagggccggtccccacactcttgctcctcctgggcatctggggacaggaacacctctcagggtggccaagaggggcttccttgggaccagtgtaaggaagttctgctgtccctgggaagtctcagaaccaggaaggaaaccctgtggaggctgccctttgacctttggacgccacctgtaatcactctggatggtgtctgtggagttcaggtttattttctatttaaatgaactaaaagccagcatcctgccgggcgcggtggctcacgcccataatccagcactttgggaagccgaggcgggcagatcacctgaggtcaggagttcgagaccatcctggccaacatggtgaaaccccgtctccactaaaaatacaaaattagctgggcgtggtggcgggcgcctgtaatcccagctacttgggaggctgaggcaggagaatcgcttgactccaggaggcgcaggctgcagtgagctctgatggtaccactgcactccagcctgggtgacagagcgagaccctgtcttaaaaaaaaaaacaaaacaaaaccagcatctgttactggaacagagacctcagcccaagctcaggacaaggaggcctccctgggagagggggcctttctcccaccatcaccgcctgtgtccttcaggggctgctggagggcagcccaaagccaggggcccaccccgccccaccccaccccaccccaccctctgaaatgtgaaaagcctgcactcttcctgtgggctgcgcagtgggctcgggggttggggggtgccggggcgatgcttccaccctggactgagtgttcggggcagcctgctcggctgtatgtttctcgcacgctcacccgcttcagtgcggctctgtccctgctgccgcctccagtcctgagggaggggcttgccccaccttctacattccaatttttatatctttgaattatgtgattagatattaatttaatgataaaaccactctgaaagctcatctcac

SEQ ID NO: 456908 - DNA, 1133 bp, Homo sapiens
caggaggcaggctggccaggcaggctgatggcggagggtggtggggagggtgggggggccctggactttccctgcctcctggcctcaggatctccctggggcaggaagtgggtggacttggaggaggaacggcaagggccggtccccacactcttgctcctcctgggcatctggggacaggaacacctctcagggtggccaagaggggcttccttgggaccagtgtaaggaagttctgctgtccctgggaagtctcagaaccaggaaggaaaccctgtggaggctgccctttgacctttggacgccacctgtaatcactctggatggtgtctgtggagttcaggtttattttctatttaaatgaactaaaagccagcatcctgccgggcgcggtggctcacgcccataatccagcactttgggaagccgaggcgggcagatcacctgaggtcaggagttcgagaccatcctggccaacatggtgaaaccccgtctccactaaaaatacaaaattagctgggcgtggtggcgggcgcctgtaatcccagctacttgggaggctgaggcaggagaatcgcttgactccaggaggcgcaggctgcagtgagctctgatggtaccactgcactccagcctgggtgacagagcgagaccctgtcttaaaaaaaaaaacaaaacaaaaccagcatctgttactggaacagagacctcagcccaagctcaggacaaggaggcctccctgggagagggggcctttctcccaccatcaccgcctgtgtccttcaggggctgctggagggcagcccaaagccaggggcccaccccgccccaccccaccccaccccaccctctgaaatgtgaaaagcctgcactcttcctgtgggctgcgcagtgggctcgggggttggggggtgccggggcgatgcttccaccctggactgagtgttcggggcagcctgctcggctgtatgtttctcgcacgctcacccgcttcagtgcggctctgtccctgctgccgcctccagtcctgagggaggggcttgccccaccttctacattccaatttttatatctttgaattatgtgattagatattaatttaatgataaaaccactctgaaagctcatctcac

SEQ ID NO: 456909 - DNA, 1486 bp, Homo sapiens
  misc_feature (160)..(160): n is a, c, g, or t
gcggcagcagggcctcacctcccatcccgcagggagcgagtggcgctatgtgctggtgagcaccgtccgcacctgtgccaagagcgacctggaccagcggcccaccaagagctggctcaagaagtttctgggcttcgttgtggaccccaaccaagtgaangtggctgtcacgcgggcccaggaggggctctgcctgatcggagaccacctccttctgcgctgctgccccctctggcgtagcctcctggacttctgcgaggctcagcagaccctcgtgcctgccggccaggtgcgcgtctgcaggaggccaactatgccttcctgaagagccctctccacctgcaaggtgccaggactgggagggaaagtccagggcccccccaccctccccaccaccctccgccatcagcctgcctgggccagcctgcctcctggcctcaggatctccctggggcaggaagtgggtggacttggaggaggaacggcaagggccggtccccacactcttgctcctcctgggcatctggggacaggaacacctctcagggtggccaagaggggcttccttgggaccagtgtaaggaagttctgctgtccctgggaagtctcagaaccaggaaggaaaccctgtggaggctgccctttgacctttggacgccacctgtaatcactctggatggtgtctgtggagttcaggtttattttctatttaaatgaactaaaagccagcatcctgccgggcgcggtggctcacgcccataatccagcactttgggaagccgaggcgggcagatcacctgaggtcaggagttcgagaccatcctggccaacatggtgaaaccccgtctccactaaaaatacaaaattagctgggcgtggtggcgggcgcctgtaatcccagctacttgggaggctgaggcaggagaatcgcttgactccaggaggcgcaggctgcagtgagctctgatggtaccactgcactccagcctgggtgacagagcgagaccctgtcttaaaaaaaaaaacaaaacaaaaccagcatctgttactggaacagagacctcagcccaagctcaggacaaggaggcctccctgggagagggggcctttctcccaccatcaccgcctgtgtccttcaggggctgctggagggcagcccaaagccaggggcccaccccgccccaccccaccccaccccaccctctgaaatgtgaaaagcctgcactcttcctgtgggctgcgcagtgggctcgggggttggggggtgccggggcgatgcttccaccctggactgagtgttcggggcagcctgctcggctgtatgtttctcgcacgctcacccgcttcagtgcggctctgtccctgctgccgcctccagtcctgagggaggggcttgccccaccttctacattccaatttttatatctttgaattatgtgattagatattaatttaatgataaaaccactctgaaagctcatctcac

SEQ ID NO: 456910 - DNA, 412 bp, Homo sapiens
ccctcacggattacctcaagccggccgacacttagggaaaatagaaaagaacctatgtgaatatcagggcagattccccaataggtcaggatggtcagtgatgtgcctggcctagtttttttagagacagggtctcacagtcttgcccaggctggagtgcagtagtgtgaagctagctcattgcagacttgaactactggactcaagtgatcctcctgcttcagcgtattgaatagctaggattgtacttgtgtggcaccacatctgactaattttaaaaatttgtatagagacaggatcttgctacattgcccaggctggtcatgaactctttgcctcaagcagtcctcttgcctcagccttccaaagtgctggtattatagttgtgagccactgtgccctgccaagtctc

SEQ ID NO: 456911 - DNA, 2921 bp, Homo sapiens
gagctagcggcgccctcccttatcgccttggcaacgacccagccgcgccgcgaggagagccgggaatggaggtcgtggcgtgaggggcgccgagcgaggggaggcgcgggccacgggagttccgggagttccggcgttgcccggcagtccgcagtcctcggcgggaaggctgtcccggcgcctcaggcagctctgcgtgggccggggtgacttcctcgcgatcccctgcgcgaggtgaagggcagggacctttgccgcgccttccacgcgccgtgccccaccggcgagtggctccatcttcctcagacttatcgctcgcggacaggcgccgtgggtctcccgggcctccgtaccgtcctccttcccagcggctccgggaagcggttccctgtcttcggacgcatttcacccgcgcggggagagcttcccgggaaggttccacggcggccgagggtttccgcgcccgggacgcgtttcggctgaggccgtgggtccagtccacgggttctgcccgcacggtccaatggccggggaggcggaggctcagttggacccatcattgcagggcttggtgatgtttgaggatgtgacggtatatttctccagggaggagtgggggctccttaatgtgacccagaagggcctataccgggatgtgatgctggagaactttgcactcgttagctcactgggacttgcaccttcgagatcccctgtgtttacccagctggaggatgatgaacagtcgtgggtgcccagctgggtggatgtgactccagtcagcagagcagaagccaggagaggttttggtcttgatggtttgtgtagagtggaggatgagagagcccatcctgagcatctaaagagctacagagtcatccagcaccaggacactcatagtgaggggaaaccaagaaggcacactgagcatggggcagctttcccacctggttccagttgtgggcaacagcaagaagtccatgtggcagagaagctgttcaaatgcagtgactgtgggaaggtgttcttaaaggcctttgccctccttgaccatctgataacgcattctgaagagagacccttcagatgcccaacaggcagaagtgctttcaagaagtcagctcatattaacccccgaaaaattcacactggagaaacagcccatgtgtgtaatgaatgtgggaaggccttcagttacccgtctaagctgaggaaacaccagaaggttcacacaggcataaaaccttttaagtgtagtgactgtggtaaaaccttcaaccgcaaagacgcacttgttctacaccagaggattcacactggagaaaggccttacgagtgcagcaaatgtggtaaaaccttcagtgttctgtctaccctcattcggcaccggaaagtgcacattggagaaaggccctatgagtgtgcagaatgtgggaagttctttaaatacaataatagcttcattcttcaccagagagttcacactggagaaaggccttttgaatgcaagcaatgtgggaaaggctacgtgacccgttcaggcctctatcagcactggaaagtccacactggggaacggccctatgaatgtagcctgtgtgggaaaaccttcactaccagatcctaccgcaatcggcaccagcagttccacactgaagagaggtcttatgaatgtacagagtgtgggaaggccttcaaacatagttccaccctccttcagcacaagaaagtccatactccagaaaggcgtcaggaggacagggcacatgggaaggtcgttagctgctagcaccgtgttcatcaggaaaggtcttattccagaaaggaggttaaggagagtggccgtgagagtgccatccgaaagaagctaaaccttgcacatcccaacacccaccccagggagagttcccgtgtgtgcctggtgtgtgggacgctttcgggagccacattgcactctgacttgcctggggctgttggcagtgtcacatcactgagtttatccaccgccatccacctctatccaccccataaggtccctacagcaagtgggacagcagaccttgtgctccttgctctaaacagtagagaatcgttaatagtggagcccaaaacaggcctcattccctacccttgactggtttagctgtggacatgacccacctctggccggaggagctgagctggtatctgctgggggcttcctgggaaggtttaccattttcatggaaatggttgacattacacatggtatttgtcatgccctagcatggactgtctcatactgctctggactatgtggtaataaaggctttattgtttaagccgcttaaaattttttttttattttttttttgagatggtcttattctgttgcccaggctggaatgcagtggtgccatcatagctcaccacagccttgaactgctggtctcaagggatcttcctgcttcagcctcctgagtagctggcactacaggtgtgcgccatcacacctggctaatttttttttttcatttgtggacagggtcttgctatattgcccaagctggtctcgaactctgagcctcaagctatcctcctgccttggcctcccaaagtgctgggagccactgtgcctggcctagtttttttagagacagggtctcacagtcttgcccaggctggagtgcagtagtgtgaagctagctcattgcagacttgaactactggactcaagtgatcctcctgcttcagcgtattgaatagctaggattgtacttgtgtggcaccacatctgactaattttaaaaatttgtatagagacaggatcttgctacattgcccaggctggtcatgaactctttgcctcaagcagtcctcttgcctcagccttccaaagtgctggtattatagttgtgagccactgtgccctgccaagtctc

SEQ ID NO: 456912 - DNA, 2856 bp, Homo sapiens
gagctagcggcgccctcccttatcgccttggcaacgacccagccgcgccgcgaggagagccgggaatggaggtcgtggcgtgaggggcgccgagcgaggggaggcgcgggccacgggagttccgggagttccggcgttgcccggcagtccgcagtcctcggcgggaaggctgtcccggcgcctcaggcagctctgcgtgggccggggtgacttcctcgcgatcccctgcgcgaggtgaagggcagggacctttgccgcgccttccacgcgccgtgccccaccggcgagtggctccatcttcctcagacttatcgctcgcggacaggcgccgtgggtctcccgggcctccgtaccgtcctccttcccagcggctccgggaagcggttccctgtcttcggacgcatttcacccgcgcggggagagcttcccgggaaggttccacggcggccgagggtttccgcgcccgggacgcgtttcggctgaggccgtgggtccagtccacgggttctgcccgcacggtccaatggccggggaggcggagggaggagtgggggctccttaatgtgacccagaagggcctataccgggatgtgatgctggagaactttgcactcgttagctcactgggacttgcaccttcgagatcccctgtgtttacccagctggaggatgatgaacagtcgtgggtgcccagctgggtggatgtgactccagtcagcagagcagaagccaggagaggttttggtcttgatggtttgtgtagagtggaggatgagagagcccatcctgagcatctaaagagctacagagtcatccagcaccaggacactcatagtgaggggaaaccaagaaggcacactgagcatggggcagctttcccacctggttccagttgtgggcaacagcaagaagtccatgtggcagagaagctgttcaaatgcagtgactgtgggaaggtgttcttaaaggcctttgccctccttgaccatctgataacgcattctgaagagagacccttcagatgcccaacaggcagaagtgctttcaagaagtcagctcatattaacccccgaaaaattcacactggagaaacagcccatgtgtgtaatgaatgtgggaaggccttcagttacccgtctaagctgaggaaacaccagaaggttcacacaggcataaaaccttttaagtgtagtgactgtggtaaaaccttcaaccgcaaagacgcacttgttctacaccagaggattcacactggagaaaggccttacgagtgcagcaaatgtggtaaaaccttcagtgttctgtctaccctcattcggcaccggaaagtgcacattggagaaaggccctatgagtgtgcagaatgtgggaagttctttaaatacaataatagcttcattcttcaccagagagttcacactggagaaaggccttttgaatgcaagcaatgtgggaaaggctacgtgacccgttcaggcctctatcagcactggaaagtccacactggggaacggccctatgaatgtagcctgtgtgggaaaaccttcactaccagatcctaccgcaatcggcaccagcagttccacactgaagagaggtcttatgaatgtacagagtgtgggaaggccttcaaacatagttccaccctccttcagcacaagaaagtccatactccagaaaggcgtcaggaggacagggcacatgggaaggtcgttagctgctagcaccgtgttcatcaggaaaggtcttattccagaaaggaggttaaggagagtggccgtgagagtgccatccgaaagaagctaaaccttgcacatcccaacacccaccccagggagagttcccgtgtgtgcctggtgtgtgggacgctttcgggagccacattgcactctgacttgcctggggctgttggcagtgtcacatcactgagtttatccaccgccatccacctctatccaccccataaggtccctacagcaagtgggacagcagaccttgtgctccttgctctaaacagtagagaatcgttaatagtggagcccaaaacaggcctcattccctacccttgactggtttagctgtggacatgacccacctctggccggaggagctgagctggtatctgctgggggcttcctgggaaggtttaccattttcatggaaatggttgacattacacatggtatttgtcatgccctagcatggactgtctcatactgctctggactatgtggtaataaaggctttattgtttaagccgcttaaaattttttttttattttttttttgagatggtcttattctgttgcccaggctggaatgcagtggtgccatcatagctcaccacagccttgaactgctggtctcaagggatcttcctgcttcagcctcctgagtagctggcactacaggtgtgcgccatcacacctggctaatttttttttttcatttgtggacagggtcttgctatattgcccaagctggtctcgaactctgagcctcaagctatcctcctgccttggcctcccaaagtgctgggagccactgtgcctggcctagtttttttagagacagggtctcacagtcttgcccaggctggagtgcagtagtgtgaagctagctcattgcagacttgaactactggactcaagtgatcctcctgcttcagcgtattgaatagctaggattgtacttgtgtggcaccacatctgactaattttaaaaatttgtatagagacaggatcttgctacattgcccaggctggtcatgaactctttgcctcaagcagtcctcttgcctcagccttccaaagtgctggtattatagttgtgagccactgtgccctgccaagtctc

SEQ ID NO: 456913 - DNA, 2320 bp, Homo sapiens
gagctagcggcgccctcccttatcgccttggcaacgacccagccgcgccgcgaggagagccgggaatggaggtcgtggcgtgaggggcgccgagcgaggggaggcgcgggccacgggagttccgggagttccggcgttgcccggcagtccgcagtcctcggcgggaaggctgtcccggcgcctcaggcagctctgcgtgggccggggtgacttcctcgcgatcccctgcgcgaggtgaagggcagggacctttgccgcgccttccacgcgccgtgccccaccggcgagtggctccatcttcctcagacttatcgctcgcggacaggcgccgtgggtctcccgggcctccgtaccgtcctccttcccagcggctccgggaagcggttccctgtcttcggacgcatttcacccgcgcggggagagcttcccgggaaggttccacggcggccgagggtttccgcgcccgggacgcgtttcggctgaggccgtgggtccagtccacgggttctgcccgcacggtccaatggccggggaggcggaggctcagttggacccatcattgcagggcttggtgatgtttgaggatgtgacggtatatttctccagggaggagtgggggctccttaatgtgacccagaagggcctataccgggatgtgatgctggagaactttgcactcgttagctcactgggacttgcaccttcgagatcccctgtgtttacccagctggaggatgatgaacagtcgtgggtgcccagctgggtggatgtgactccagtcagcagagcagaagccaggagaggttttggtcttgatggtttgtgtagagtggaggatgagagagcccatcctgagcatctaaagagctacagagtcatccagcaccaggacactcatagtgaggggaaaccaagaaggcacactgagcatggggcagctttcccacctggttccagttgtgggcaacagcaagaagtccatgtggcagagaagctgttcaaatgcagtgactgtgggaaggtgttcttaaaggcctttgccctccttgaccatctgataacgcattctgaagagagacccttcagatgcccaacaggcagaagtgctttcaagaagtcagctcatattaacccccgaaaaattcacactggagaaacagcccatgtgtgtaatgaatgtgggaaggccttcagttacccgtctaagctgaggaaacaccagaaggttcacacaggcataaaaccttttaagtgtagtgactgtggtaaaaccttcaaccgcaaagacgcacttgttctacaccagaggattcacactggagaaaggccttacgagtgcagcaaatgtggtaaaaccttcagtgttctgtctaccctcattcggcaccggaaagtgcacattggagaaaggccctatgagtgtgcagaatgtgggaagttctttaaatacaataatagcttcattcttcaccagagagttcacactggagaaaggccttttgaatgcaagcaatgtgggaaaggctacgtgacccgttcaggcctctatcagcactggaaagtccacactggggaacggccctatgaatgtagcctgtgtgggaaaaccttcactaccagatcctaccgcaatcggcaccagcagttccacactgaagagaggtcttatgaatgtacagagtgtgggaaggccttcaaacatagttccaccctccttcagcacaagaaagtccatactccagaaaggcgtcaggaggacagggcacatgggaaggtcgttagctgctagcaccgtgttcatcaggaaaggtcttattccagaaaggaggttaaggagagtggccgtgagagtgccatccgaaagaagctaaaccttgcacatcccaacacccaccccagggagagttcccgtgtgtgcctggtgtgtgggacgctttcgggagccacattgcactctgacttgcctggggctgttggcagtgtcacatcactgagtttatccaccgccatccacctctatccaccccataaggtccctacagcaagtgggacagcagaccttgtgctccttgctctaaacagtagagaatcgttaatagtggagcccaaaacaggcctcattccctacccttgactggtttagctgtggacatgacccacctctggccggaggagctgagctggtatctgctgggggcttcctgggaaggtttaccattttcatggaaatggttgacattacacatggtatttgtcatgccctagcatggactgtctcatactgctctggactatgtggtaataaaggctttattgttta

SEQ ID NO: 456914 - DNA, 2867 bp, Homo sapiens
gagctagcggcgccctcccttatcgccttggcaacgacccagccgcgccgcgaggagagccgggaatggaggtcgtggcgtgaggggcgccgagcgaggggaggcgcgggccacgggagttccgggagttccggcgttgcccggcagtccgcagtcctcggcgggaaggctgtcccggcgcctcaggcagctctgcgtgggccggggtgacttcctcgcgatcccctgcgcgaggtgaagggcagggacctttgccgcgccttccacgcgccgtgccccaccggcgagtggctccatcttcctcagacttatcgctcgcggacaggcgccgtgggtctcccgggcctccgtaccgtcctccttcccagcggctccgggaagcggttccctgtcttcggacgcatttcacccgcgcggggagagcttcccgggaaggttccacggcggccgagggtttccgcgcccgggacgcgtttcggctgaggccgtgggtccagtccacgggttctgcccgcacggtccaatggccggggaggcggaggctcagttggacccatcattgcagggcttggtgatgtttgaggatgtgacggtatatttctccagggaggagtgggggctccttaatgtgacccagaagggcctataccgggatgtgatgctggagaactttgcactcgttagctcactgggacttgcaccttcgagatcccctgtgtttacccagctggaggatgatgaacagtcgtgggtgcccagctgggtggatgtgactccagtcagcagagcagaagccaggagaggttttggtcttgatggtttgtgtagagtggaggatgagagagcccatcctgagcatctaaagagctacagagtcatccagcaccaggacactcatagtgaggggaaaccaagaaggcacactgagcatggggcagctttcccacctggttccagttgtgggcaacagcaagaagtccatgtggcagagaagctgttcaaatgcagtgactgtgggaaggtgttcttaaaggcctttgccctccttgaccatctgataacgcattctgaagagagacccttcagatgcccaacaggcagaagtgctttcaagaagtcagctcatattaacccccgaaaaattcacactggagaaacagcccatgtgtgtaatgaatgtgggaaggccttcagttacccgtctaagctgaggaaacaccagaaggttcacacaggcataaaaccttttaagtgtagtgactgtggtaaaaccttcaaccgcaaagacgcacttgttctacaccagaggattcacactggagaaaggccttacgagtgcagcaaatgtggtaaaacgccctatgagtgtgcagaatgtgggaagttctttaaatacaataatagcttcattcttcaccagagagttcacactggagaaaggccttttgaatgcaagcaatgtgggaaaggctacgtgacccgttcaggcctctatcagcactggaaagtccacactggggaacggccctatgaatgtagcctgtgtgggaaaaccttcactaccagatcctaccgcaatcggcaccagcagttccacactgaagagaggtcttatgaatgtacagagtgtgggaaggccttcaaacatagttccaccctccttcagcacaagaaagtccatactccagaaaggcgtcaggaggacagggcacatgggaaggtcgttagctgctagcaccgtgttcatcaggaaaggtcttattccagaaaggaggttaaggagagtggccgtgagagtgccatccgaaagaagctaaaccttgcacatcccaacacccaccccagggagagttcccgtgtgtgcctggtgtgtgggacgctttcgggagccacattgcactctgacttgcctggggctgttggcagtgtcacatcactgagtttatccaccgccatccacctctatccaccccataaggtccctacagcaagtgggacagcagaccttgtgctccttgctctaaacagtagagaatcgttaatagtggagcccaaaacaggcctcattccctacccttgactggtttagctgtggacatgacccacctctggccggaggagctgagctggtatctgctgggggcttcctgggaaggtttaccattttcatggaaatggttgacattacacatggtatttgtcatgccctagcatggactgtctcatactgctctggactatgtggtaataaaggctttattgtttaagccgcttaaaattttttttttattttttttttgagatggtcttattctgttgcccaggctggaatgcagtggtgccatcatagctcaccacagccttgaactgctggtctcaagggatcttcctgcttcagcctcctgagtagctggcactacaggtgtgcgccatcacacctggctaatttttttttttcatttgtggacagggtcttgctatattgcccaagctggtctcgaactctgagcctcaagctatcctcctgccttggcctcccaaagtgctgggagccactgtgcctggcctagtttttttagagacagggtctcacagtcttgcccaggctggagtgcagtagtgtgaagctagctcattgcagacttgaactactggactcaagtgatcctcctgcttcagcgtattgaatagctaggattgtacttgtgtggcaccacatctgactaattttaaaaatttgtatagagacaggatcttgctacattgcccaggctggtcatgaactctttgcctcaagcagtcctcttgcctcagccttccaaagtgctggtattatagttgtgagccactgtgccctgccaagtctc

SEQ ID NO: 456915 - DNA, 968 bp, Homo sapiens
  misc_feature (816)..(816): n is a, c, g, or t
gagctagcggcgccctcccttatcgccttggcaacgacccagccgcgccgcgaggagagccgggaatggaggtcgtggcgtgaggggcgccgagcgaggggaggcgcgggccacgggagttccgggagttccggcgttgcccggcagtccgcagtcctcggcgggaaggctgtcccggcgcctcaggcagctctgcgtgggccggggtgacttcctcgcgatcccctgcgcgaggtgaagggcagggacctttgccgcgccttccacgcgccgtgccccaccggcgagtggctccatcttcctcagacttatcgctcgcggacaggcgccgtgggtctcccgggcctccgtaccgtcctccttcccagcggctccgggaagcggttccctgtcttcggacgcatttcacccgcgcggggagagcttcccgggaaggttccacggcggccgagggtttccgcgcccgggacgcgtttcggctgaggccgtgggtccagtccacgggttctgcccgcacggtccaatggccggggaggcggaggctcagttggacccatcattgcagggcttggtgatgtttgaggatgtgacggtatatttctccagggaggagtgggggctccttaatgtgacccagaagggcctataccgggatgtgatgctggagaactttgcactcgttagctcactgggacttgcaccttcgagatcccctgtgtttacccagctggaggatgatgaacagtcgtgggtgcccagctgggtggatgtgactccagtcagcagagcagaagccaggagaggttttggtcttgnggttggcgacggggagagaagccacgggagtaaaggcaagcgtcggacggacaggggggacaaaggggcgggggggcccgggctggggcgaaccggcgcaccacgcgggcgggtgaggccccaatgacacacacggcagacagcaagaacaa

SEQ ID NO: 456916 - DNA, 736 bp, Homo sapiens
cttggcaacgacccagccgcgccgcgaggagagccgggaatggaggtcgtggcgtgaggggcgccgagcgaggggaggcgcgggccacgggagttccgggagttccggcgttgcccggcagtccgcagtcctcggcgggaaggctgtcccggcgcctcaggcagctctgcgtgggccggggtgacttcctcgcgatcccctgcgcgaggtgaagggcagggacctttgccgcgccttccacgcgccgtgccccaccggcgagtggctccatcttcctcagacttatcgctcgcggacaggcgccgtgggtctcccgggcctccgtaccgtcctccttcccagcggctccgggaagcggttccctgtcttcggacgcatttcacccgcgcggggagagcttcccgggaaggttccacggcggccgagggtttccgcgcccgggacgcgtttcggctgaggccgtgggtccagtccacgggttctgcccgcacggtccaatggccggggaggcggaggtgagcagaggatgcctccgaggaatgagggggcccaccaggtggggggcggcgtgtgccagggcagagttggaggagggcaggagatctgcgtatgattccagggggaggtctttgatgcacggctggggcatgcccttggcagtgggagccattggagatgtgccgcaggactgggacaggatggggtcgtagttgctgtgccaggccctctggagacg
